(19) United States
(12) Patent Application Publication
(10) Pub. No.: US 2024/0390496 A1
(43) Pub. Date: Nov. 28, 2024

(54) SINGLE-CHAIN AND MULTI-CHAIN SYNTHETIC ANTIGEN RECEPTORS FOR DIVERSE IMMUNE CELLS

(71) Applicant: UNIVERSITY OF SOUTHERN CALIFORNIA, Los Angeles, CA (US)

(72) Inventor: Preet M. CHAUDHARY, Toluca Lake, CA (US)

(21) Appl. No.: 18/275,957

(22) PCT Filed: Feb. 21, 2022
(86) PCT No.: PCT/US2022/017177

§ 371 Date: Jan. 25, 2024

(51) Int. Cl. A61K 39/00; C07K 14/725; C07K 16/28

(52) U.S. Cl. CPC A61K 39/464412; A61K 39/4613; A61K 39/4631; C07K 14/7051; C07K 16/2803; C07K 2317/732

(57) ABSTRACT

The disclosure provides single-chain and multi-chain synthetic antigen receptors, methods of making such synthetic antigen receptors and uses thereof for the treatment of diseases and disorder.

### CROSS REFERENCE TO RELATED APPLICATIONS

[0001] The application claims priority under 35 U.S.C. § 119 to U.S. Provisional Application Ser. No. 63/151,421, filed Feb. 19, 2021 and U.S. Provisional Application No. 63/245,181, filed Sep. 16, 2021, the disclosures of which are incorporated herein by reference for all purposes.

### TECHNICAL FIELD

[0002] The present disclosure relates to the field of biotechnology, and more specifically, to single-chain and multi-chain synthetic antigen receptors.

### INCORPORATION BY REFERENCE OF SEQUENCE LISTING

[0003] Accompanying this filing is a Sequence Listing entitled “NK-DNA-PRT-1-11231_ST25.txt”, created on Feb. 21, 2022 and having 34,352,306 bytes of data, machine formatted on IBM-PC, MS-Windows operating system. The sequence listing is hereby incorporated herein by reference in its entirety for all purposes.

### BACKGROUND

[0004] CARs are synthetic immune receptors, which can redirect T cells to selectively kill tumor cells. Despite the success with CAR-T cells, there are several limitations to this approach, including toxicities such as “Cytokine release syndrome’ (CRS) and neurotoxicities.

[0005] In contrast to CAR-T, NK (natural killer) cells are naturally endowed with cytolytic functions and antiviral immunity but lack TCRs that could cause GvHD. CAR-NK cells, in contrast to CAR-T, are also less likely to result in excessive cytokine production.

[0006] The 2^{nd} generation CARs in current clinical use are a fusion of several different polypeptides. For example, Kymriah comprises of a murine scFv (FMC63), human CD8 hinge and transmembrane domains, a human 4-1BB costimulatory domain and a human CD3z activation domain. These domains have been stitched together in somewhat arbitrary manner and the resulting construct suffers from several problems, such as non-specific aggregation, tonic signaling and lack of physiological regulation.

[0007] Without wishing to be bound by theory, these problems are likely to be compounded when scFvs are used to design CARs having bispecific, bivalent or biparatopic antigen binding moieties.

[0008] Another major limitation of most of the above next generation SAR designs is that they are primarily active in T cells and are not functional in other immune cells, such as NK cells, monocytes/macrophages, dendritic cells and neutrophils.

[0009] To overcome some of the design limitation of conventional 2^{nd} generation CARs, several alternative designs, collectively termed next generation CARs, have been described, including Ab-TCR (WO 2017/070608 A1 incorporated herein by reference), TCR receptor fusion proteins or TFP (WO 2016/187349 A1 incorporated herein by reference), Synthetic Immune Receptors (SIRs) (see, WO 2018/102795 A1, incorporated herein by reference), Tri-functional T cell antigen coupler (Tri-TAC) (see, WO 2015/117229 A1, incorporated herein by reference). These alternative CAR designs, in general, lack a co-stimulatory domain.

### SUMMARY

[0010] The disclosure provides unispecific, bispecific, multispecific and universal next generation SAR designs.

[0011] The disclosure provides Synthetic antigen-receptors (SARs) with specific configuration of extracellular, transmembrane and cytosolic domains that when expressed in a immune-cell (e.g., T cell NK cell, NKT cell, monocyte, macrophage, neutrophil etc.), demonstrate improved immune-cell activation, target cell killing, cytokine secretion (e.g., IL-2, interferon-gamma, and TNFa) and in vivo activity as compared to a immune-cell that expresses a conventional chimeric antigen receptor (CAR), e.g., a second generation CAR that expresses a CD3z activation domain and a 41BB or CD28 costimulatory domain.

[0012] The disclosure also provides novel accessory modules that can be co-expressed with the SARs of the disclosure. The disclosure provides vectors comprising nucleic acids encoding polypeptides for a) membrane anchored low-affinity variants of cytokines (e.g., IL-2 and/or IL-15); b) membrane anchored cytokines with epitope tags; and c) multi-purpose gene switches that serve suicide, survival and marker functions.

[0013] The disclosure provides a method of producing a cell that expresses any one or more of the accessory modules with any one or more of the single chain, or multi-chain SARs of the disclosure. The accessory modules can be expressed in a cell without a SAR. The disclosure also provides optimized vectors with short promoters and internal ribosomal sites that are optimized for expression of the accessory modules and/or SARs of the disclosure.

[0014] In one aspect, the disclosure relates to single chain novel next generation SAR designs that provide physiological signaling. More importantly, in another aspect, the disclosure relates to multi-chain novel next generation SAR designs.

[0015] In another aspect, the disclosure relates to novel next generation synthetic antigen receptor (SAR) designs that are active in a variety of immune cells, including T cells, NKT cells, NK cells, monocytes/macrophages and neutrophils etc. In another aspect, the disclosure relates to novel SAR design, called a universal TCR-SAR (or uTCR-SAR), that confers T cell receptor like antigen binding specificity to any cell.

[0016] The disclosure also provides a non-T cell, including any cell, with T cell like binding properties, including the ability to bind to a peptide antigen in association with an MHC (or HLA) molecule. The disclosure provides a general method for generating such cells and their use in the treatment of various diseases.

[0017] The disclosure also provides a multipurpose switch that can be used in adoptive cell therapy for providing cell survival, detection, tracking, enrichment, selection and elimination functions.

[0018] The disclosure also provides a universal method for generation of a chimeric fusion protein involving a Type I and Type II transmembrane protein. The method can be used to generate synthetic antigen receptors incorporating the antigen binding domain of a Type I protein and the cytosolic, transmembrane, hinge and/or extracellular antigen binding domain of a Type II protein.

[0019] Also provided herein are nucleic acids that encode any of the single chain, double-chain or multi-chain SARs and/or accessory modules described herein. Also provided herein are sets of nucleic acids that together encode any of the single chain, double-chain and multi-chain SARs and/or accessory modules described herein.

[0020] In some embodiments, according to any of the SARs (such as isolated SARs) described above, there is provided an effector cell (e.g., T cell, NK cell, macrophage, iPSC etc.) presenting on its surface the SAR, wherein the effector cell comprises one or more vectors with one or more promoters comprising one or more nucleic acids encoding the one or more polypeptide chains of the SAR and/or the optional accessory modules.

[0021] Also provided herein are mammalian cells that include any of the nucleic acids described herein that encode any of the single chain, double chain and multi-chain SARs and/or accessory modules described herein. Also provided herein are mammalian cells that include any of the sets of nucleic acids described herein that together encode any of the single chain, double chain and multi-chain SARs and/or accessory modules described herein.

[0022] In some embodiments, the disclosure provides that, in contrast to a TCR, a SAR of the disclosure can be expressed in any mammalian cell and be functionally active. In an embodiment, the mammalian cells is a T cell, NK cell, macrophage, granulocyte etc. In some embodiments of any of the mammalian cells described herein, the mammalian cell is selected from the group of: a CD8⁺ T cell, a CD4⁺ T cell, a memory T cell, naïve T cell, T stem cell, a Treg cell, natural killer T (NKT) cell, iNKT (innatet natural killer cell), NK cell, g-NK cell, memory like NK cells, cytokine induced killer cell (CIK), iPSC-derived NK cell, α/β T cell, γ/δ T cell, iPSC-derived T cell, B cell, a macrophage/monocyte, iPSC. In some embodiments of any of the mammalian cells described herein, the mammalian cell is selected from the group of: iPSC (induced pluripotent stem cell or embryonic stem cell or hematopoietic stem cell that can give rise to an immune effector cell (e.g., a T cell, NK cell or NKT cell). In some embodiment, the mammalian cell is an immortalized cell line, such as NK92, NK92MI, YTS or a derivative thereof. In some embodiments of any of the mammalian cells described herein, the mammalian cell is a mammalian cell obtained from a subject. In some embodiments of any of the mammalian cells described herein, the subject is diagnosed or identified as having a cancer. In some embodiments of any of the mammalian cells described herein, the subject is human. In some embodiment, the cell is autologous. In some embodiment, the cell is allogeneic.

[0023] Also, provided herein are single chain and multichain TCRs that can be functionally expressed in cells other than T cells including, but not limited to, NK cells, monocytes, macrophages, dendritic cells and granulocytes.

[0024] Also provided herein are pharmaceutical compositions that include any of the mammalian cells described herein and a pharmaceutically acceptable carrier. Also provided herein are kits that include any of the pharmaceutical compositions described herein.

[0025] Also provided herein are pharmaceutical compositions that include any of the nucleic acids described herein that encode any of the single chain, double chain and multi-chain SARs and/or accessory modules described herein, or any of the sets of nucleic acids described herein that together encode any of the single chain, double chain and multi chain SARs and/or accessory modules described herein, and a pharmaceutically acceptable carrier. Also provided herein are kits that include any of the pharmaceutical compositions described herein.

[0026] In some embodiments, there is provided a method of killing a target cell presenting one or more target antigens, comprising contacting the target cell with an effector cell expressing a SAR according to any of the SARs (such as isolated SARs) described above, wherein the SAR specifically binds to one or more target antigens.

[0027] In some embodiments, according to any of the methods of killing a target cell described above, the contacting is in vivo. In some embodiments, the contacting is in vitro.

[0028] In some embodiment, there are provided methods for detection, isolation, purification, expansion, enrichment and elimination of cells expressing any of the SAR described herein.

[0029] Also provided herein are methods of generating a cell expressing a single chain, double chain and multi-chain SAR and/or accessory modules that include introducing into a mammalian cell any of the nucleic acids described herein that encode any of the SARs and accessory modules described herein, or any of the sets of nucleic acids described herein that encode any of the multi-chain SARs described herein. In some embodiments of any of the methods described herein, the mammalian cell is a human cell. In some embodiments of any of the methods described herein, the mammalian cell is a cell selected from the group consisting of: a CD8⁺ T cell, a CD4⁺ T cell, a memory T cell, a Treg cell, natural killer T cell, B cell, NK cells, and a macrophage/monocyte. In some embodiments of any of the methods described herein, the mammalian cell is a mammalian cell obtained from a subject. In some embodiments of any of the methods described herein, the subject is diagnosed or identified as having a cancer. Some embodiments of any of the methods described herein further include, after the introducing step, culturing the cell in a liquid culture medium. Some embodiments of any of the methods described herein further include, before the introducing step, obtaining the mammalian cell from the subject.

[0030] Also provided herein are methods of treating a disease (e.g., cancer, infection, allergy, immune disorder etc.) in a subject that include administering a therapeutically effective amount of any of the mammalian cell described herein to the subject. Some embodiments of any of the methods described herein further include, prior to the administering step, obtaining an initial cell from the subject; and introducing any of the nucleic acids descried herein that encode any of the single chain, double chain, multi-chain SARs and/or accessory modules described herein or any of the sets of nucleic acids described herein that together encode any of the single chain, double chain, multi-chain SARs and/or accessory modules described herein into the initial cell, to yield the mammalian cell that is administered to the subject. Some embodiments of any of the methods described herein further include, between the introducing step and the administering step, a step of culturing the cell that is administered to the subject in a liquid culture medium. In some embodiments of any of the methods described herein, the subject is human.

[0031] In some embodiments of any of the single-chain SARs described herein, the heterologous antigen-binding domain is selected from the group of: an antibody, an antibody fragment (vL, vH, Fab etc.) a scFv, a (scFv)₂, a VHH domain, FHVH (a fully human vH domain), a single domain antibody, a non-immunoglobulin antigen binding scaffold (e.g., Centyrin, affibody, ZIP domain, an adaptor etc.), a VNAR domain, a ligand, a TCR, variable domain (Va, Vb, Vg, Vd) of a TCR and a receptor. In some embodiments of any of the single-chain SARs described herein, the heterologous antigen-binding domain comprises a scFv.

[0032] In some embodiments of any of the single-chain SARs described herein, the heterologous antigen-binding region binds specifically to a single antigen. In some embodiments of any of the single-chain SARs described herein, the single antigen is a tumor antigen. In some embodiments of any of the single-chain SARs described herein, the tumor antigen is selected from an antigen listed in Table B.

[0033] In some embodiments of any of the single-chain SARs described herein, when going in the N-terminal to the C-terminal direction or in the C-terminal to the N-terminal direction, the single-chain SARs includes the non-naturally occurring extracellular antigen binding domain(s), the optional linker, the optional extracellular ligand-binding domain(s) of a naturally occurring receptor, the optional hinge domain, the transmembrane domain, the optional cytosolic co-stimulatory domain and the optional cytosolic primary signaling domain comprising the ITAM. In some embodiments of any of the single-chain SARs described herein, the transmembrane domain and the optional cytosolic primary signaling domain directly abut each other. In some embodiments of any of the single-chain SARs described herein, the transmembrane domain and the optional cytosolic primary signaling domain are separated by 1 to 500 amino acids (e.g., 1 to 250 amino acids, or 1 to 50 amino acids). In some embodiments of any of the single-chain SARs described herein, the optional primary signaling domain and the costimulatory domain directly abut each other. In some embodiments of any of the single-chain SARs described herein, the optional primary signaling domain and the costimulatory domain are separated by 1 to 500 amino acids (e.g., 1 to 250 amino acids, or 1 to 50 amino acids). In some embodiments of any of the single-chain SARs described herein, the costimulatory domain and the ITAM directly abut each other. In some embodiments of any of the single-chain SARs described herein, the costimulatory domain and the ITAM are separated by 1 to 500 amino acids (e.g., 1 to 250 amino acids, or 1 to 50 amino acids).

[0034] In some embodiments of any of the single-chain SARs described herein, when going in the N-terminal to the C-terminal direction or in the C-terminal to the N-terminal direction, the single-chain SAR includes the non-naturally occurring extracellular antigen binding domain(s), the optional linker, the optional extracellular ligand-binding domain(s) of a naturally occurring receptor, the optional hinge domain, the transmembrane domain, the costimulatory domain, the primary signaling domain, and the ITAM.

[0035] In some embodiments of any of the single-chain SARs described herein, when going in the N-terminal to the C-terminal direction or in the C-terminal to the N-terminal direction, the single-chain SAR includes the non-naturally occurring extracellular antigen binding domain(s), the transmembrane domain, the primary signaling domain, the ITAM, and the costimulatory domain.

[0036] In some embodiments of any of the single-chain SARs described herein, when going in the N-terminal to the C-terminal direction or in the C-terminal to the N-terminal direction, the single-chain synthetic antigen receptor includes the non-naturally occurring extracellular antigen binding domain(s), the transmembrane domain, the second intracellular signaling domain, the ITAM, and the first intracellular signaling domain.

[0037] In some embodiments of any of the single-chain SARs described herein, when going to the N-terminal to the C-terminal direction or in the C-terminal to the N-terminal direction, the single-chain synthetic antigen receptor includes the heterologous extracellular antigen binding domain(s), the transmembrane domain, the ITAM, the primary signaling domain, and the costimulatory domain.

[0038] In some embodiments of any of the single-chain SARs described herein, when going to the N-terminal to the C-terminal direction or in the C-terminal to the N-terminal direction, the single-chain synthetic antigen receptor includes the non-naturally occurring extracellular antigen binding domain(s), the transmembrane domain, the ITAM, the second intracellular signaling domain, and the first intracellular signaling domain.

[0039] In some embodiments of any of the single-chain SARs described herein, the extracellular antigen-binding domain and the transmembrane domain directly abut each other. In some embodiments of any of the single-chain SARs described herein, the extracellular antigen-binding domain and the transmembrane domain are separated by 1 to 500 amino acids (e.g., 1 to 250 amino acids, or 1 to 50 amino acids).

[0040] In some embodiments of any of the single-chain SARs described herein, the primary signaling domain is from CD3z. In some embodiments of any of the single-chain SARs described herein, the primary signaling domain is from FcRγ. In some embodiments of any of the single-chain SARs described herein, the primary signaling domain is from DAP10. In some embodiments of any of the single-chain SARs described herein, the primary signaling domain is from DAP12.

[0041] Also provided herein are nucleic acids that include a nucleotide sequence encoding any of the single-chain SARs described herein. Also provided herein are vectors that include any of the nucleic acids described herein that include a nucleotide sequence encoding any of the single-chain SARs described herein.

[0042] Also provided herein are mammalian cells that include any of the vectors described herein. In some embodiments of any of the mammalian cells described herein, the mammalian cell is a T cell, NK cell, macrophage, or an iPSC.

[0043] Also provided herein are methods of generating a SAR-expressing cell, the method comprising introducing into a mammalian cell any of the nucleic acids described herein or any of the vectors described herein. In some embodiments of any of the methods described herein, the mammalian cell is a human cell. In some embodiments of any of the methods described herein, the mammalian cell is a cell selected from the group of: a CD8⁺ T cell, a CD4⁺ T cell, naïve T cell, a memory T cell, a Treg cell, natural killer T cell, an NK cell, B cell, and a macrophage/monocyte. In some embodiments of any of the methods described herein, the mammalian cell is a cell selected from the group of: iPSC (induced pluripotent stem cell or embryonic stem cell or hematopoietic stem cell that can give rise to an immune effector cell (e.g., a T cell, NK cell or NKT cell). In some embodiment, the mammalian cell is an immortalized cell line, such as NK92, NK92MI or a derivative thereof. In some embodiments of any of the methods described herein, the mammalian cell is a mammalian cell obtained from a subject. In some embodiments of any of the methods described herein, the subject is diagnosed or identified as having a cancer. Some embodiments of any of the methods described herein further include, after the introducing step: culturing the cell in a liquid culture medium. Some embodiments of any of the methods described herein further include, before the introducing step: obtaining the mammalian cell from the subject.

[0044] Also provided herein are methods of treating a cancer in a subject that include administering a therapeutically effective amount of any of the mammalian cells described herein to the subject. Some embodiments of any of the methods described herein further include, prior to the administering step, obtaining an initial cell from the subject; and introducing any of the nucleic acids described herein or any of the vectors described herein into the initial cell, to yield the mammalian cell that is administered to the subject. Some embodiments of any of the methods described herein further include, between the introducing step and the administering step, a step of culturing the cell that is administered to the subject in a liquid culture medium. In some embodiments of any of the methods described herein, the subject is human.

[0045] Provided herein are multi-chain SARs that include at least one first polypeptide that includes: an extracellular antigen-binding domain; an optional hinge domain, a transmembrane domain; and an optional cytosolic domain.

[0046] In some embodiments of any of the multi-chain SARs described herein, the extracellular antigen-binding domain is selected from the group of: Vα, Vβ, Vγ, Vδ, vL, vH domain, a scFv, a (scFv)₂, a VHH domain, FHVH (a fully human vH domain), a single domain antibody, a non-immunoglobulin antigen binding scaffold, a VNAR domain, a ligand and a receptor. In some embodiments of any of the multi-chain SARs described herein, the extracellular antigen-binding domain comprises a scFv.

[0047] In some embodiments of any of the multi-chain SARs described herein, the at least one first polypeptide includes the extracellular antigen-binding region that binds specifically to a single antigen. In some embodiments of any of the multi-chain SARs described herein, the single antigen is a tumor antigen.

[0048] In some embodiments of any of the multi-chain SARs described herein, the SAR lacks an ITAM but recruits a signaling protein comprising a primary stimulating domain containing an ITAM. In some embodiments of any of the multi-chain SARs described herein, the SARs recruits a signaling protein selected from the group of CD3z, FcRγ, DAP10 and/DAP10.

[0049] In some embodiments of any of the multi-chain SARs described herein, when going in the N-terminal to the C-terminal direction or in the C-terminal to the N-terminal direction, the at least first polypeptide of the multi-chain SARs includes the heterologous antigen binding domain(s), the optional linker, the optional extracellular domain of a naturally occurring receptor, the optional hinge domain, the transmembrane domain, the optional cytosolic co-stimulatory domain and the optional cytosolic primary signaling domain comprising the ITAM. In some embodiments of any of the at least first polypeptide of the multi-chain SARs described herein, the transmembrane domain and the optional cytosolic primary signaling domain directly abut each other. In some embodiments of any of the at least first polypeptide of the multi-chain SARs described herein, the transmembrane domain and the optional cytosolic primary signaling domain are separated by 1 to 500 amino acids (e.g., 1 to 250 amino acids, or 1 to 50 amino acids). In some embodiments of any of the at least first polypeptide of the multi-chain SARs described herein, the optional primary signaling domain and the costimulatory domain directly abut each other. In some embodiments of any of the at least first polypeptide of the multi-chain SARs described herein, the optional primary signaling domain and the costimulatory domain are separated by 1 to 500 amino acids (e.g., 1 to 250 amino acids, or 1 to 50 amino acids). In some embodiments of any of the at least first polypeptide of the multi-chain SARs described herein, the costimulatory domain and the ITAM directly abut each other. In some embodiments of any of the at least first polypeptide of multi-chain SARs described herein, the costimulatory domain and the ITAM are separated by 1 to 500 amino acids (e.g., 1 to 250 amino acids, or 1 to 50 amino acids).

[0050] In some embodiments of any of the at least first polypeptide of the multi-chain SARs described herein, when going in the N-terminal to the C-terminal direction or in the C-terminal to the N-terminal direction, the multi-chain SAR includes the heterologous antigen binding domain(s), optional linker, optional hinge domain, the transmembrane domain, the costimulatory domain, the primary signaling domain, and the ITAM.

[0051] In some embodiments of any of the at least first polypeptide of the multi-chain SARs described herein, when going in the N-terminal to the C-terminal direction or in the C-terminal to the N-terminal direction, the at least first polypeptide of multi-chain SAR includes the heterologous antigen binding domain(s), the transmembrane domain, the primary signaling domain, the ITAM, and the costimulatory domain.

[0052] In some embodiments of any of the at least first polypeptide of the multi-chain SARs described herein, when going in the N-terminal to the C-terminal direction or in the C-terminal to the N-terminal direction, the at least first polypeptide of the multi-chain SARs includes the heterologous antigen binding domain(s), the transmembrane domain, the second intracellular signaling domain, the ITAM, and the first intracellular signaling domain.

[0053] In some embodiments of any of the at least first polypeptide of the multi-chain SARs described herein, when going to the N-terminal to the C-terminal direction or in the C-terminal to the N-terminal direction, the at least first polypeptide of the multi-chain SARs includes the extracellular antigen binding domain, the transmembrane domain, the ITAM, the primary signaling domain, and the costimulatory domain.

[0054] In some embodiments of any of the at least first polypeptide of the multi-chain SARs described herein, when going to the N-terminal to the C-terminal direction or in the C-terminal to the N-terminal direction, the first polypeptide of the multi-chain SARs includes the extracellular antigen binding domain, the transmembrane domain, the ITAM, the second intracellular signaling domain, and the first intracellular signaling domain.

[0055] In some embodiments of any of the at least first polypeptide of the multi-chain SARs described herein, the extracellular antigen-binding domain and the transmembrane domain directly abut each other. In some embodiments of any of the at least first polypeptide of the multi-chain SARs described herein, the extracellular antigen-binding domain and the transmembrane domain are separated by 1 to 500 amino acids (e.g., 1 to 250 amino acids, or 1 to 50 amino acids).

[0056] In some embodiments of any of the at least first polypeptide of the multi-chain SARs described herein, the primary signaling domain is from one or more of proteins selected from the group of CD3z, FcRγ, DAP10 or DAP12.

[0057] Other features and advantages of the invention will be apparent from the following detailed description and figures, and from the claims.

### BRIEF DESCRIPTION OF DRAWINGS

[0058] The invention is further described in the following non-limiting figures.

[0059] FIG. 1 shows schematic representation of different double chain unispecific, bispecific and multispecific SARs.

[0060] FIG. 2 shows a schematic representation of different double chain unispecific, bispecific and multispecific SARs comprising different forms of AABD (e.g., vHH, SVH, aVH, affibody, Centyrin etc.).

[0061] FIG. 3 show depictions of various formats that single-chain and double-chain CD16-SARs of the disclosure can have upon expression. These SARs are based on the entire extracellular domain of CD16 comprising both its Ig like domains (D1 and D2 domains).

[0062] FIG. 4 show depictions of various formats that CD16-SARs of the disclosure can have upon expression. These SARs are based on the partial extracellular domain of CD16. As SARs are modular in format, the CD16 modules can be substituted by different modules derived from NKp44, NKp46 etc. to generate diverse SARs.

[0063] FIG. 5 show depictions of various formats that NKp30 SARs of the disclosure can have upon expression. As SARs are modular in format, the NKp30 modules can be substituted by different modules derived from NKp44, NKp46 etc. to generate diverse SARs.

[0064] FIG. 6 shows the results of Matador cytotoxicity assay with NK92 cells expressing the indicated SAR constructs when co-cultured with the RS4; 11 GLuc target cells expressing CD19 for 2 hours.

[0065] FIG. 7 shows the results of Matador cytotoxicity assay with NK92 cells expressing the indicated SAR constructs when co-cultured with the RS4; 11 GLuc target cells for 2 hours.

[0066] FIG. 8 shows the results of Matador cytotoxicity assay with NK92 cells expressing the indicated SAR constructs when co-cultured with the L363-GLuc target cells for 2 hours.

[0067] FIG. 9 shows the results of Matador cytotoxicity assay with NK92 cells expressing the indicated SAR constructs when co-cultured with the RS4; 11 Gluc target cells for 2 hours.

[0068] FIG. 10 shows the results of Matador cytotoxicity assay with NK92 cells expressing the indicated SAR constructs when co-cultured with the RS4; 11 GLuc target cells for 2 hours.

[0069] FIG. 11 shows the results of Matador cytotoxicity assay with NK92 cells expressing the indicated SAR constructs when co-cultured with the L363-Gluc target cells for 2 hours.

[0070] FIG. 12 shows a general description of making a SAR comprising the fusion of an antigen binding domain to the extracellular domain of a Type II membrane protein such as NKG2D

[0071] FIG. 13A-C shows (A) induction of cell death by NK92, primary NK cells and primary T cells expressing a uTCR-SAR (061621-SCjJ7; SEQ ID NO: 9366) targeting NY-ESO1 peptide (SEQ ID NO: 10880) when cocultured with U266 cells (NY-ESO1⁺/HLA-A2); and (B) upregulaton of TNFα and (C) upregulaton of IFNγ by primary T cells expressing a uTCR-SAR (061621-SCjJ7; SEQ ID NO: 9366) targeting NY-ESO1 peptide when T cells are cocultured with control T2 cells or T2 cells that had been loaded with the peptide.

### DETAILED DESCRIPTION

[0072] The invention will now be further described. In the following passages, different aspects of the invention are defined in more detail. Each aspect so defined may be combined with any other aspect or aspects unless clearly indicated to the contrary. In particular, any feature indicated as being preferred or advantageous may be combined with any other feature or features indicated as being preferred or advantageous.

[0073] Unless stated otherwise, or implicit from context, the following terms and phrases include the meanings provided below. Unless explicitly stated otherwise, or apparent from context, the terms and phrases below do not exclude the meaning that the term or phrase has acquired in the art to which it pertains. The definitions are provided to aid in describing particular embodiments, and are not intended to limit the claimed invention, because the scope of the invention is limited only by the claims.

[0074] Unless otherwise defined, all technical and scientific terms used herein have the same meaning as commonly understood by one of ordinary skill in the art to which this invention belongs.

[0075] As used herein the term “comprising” or “comprises” is used in reference to compositions, methods, and respective component(s) thereof, that are useful to an embodiment, yet open to the inclusion of unspecified elements, whether useful or not. It will be understood by those within the art that, in general, terms used herein are generally intended as “open” terms (e.g., the term “including” should be interpreted as “including but not limited to,” the term “having” should be interpreted as “having at least,” the term “includes” should be interpreted as “includes but is not limited to,” etc.).

[0076] Generally, nomenclatures used in connection with, and techniques of, cell and tissue culture, pathology, oncology, molecular biology, immunology, microbiology, genetics and protein and nucleic acid chemistry and hybridization described herein are those well-known and commonly used in the art. The methods and techniques of the disclosure are generally performed according to conventional methods well-known in the art and as described in various general and more specific references that are cited and discussed throughout the present specification unless otherwise indicated. See, e.g., Sambrook et al., Molecular Cloning: A Laboratory Manual (4th ed., Cold Spring Harbor Laboratory Press, Cold Spring Harbor, N.Y. (2013)). The nomenclatures used in connection with, and the laboratory procedures and techniques of, immunology, molecular biology, analytical chemistry, synthetic organic chemistry, and medicinal and pharmaceutical chemistry described herein are those well-known and commonly used in the art. Standard techniques are used for chemical syntheses, chemical analyses, pharmaceutical preparation, formulation, and delivery, and treatment of patients.

[0077] The term “autonomous antigen binding domain” or “AABD” as used herein refers to an antigen binding domain that can bind to an antigen autonomously, i.e., in the absence of another antigen binding domain. An exemplary AABD is a single vH domain or an autonomous vH domain (aVH), typically a single human vH domain (SVH) that can bind an antigen in the absence of a vL domain. Another exemplary AABD is a fully human vH domain (FHVH). Another exemplary AABD is a single vL domain or an autonomous vL domain, typically a single human vL domain (SVL) that can bind an antigen in the absence of a vH domain. AABD also refers to other antigen binding domains that can bind an antigen autonomously. In an embodiment, the AABD is a non-scFv antigen binding domain. An exemplary non-scFV based autonomous antigen binding domain includes but is not limited to a vHH domain, a humanized vHH domain, a single variable domain-TCR (svd-TCR), and non-immunoglobulin antigen binding scaffold such as a DARPIN, an affibody, a ZIP domain (e.g., RZIP, EZIP, E4, R4 etc.), an affilin, an adnectin, an affitin, an obody, a repebody, a fynomer, an alphabody, an avimer, an atrimer, a centyrin, a pronectin, an anticalin, a kunitz domain, an Armadillo repeat protein or a fragment thereof. Additional examples of non-scFV based autonomous antigen binding domains include the ligand binding domain of a receptor (e.g., CD16-V158A, NKG2D) or a fragment thereof, the receptor binding domain of a ligand (e.g., APRIL, Thrombopoietin etc.) or a fragment thereof, an adaptor (e.g., RZIP, EZIP, E4, K4, NKG2D-YA, NKG2D-AF etc.) or a fragment thereof, an adatptor binding protein (e.g. ULBP2R, ULBP2-S3 etc.) or a fragment thereof, an epitope or a tag (e.g., Streptag, FLAG tag etc.), an autoantigen or a fragment thereof and the like.

[0078] The disclosure described the use of AABD, such as human VH (or vH) domains, such as multiple human VH domains, as building blocks to make unispecific, bispecific and multispecific SARs. In an embodiment, the disclosure describes the use of AABD, such as human VH domains, such as multiple human VH domains, as building blocks to make unispecific, bispecific and multispecific novel SARs.

[0079] The term “about” when referring to a measurable value such as an amount, a temporal duration, and the like, is meant to encompass variations of ±20% or in some instances ±10%, or in some instances ±5%, or in some instances ±1%, or in some instances ±0.1% from the specified value, as such variations are appropriate to perform the disclosed methods or describe the compositions herein. Moreover, any value or range (e.g., less than 20 or similar terminology) explicitly includes any integer between such values or up to the value. Thus, for example, “one to five mutations” explicitly includes 1, 2, 3, 4, and/or 5 mutations.

[0080] The term “ABR” or “Antigen Binding Receptor” as described herein refers to any receptor that has an antigen binding domain. The antigen binding domain of an ABR may comprise of a scFv, a vL, vH, VHH, antibody, antibody fragment (e.g., Fab), antibody like moiety, Va, VD, svd-TCR, cytokine, receptor etc. In one embodiment, an ABR has a transmembrane or membrane anchoring domain that allows it to be expressed on the cell surface. Exemplary ABR include a 1^{st} generation CAR, a 2^{nd} generation CAR, a TFP, SIR, STAR, zSIR, cTCR, TCR, Ab-TCR, a TRI-TAC or TAC etc. Synthetic antigen receptors (SARs), as described herein, are also examples of ABR.

[0081] The term “Ab-TCR” or “AbTCR” refers to a next generation CAR platform as described in WO 2017/070608 A1 which is incorporated herein by reference. In an embodiment, an Ab-TCR comprises an antibody moiety that specifically binds to a target antigen fused to a TCR module capable of recruiting at least one TCR signaling module. Exemplary TCR modules that can be used in the construction of Ab-TCR are provided in SEQ ID NO:6009-6014 (Table 6) and in WO 2017/070608 A1 which is incorporated herein by reference.

[0082] The term “accessory module” refers to any one or more of PDL1, PDL2, CD80, CD86, crmA, p35, hNEMO-K277A (or NEMO-K277A), hNEMO-K277A-delta-V249-K555, mNEMO-K270A, K13-opt, IKK2-S177E-S181E (or IKK2-SS/EE), IKK1-S176E-S180E (or IKK1-SS/EE), MyD88-L265P, TCL-1a, MTCP-1, CMV-141, 41BBL, CD40L, vFLIP-K13, MC159, cFLIP-L/MRITα, cFLIP-p22, HTLV1 Tax, HTLV2 Tax, HTLV2 Tax-RS mutant, FKBPx2-K13, FKBPx2-HTLV2-Tax, FKBPx2-HTLV2-Tax-RS, IL6R-304-vHH-Alb8-vHH, IL12f, PD1-4H1 scFV, PD1-5C4 scFV, PD1-4H1-Alb8-vHH, PD1-5C4-Alb8-vHH, CTLA4-Ipilimumab-scFv, CTLA4-Ipilimumab-Alb8-vHH, IL6-19A-scFV, IL6-19A-scFV-Alb8-vHH, sHVEM, sHVEM-Alb8-vHH, hTERT, Fx06, shRNA targeting Brd4, IgSP-[hTRAC-opt2], IgSP-[hTRBC-opt2], a multi-purpose switch (e.g., IL2-tBCMA, IL15-tBCMA, IL2-RQR, IL15-RQR etc.), NKG2C, CD94, DAP10, DAP12, CD3ε, CD3γ, CD3δ, CD3ƒ, FcRγ, and combination thereof that is expressed in an immune cell (e.g., NK cell or T cell, e.g., SAR-NK cell, SAR-T cell or TCR-T cell) to decrease, regulate or modify the activity of the immune cell. In an embodiment, an accessory module is a therapeutic control (e.g., icapase 9). In some embodiments, the accessory module is co-expressed with an immune receptor such as a SAR or a TCR to increase, decrease, regulate or modify the expression or activity of a SAR or a TCR or a SAR-expressing or a TCR-expressing cell. The accessory module can be co-expressed with a SAR or a TCR using a single vector or using two or more different vectors. In some embodiments, the accessory module is expressed in an antigen presenting cell, e.g., a dendritic cell.

[0083] As used herein “affinity” is meant to describe a measure of binding strength. Affinity generally refers to the “ability” of the binding agent to bind its target. There are numerous ways used in the art to measure “affinity”. For example, methods for calculating the affinity of an antibody for an antigen are known in the art, including use of binding experiments to calculate affinity. As used herein, the term “specific binding” means the contact between an antibody and an antigen with a binding affinity of at least 10⁻⁶ M. In certain aspects, antibodies bind with affinities of at least about 10⁻⁷M, and typically 10⁻⁸ M, 10⁻⁹ M, 10⁻¹⁰ M, 10⁻¹¹ M, or 10⁻¹² M.

[0084] The term “antibody,” as used herein, refers to a protein, or polypeptide sequence derived from an immunoglobulin molecule which specifically binds with an antigen. Antibodies can be monoclonal, or polyclonal, multiple or single chain, or intact immunoglobulins, and may be derived from natural sources or from recombinant sources. The antibody may be ‘humanized’, ‘chimeric’, fully human or non-human. An antibody may have a single domain (e.g., a single vH domain).

[0085] The term “antibody fragment” refers to at least one portion of an antibody, that retains the ability to specifically interact with (e.g., by binding, steric hindrance, stabilizing/destabilizing, spatial distribution) an epitope of an antigen. Examples of antibody fragments include, but are not limited to, Fab, Fab′, F(ab′h, Fv fragments, scFv antibody fragments, disulfide-linked Fvs (sdFv), a Fd fragment consisting of the VH and CHl domains, linear antibodies, single domain antibodies (sdAb) such as either vL or vH, camelid vHH domains, multi-specific antibodies formed from antibody fragments such as a bivalent fragment comprising two Fab fragments linked by a disulfide bridge at the hinge region, and an isolated CDR or other epitope binding fragments of an antibody. An antigen binding fragment can also be incorporated into single domain antibodies, maxibodies, minibodies, nanobodies, intrabodies, diabodies, triabodies, tetrabodies, v-NAR and bis-scFv (see, e.g., Hollinger and Hudson, Nature Biotechnology 23:1126-1136, 2005). Antigen binding fragments can also be grafted into scaffolds based on polypeptides such as a fibronectin type III (Fn3) (see U.S. Pat. No. 6,703,199, which describes fibronectin polypeptide mini-bodies).

[0086] The term “antibody heavy chain,” refers to the larger of the two types of polypeptide chains present in antibody molecules in their naturally occurring conformations, and which normally determines the class to which the antibody belongs.

[0087] The term “antibody light chain,” refers to the smaller of the two types of polypeptide chains present in antibody molecules in their naturally occurring conformations. Kappa (κ) and lambda (λ) light chains refer to the two major antibody light chain isotypes.

[0088] “Anticancer agent” refers to agents that inhibit aberrant cellular division and growth, inhibit migration of neoplastic cells, inhibit invasiveness or prevent cancer growth and metastasis. The term includes chemotherapeutic agents, biological agent (e.g., siRNA, viral vectors such as engineered MLV, adenoviruses, herpes virus that deliver cytotoxic genes), antibodies and the like.

[0089] The term “anticancer effect” or “anti-tumor effect” refers to a biological effect which can be manifested by various means, including but not limited to, a decrease in tumor volume, a decrease in the number of cancer cells, a decrease in the number of metastases, an increase in life expectancy, decrease in cancer cell proliferation, decrease in cancer cell survival, or amelioration of various physiological symptoms associated with the cancerous condition. An “anticancer effect” can also be manifested by the ability of the SARs to prevent the occurrence of cancer in the first place.

[0090] The term “antigen” or “Ag” refers to a molecule that provokes an immune response. This immune response may involve either antibody production, or the activation of specific immunologically-competent cells, or both. The skilled artisan will understand that any macromolecule, including virtually all proteins or peptides, can serve as an antigen. Furthermore, antigens can be derived from recombinant or genomic DNA. As used herein, the term “antigen” refers generally to a binding partner specifically recognized by an antigen-binding domain described herein. Non-limiting examples of antigen or antigens that can be specifically bound by any of the antigen-binding domains are described in Table B.

[0091] The term “antigen presenting cell” or “APC” refers to an immune system cell such as an accessory cell (e.g., a B-cell, a dendritic cell, and the like) that displays a foreign antigen complexed with major histocompatibility complexes (MHC's) on its surface.

[0092] The term “anti-infection effect” refers to a biological effect that can be manifested by various means, including but not limited to, e.g., decrease in the titer of the infectious agent, a decrease in colony counts of the infectious agent, amelioration of various physiological symptoms associated with the infectious condition.

[0093] An “antigen binding domain” or “antigen binding module” or “antigen binding segment” or “antigen specific domain” (ASD) refers to a polypeptide or peptide that due to its primary, secondary or tertiary sequence, post-translational modifications and/or charge binds to an antigen with a high degree of specificity. An ASD can bind to a target with affinity higher than a non-specific domain. The antigen binding domain may be derived from different sources, for example, an antibody (full length heavy chain, Fab fragments, single chain Fv (scFv) fragments, divalent single chain antibodies or diabodies), a non-immunoglobulin binding protein, a ligand or a receptor. In some embodiments, almost any molecule that binds a given cognate or antigen with high affinity can be used as an ASD, as will be appreciated by those of skill in the art. In some embodiments, the antigen binding domain comprises T cell receptors (TCRs) or portions thereof. In exemplary embodiments, the target antigens and SEQ ID Nos of various antigen binding domains are set forth herein in Tables 3-7. In exemplary embodiments, the target antigen and SEQ ID NOs of vL, vH, scFVs, and their CDR regions are set forth herein in Tables 6A-C of patent application PCT/US18/53247 and in Tables 3-4 of patent application PCT/US19/035096, which are incorporated in their entirety by reference herein.

[0094] The term “Association constant (Ka)” is defined as the equilibrium constant of the association of a receptor and ligand.

[0095] “Autoantibody” refers to an antibody that is produced by a B-cell specific for an autoantigen.

[0096] The term “autoantigen” refers to an endogenous antigen that stimulates production of an autoimmune response, such as production of autoantibodies. Examples of autoantigens include, but are not limited to, desmoglein 1, desmoglein 3, and fragments thereof.

[0097] Avidity” refers to the strength of the interaction between a binding agent and its target (e.g., the strength of the interaction between an antibody and its antigen target, a receptor and its cognate and the like). Antibody activity in functional assays (e.g., flow cytometry assay or Malibu-Glo assay) is also reflective of antibody affinity.

[0098] As used herein, the term “backbone” or “architecture” refers to the configuration of the different components (e.g., antigen binding domains, hinge domains, transmembrane domains, signaling domains) that comprise different SAR and any accessory module which is generally optional. In one embodiment, the SAR and the accessory module are encoded by a single nucleic acid molecule. In another embodiment, the SAR is encoded by the first nucleic acid molecule and the accessory module is encoded by a second nucleic acid molecule. In some embodiments, the accessory module is encoded by more than one nucleic acid molecule, depending on the number of components in the accessory modules. The two or more components of the SAR and the accessory modules may be separated by a cleavable linker such as a 2A ribosomal skip sequence (e.g., P2A, T2A, F2A etc.). The two or more components of the SAR and accessory modules may be separated by an internal ribosomal entry sequence (IRES). An exemplary IRES is derived from KSHV. The expression of nucleic acids encoding two or more components of the SAR and accessory modules may be driven by separate promoters. Exemplary promoters include EFlu, EFS, EFS2, CMV, RSV, mutRSV, MNDU3, Hsp70 and Hsp90.

[0099] Table A1: Conventional CAR architectures. First generation conventional CARs (Conventional CAR I) have an intracellular signaling (ISD) domain (e.g., CD3z) and no costimulatory domain. The TCR fusion proteins (TFP) are another example of conventional CAR 1. Second generation conventional CARs (Conventional CAR 2 or CAR II) have one costimulatory domain (e.g., 41BB or CD28) and an intracellular signaling (ISD) domain (e.g., CD3z). Third generation conventional CARs (Conventional CAR 3 or CAR III) have two costimulatory domains (e.g., 41BB and CD28) and an intracellular signaling (ISD) domain (e.g., CD3z). Ab-TCRs are duel chain receptors incorporating a vL-linker-TCR domain (TCRD and a vH-linker-TCR domain (TCRD) and have been described in PCT/US2016/058305. cTCRs are single chain, one-and-half, or double chain receptors consisting of antigen binding domain derived from a vL and vH fragment that are fused to one or more TCR constant chain (TCR-C) and result in activation of T cell signaling. The TCR constant chains of cTCRs are encoded by wild-type nucleic acid sequences and corresponding wild-type amino acid sequences. Different configurations of cTCR are described in PCT/US2017/064379 or WO 2018/102795 A1. Synthetic immune receptors are next generation CARs and are described in PCT/US2017/064379 or WO 2018/102795 A1. SIRs are single chain, one-and-half, or double chain receptors. In one embodiment, the antigen binding domain of SIR are derived from a vL and vH fragment that are fused to one or more TCR constant chain (TCR-C) and result in activation of T cell signaling. In some embodiments, the TCR constant chains of SIR are encoded by codon-optimized nucleic acid sequences and comprise one or more mutations that enhance their expression and chain-pairing. zSIRs are double chain receptors comprising that comprise antigen binding domains (e.g., vL, vH etc.) that are operationally linked to two CD3z chains or fragments thereof with optional linkers and are described in PCT/US2019/035096.

TABLE A1
Exemplary CONVENTIONAL CAR Architectures

| | | | | | | | |
|---|---|---|---|---|---|---|---|
| 1 | CAR 1 or CAR I | ASD | HR | TMD | ISD | | |
| | (including TFP) | | | | | | |
| 2 | CAR 2 (CAR II) | ASD | HR | TMD | CSD | ISD | |
| 3 | CAR 3 (CAR III) | ASD | HR | TMD | CSD-I | CSD-II | ISD |
| 4 | Ab-TCR | vL-cL | TCRD(1) | 2A | vH-CH1 | TCRD (II) | |
| 5 | Double Chain | vL | TCR-C(1) | 2A | vH | TCR-C (II) | |
| | cTCR/SIR-1 | | | | | | |
| 6 | Double Chain | vL- | CD3z | 2A | vH- | CD3z | |
| | zSIR | linker | | | linker | | |
| 6 | One & Half Chain | | TCR-C(1) | 2A | ASD | TCR-C (II) | |
| | cTCR/SIR-3 | | | | | | |

[0100] TABLES A1-1 to A1-19 provide exemplary architectures of unispecific, bispecific and multispecific SARs of this disclosure. The abbreviations used are: SP (signal peptide); AADB (autonomous antigen binding domain); L (optional linker); LL (Long linker), (AABD-L)n (n copies of AABD with optional linker where n=0, 1, 2, 3, 4 or more), AABD1-4 (different AABD targeting one or more antigens), V1 (vL, vH, Va, Vb, Vg or Vd chains), Ig (Ig linker), TCR-Ig (Ig linker domain derived from TCR chains), ConP (connecting peptide), TM (transmembrane domain), Cβ (cytosolic domain), IC (intracellular domain), Ca (Constant chain of TCRα), Cb (constant chain of TCRβ), Cg (constant chain of TCRγ), Cd (constant chain of TCRδ), scFv (single chain fragment variable), scTFv (single chain fragment comprising two variable fragments of a TCR, e.g, Va and Vb), dCa/dCb/dCg/dCd (N-terminally deleted constant chain of TCRα, β, γ or δ lacking their Ig linker domain), TCR-ConP (connecting peptide of TCRα, β, γ or δ constant chain), Ca-ConP (connecting peptide of TCRα constant chain), IgCL (Ig linker from immunoglobulin light chain), IgCH1 (Ig liker from immunoglobulin heavy chain), CD3εγδ ECD (extracellular domain of CD3ε, γ or δ chains), CSD (costimulatory domain), 4-1BB or BB (costimulatory domain of 4-1BB), CD28 or 28 (costimulatory domain of CD28), CD3z or zd or z (activation domain of CD3z). NKIp30-Ig (Immunoglobulin like domain of Nkp30), NKIp44-Ig (Immunoglobulin like domain of Nkp44), NKIp46-Ig1-Ig2 (Immunoglobulin like domain 1 and 2 of Nkp46), CD16-D1 (Domain 1 of CD16), CD16-D2 (Domain 2 of CD16), scTCR (Single chain TCR), Extracellular domain (ECD), activation domain (AD). Va, Vb, Vg, Vd (variable domains of TCRα, β, γ and δ), FCRG (FcRγ); Hinge domain (Hn).

TABLE A1-1
EXEMPLARY CD16-BASED SINGLE CHAIN SARS

| SAR | | | | | | | | | | |
|---|---|---|---|---|---|---|---|---|---|---|
| Class | | | | | | | | | | |
| 1 | SP | L | (AABD- | scFv | L | LL | TM | AD | | |
| | | | L)n | | | | | | | |
| 2 | SP | L | (AABD- | scFv | L | Hinge | TM | AD | | |
| | | | L)n | | | | | | | |
| 3 | SP | L | (AABD- | (scFv- | L | CD16- | CD16- | CD16- | CD16- | CD16- |
| | | | L)n | L)n | | D1 | D2 | Hinge | TM | CP |
| 4 | SP | L | (AABD- | (scFv- | L | CD8- | CD16- | CD16- | CD16- | |
| | | | L)n | L)n | | Hinge | Hinge | TM | CP | |
| 5 | SP | L | (AABD- | (scFv- | L | CD28- | CD16- | CD16- | CD16- | |
| | | | L)n | L)n | | Hinge | Hinge | TM | CP | |
| 6 | SP | L | (AABD- | (scFv- | L | CD8- | CD16- | CD16- | | |
| | | | L)n | L)n | | Hinge | TM | CP | | |
| 7 | SP | L | (AABD- | (scFv- | L | CD28- | CD16- | CD16- | | |
| | | | L)n | L)n | | Hinge | TM | CP | | |
| 8 | SP | | | (scFv- | L | CD16- | CD16- | CD16- | CD16- | CD16- |
| | | | | L)n | | D1 | D2 | Hinge | TM | CP |
| 9 | SP | | | (scFv- | L | CD8- | CD16- | CD16- | CD16- | |
| | | | | L)n | | Hinge | Hinge | TM | CP | |
| 10 | SP | | | (scFv- | L | CD28- | CD16- | CD16- | CD16- | |
| | | | | L)n | | Hinge | Hinge | TM | CP | |
| 11 | SP | | | (scFv- | L | CD8- | CD16- | CD16- | | |
| | | | | L)n | | Hinge | TM | CP | | |
| 12 | SP | | | (scFv- | L | CD28- | CD16- | CD16- | | |
| | | | | L)n | | Hinge | TM | CP | | |
| 13 | SP | L | (AABD- | (scTCR- | L | CD16- | CD16- | CD16- | CD16- | CD16- |
| | | | L)n | L)n | | D1 | D2 | Hinge | TM | CP |
| 14 | SP | L | (AABD- | (scTCR- | L | CD8- | CD16- | CD16- | CD16- | |
| | | | L)n | L)n | | Hinge | Hinge | TM | CP | |
| 15 | SP | L | (AABD- | (scTCR- | L | CD28- | CD16- | CD16- | CD16- | |
| | | | L)n | L)n | | Hinge | Hinge | TM | CP | |
| 16 | SP | L | (AABD- | (scTCR- | L | CD8- | CD16- | CD16- | | |
| | | | L)n | L)n | | Hinge | TM | CP | | |
| 17 | SP | L | (AABD- | (scTCR- | L | CD28- | CD16- | CD16- | | |
| | | | L)n | L)n | | Hinge | TM | CP | | |
| 18 | SP | L | | scTCR | L | CD16- | CD16- | CD16- | CD16- | CD16- |
| | | | | | | D1 | D2 | Hinge | TM | CP |
| 19 | SP | L | | scTCR | L | CD8- | CD16- | CD16- | CD16- | |
| | | | | | | Hinge | Hinge | TM | CP | |
| 20 | SP | L | | scTCR | L | CD28- | CD16- | CD16- | CD16- | |
| | | | | | | Hinge | Hinge | TM | CP | |
| 21 | SP | L | | scTCR | L | CD8- | CD16- | CD16- | | |
| | | | | | | Hinge | TM | CP | | |
| 22 | SP | L | | scTCR | L | CD28- | CD16- | CD16- | | |
| | | | | | | Hinge | TM | CP | | |
| 23 | SP | L | (AABD- | | L | CD16- | CD16- | CD16- | CD16- | CD16- |
| | | | L)n | | | D1 | D2 | Hinge | TM | CP |
| 24 | SP | L | (AABD- | | L | CD8- | CD16- | CD16- | CD16- | |
| | | | L)n | | | Hinge | Hinge | TM | CP | |
| 25 | SP | L | (AABD- | | L | CD28- | CD16- | CD16- | CD16- | |
| | | | L)n | | | Hinge | Hinge | TM | CP | |
| 26 | SP | L | (AABD- | | L | CD8- | CD16- | CD16- | | |
| | | | L)n | | | Hinge | TM | CP | | |

| | | | | | | | |
|---|---|---|---|---|---|---|---|
| 27 | SP | L | (AABD-L)n | L | CD28- | CD16- | CD16- |

| | | |
|---|---|---|
| Hinge | TM | CP |

TABLE A1-2
EXEMPLARY Nkp30-BASED SINGLE CHAIN SARS

| SAR | | | | | | | | | |
|---|---|---|---|---|---|---|---|---|---|
| Class | | | | | | | | | |
| 1 | SP | L | (AABD- | scFv | L | LL | TM | AD | |
| | | | L)n | | | | | | |
| 2 | SP | L | (AABD- | scFv | L | Hinge | TM | AD | |
| | | | L)n | | | | | | |
| 3 | SP | L | (AABD- | (scFv- | L | Nkp30- | Nkp30- | Nkp30- | Nkp30- |
| | | | L)n | L)n | | Ig | Hinge | TM | CP |
| 4 | SP | L | (AABD- | (scFv- | L | CD8- | Nkp30- | Nkp30- | Nkp30- |
| | | | L)n | L)n | | Hinge | Hinge | TM | CP |
| 5 | SP | L | (AABD- | (scFv- | L | CD28- | Nkp30- | Nkp30- | Nkp30- |
| | | | L)n | L)n | | Hinge | Hinge | TM | CP |
| 6 | SP | L | (AABD- | (scFv- | L | CD8- | Nkp30- | Nkp30- | |
| | | | L)n | L)n | | Hinge | TM | CP | |
| 7 | SP | L | (AABD- | (scFv- | L | CD28- | Nkp30- | Nkp30- | |
| | | | L)n | L)n | | Hinge | TM | CP | |
| 8 | SP | | | (scFv- | L | Nkp30- | Nkp30- | Nkp30- | Nkp30- |
| | | | | L)n | | Ig | Hinge | TM | CP |
| 9 | SP | | | (scFv- | L | CD8- | Nkp30- | Nkp30- | Nkp30- |
| | | | | L)n | | Hinge | Hinge | TM | CP |
| 10 | SP | | | (scFv- | L | CD28- | Nkp30- | Nkp30- | Nkp30- |
| | | | | L)n | | Hinge | Hinge | TM | CP |
| 11 | SP | | | (scFv- | L | CD8- | Nkp30- | Nkp30- | |
| | | | | L)n | | Hinge | TM | CP | |
| 12 | SP | | | (scFv- | L | CD28- | Nkp30- | Nkp30- | |
| | | | | L)n | | Hinge | TM | CP | |
| 13 | SP | L | (AABD- | (scTCR- | L | Nkp30- | Nkp30- | Nkp30- | Nkp30- |
| | | | L)n | L)n | | Ig | Hinge | TM | CP |
| 14 | SP | L | (AABD- | (scTCR- | L | CD8- | Nkp30- | Nkp30- | Nkp30- |
| | | | L)n | L)n | | Hinge | Hinge | TM | CP |
| 15 | SP | L | (AABD- | (scTCR- | L | CD28- | Nkp30- | Nkp30- | Nkp30- |
| | | | L)n | L)n | | Hinge | Hinge | TM | CP |
| 16 | SP | L | (AABD- | (scTCR- | L | CD8- | Nkp30- | Nkp30- | |
| | | | L)n | L)n | | Hinge | TM | CP | |
| 17 | SP | L | (AABD- | (scTCR- | L | CD28- | Nkp30- | Nkp30- | |
| | | | L)n | L)n | | Hinge | TM | CP | |
| 18 | SP | L | | scTCR | L | Nkp30- | Nkp30- | Nkp30- | Nkp30- |
| | | | | | | Ig | Hinge | TM | CP |
| 19 | SP | L | | scTCR | L | CD8- | Nkp30- | Nkp30- | Nkp30- |
| | | | | | | Hinge | Hinge | TM | CP |
| 20 | SP | L | | scTCR | L | CD28- | Nkp30- | Nkp30- | Nkp30- |
| | | | | | | Hinge | Hinge | TM | CP |
| 21 | SP | L | | scTCR | L | CD8- | Nkp30- | Nkp30- | |
| | | | | | | Hinge | TM | CP | |
| 22 | SP | L | | scTCR | L | CD28- | Nkp30- | Nkp30- | |
| | | | | | | Hinge | TM | CP | |
| 23 | SP | L | (AABD- | | L | Nkp30- | Nkp30- | Nkp30- | Nkp30- |
| | | | L)n | | | Ig | Hinge | TM | CP |
| 24 | SP | L | (AABD- | | L | CD8- | Nkp30- | Nkp30- | Nkp30- |
| | | | L)n | | | Hinge | Hinge | TM | CP |
| 25 | SP | L | (AABD- | | L | CD28- | Nkp30- | Nkp30- | Nkp30- |
| | | | L)n | | | Hinge | Hinge | TM | CP |
| 26 | SP | L | (AABD- | | L | CD8- | Nkp30- | Nkp30- | |
| | | | L)n | | | Hinge | TM | CP | |
| 27 | SP | L | (AABD- | | L | CD28- | Nkp30- | Nkp30- | |
| | | | L)n | | | Hinge | TM | CP | |

TABLE A1-3
EXEMPLARY Nkp44-BASED SINGLE CHAIN SARS

| SAR | | | | | | | | | |
|---|---|---|---|---|---|---|---|---|---|
| Class | | | | | | | | | |
| 1 | SP | L | (AABD- | scFv | L | LL | TM | AD | |
| | | | L)n | | | | | | |
| 2 | SP | L | (AABD- | scFv | L | Hinge | TM | AD | |
| | | | L)n | | | | | | |
| 3 | SP | L | (AABD- | (scFv- | L | Nkp44- | Nkp44- | Nkp44- | Nkp44- |
| | | | L)n | L)n | | Ig | Hinge | TM | CP |
| 4 | SP | L | (AABD- | (scFv- | L | CD8- | Nkp44- | Nkp44- | Nkp44- |
| | | | L)n | L)n | | Hinge | Hinge | TM | CP |
| 5 | SP | L | (AABD- | (scFv- | L | CD28- | Nkp44- | Nkp44- | Nkp44- |
| | | | L)n | L)n | | Hinge | Hinge | TM | CP |
| 6 | SP | L | (AABD- | (scFv- | L | CD8- | Nkp44- | Nkp44- | |
| | | | L)n | L)n | | Hinge | TM | CP | |
| 7 | SP | L | (AABD- | (scFv- | L | CD28- | Nkp44- | Nkp44- | |
| | | | L)n | L)n | | Hinge | TM | CP | |
| 8 | SP | | | (scFv- | L | Nkp44- | Nkp44- | Nkp44- | Nkp44- |
| | | | | L)n | | Ig | Hinge | TM | CP |
| 9 | SP | | | (scFv- | L | CD8- | Nkp44- | Nkp44- | Nkp44- |
| | | | | L)n | | Hinge | Hinge | TM | CP |
| 10 | SP | | | (scFv- | L | CD28- | Nkp44- | Nkp44- | Nkp44- |
| | | | | L)n | | Hinge | Hinge | TM | CP |
| 11 | SP | | | (scFv- | L | CD8- | Nkp44- | Nkp44- | |
| | | | | L)n | | Hinge | TM | CP | |
| 12 | SP | | | (scFv- | L | CD28- | Nkp44- | Nkp44- | |
| | | | | L)n | | Hinge | TM | CP | |
| 13 | SP | L | (AABD- | (scTCR- | L | Nkp44- | Nkp44- | Nkp44- | Nkp44- |
| | | | L)n | L)n | | Ig | Hinge | TM | CP |
| 14 | SP | L | (AABD- | (scTCR- | L | CD8- | Nkp44- | Nkp44- | Nkp44- |
| | | | L)n | L)n | | Hinge | Hinge | TM | CP |
| 15 | SP | L | (AABD- | (scTCR- | L | CD28- | Nkp44- | Nkp44- | Nkp44- |
| | | | L)n | L)n | | Hinge | Hinge | TM | CP |
| 16 | SP | L | (AABD- | (scTCR- | L | CD8- | Nkp44- | Nkp44- | |
| | | | L)n | L)n | | Hinge | TM | CP | |
| 17 | SP | L | (AABD- | (scTCR- | L | CD28- | Nkp44- | Nkp44- | |
| | | | L)n | L)n | | Hinge | TM | CP | |
| 18 | SP | L | | scTCR | L | Nkp44- | Nkp44- | Nkp44- | Nkp44- |
| | | | | | | Ig | Hinge | TM | CP |
| 19 | SP | L | | scTCR | L | CD8- | Nkp44- | Nkp44- | Nkp44- |
| | | | | | | Hinge | Hinge | TM | CP |
| 20 | SP | L | | scTCR | L | CD28- | Nkp44- | Nkp44- | Nkp44- |
| | | | | | | Hinge | Hinge | TM | CP |
| 21 | SP | L | | scTCR | L | CD8- | Nkp44- | Nkp44- | |
| | | | | | | Hinge | TM | CP | |
| 22 | SP | L | | scTCR | L | CD28- | Nkp44- | Nkp44- | |
| | | | | | | Hinge | TM | CP | |
| 23 | SP | L | (AABD- | | L | Nkp44- | Nkp44- | Nkp44- | Nkp44- |
| | | | L)n | | | Ig | Hinge | TM | CP |
| 24 | SP | L | (AABD- | | L | CD8- | Nkp44- | Nkp44- | Nkp44- |
| | | | L)n | | | Hinge | Hinge | TM | CP |
| 25 | SP | L | (AABD- | | L | CD28- | Nkp44- | Nkp44- | Nkp44- |
| | | | L)n | | | Hinge | Hinge | TM | CP |
| 26 | SP | L | (AABD- | | L | CD8- | Nkp44- | Nkp44- | |
| | | | L)n | | | Hinge | TM | CP | |
| 27 | SP | L | (AABD- | | L | CD28- | Nkp44- | Nkp44- | |
| | | | L)n | | | Hinge | TM | CP | |

TABLE A1-4
EXEMPLARY Nkp46-BASED SINGLE CHAIN SARS

| SAR | | | | | | | | | | |
|---|---|---|---|---|---|---|---|---|---|---|
| Class | | | | | | | | | | |
| 1 | SP | L | (AABD- | scFv | L | LL | TM | AD | | |
| | | | L)n | | | | | | | |
| 2 | SP | L | (AABD- | scFv | L | Hinge | TM | AD | | |
| | | | L)n | | | | | | | |
| 3 | SP | L | (AABD- | (scFv- | L | Nkp46- | Nkp46- | Nkp46- | Nkp46- | Nkp46- |
| | | | L)n | L)n | | Ig1 | Ig2 | Hinge | TM | CP |
| 4 | SP | L | (AABD- | (scFv- | L | CD8- | Nkp46- | Nkp46- | Nkp46- | |
| | | | L)n | L)n | | Hinge | Hinge | TM | CP | |
| 5 | SP | L | (AABD- | (scFv- | L | CD28- | Nkp46- | Nkp46- | Nkp46- | |
| | | | L)n | L)n | | Hinge | Hinge | TM | CP | |
| 6 | SP | L | (AABD- | (scFv- | L | CD8- | Nkp46- | Nkp46- | | |
| | | | L)n | L)n | | Hinge | TM | CP | | |
| 7 | SP | L | (AABD- | (scFv- | L | CD28- | Nkp46- | Nkp46- | | |
| | | | L)n | L)n | | Hinge | TM | CP | | |
| 8 | SP | | | (scFv- | L | Nkp46- | Nkp46- | Nkp46- | Nkp4 | Nkp4 |
| | | | | L)n | | Ig1 | Ig2 | Hinge | 6-TM | 6-CP |
| 9 | SP | | | (scFv- | L | CD8- | Nkp46- | Nkp46- | Nkp46- | |
| | | | | L)n | | Hinge | Hinge | TM | CP | |
| 10 | SP | | | (scFv- | L | CD28- | Nkp46- | Nkp46- | Nkp46- | |
| | | | | L)n | | Hinge | Hinge | TM | CP | |
| 11 | SP | | | (scFv- | L | CD8- | Nkp46- | Nkp46- | | |
| | | | | L)n | | Hinge | TM | CP | | |
| 12 | SP | | | (scFv- | L | CD28- | Nkp46- | Nkp46- | | |
| | | | | L)n | | Hinge | TM | CP | | |
| 13 | SP | L | (AABD- | (scTCR- | L | Nkp46- | Nkp46- | Nkp46- | Nkp46- | Nkp46- |
| | | | L)n | L)n | | Ig1 | Ig2 | Hinge | TM | CP |
| 14 | SP | L | (AABD- | (scTCR- | L | CD8- | Nkp46- | Nkp46- | Nkp46- | |
| | | | L)n | L)n | | Hinge | Hinge | TM | CP | |
| 15 | SP | L | (AABD- | (scTCR- | L | CD28- | Nkp46- | Nkp46- | Nkp46- | |
| | | | L)n | L)n | | Hinge | Hinge | TM | CP | |
| 16 | SP | L | (AABD- | (scTCR- | L | CD8- | Nkp46- | Nkp46- | | |
| | | | L)n | L)n | | Hinge | TM | CP | | |
| 17 | SP | L | (AABD- | (scTCR- | L | CD28- | Nkp46- | Nkp46- | | |
| | | | L)n | L)n | | Hinge | TM | CP | | |
| 18 | SP | L | | scTCR | L | Nkp46- | Nkp46- | Nkp46- | Nkp46- | Nkp46- |
| | | | | | | Ig1 | Ig2 | Hinge | TM | CP |
| 19 | SP | L | | scTCR | L | CD8- | Nkp46- | Nkp46- | Nkp46- | |
| | | | | | | Hinge | Hinge | TM | CP | |
| 20 | SP | L | | scTCR | L | C28- | Nkp46- | Nkp46- | Nkp46- | |
| | | | | | | Hinge | Hinge | TM | CP | |
| 21 | SP | L | | scTCR | L | CD8- | Nkp46- | Nkp46- | | |
| | | | | | | Hinge | TM | CP | | |
| 22 | SP | L | | scTCR | L | CD28- | Nkp46- | Nkp46- | | |
| | | | | | | Hinge | TM | CP | | |
| 23 | SP | L | (AABD- | | L | Nkp46- | Nkp46- | Nkp46- | Nkp46- | Nkp46- |
| | | | L)n | | | Ig1 | Ig2 | Hinge | TM | CP |
| 24 | SP | L | (AABD- | | L | CD8- | Nkp46- | Nkp46- | Nkp46- | |
| | | | L)n | | | Hinge | Hinge | TM | CP | |
| 25 | SP | L | (AABD- | | L | CD28- | Nkp46- | Nkp46- | Nkp46- | |
| | | | L)n | | | Hinge | Hinge | TM | CP | |
| 26 | SP | L | (AABD- | | L | CD8- | Nkp46- | Nkp46- | | |
| | | | L)n | | | Hinge | TM | CP | | |
| 27 | SP | L | (AABD- | | L | CD28- | Nkp46- | Nkp46- | | |
| | | | L)n | | | Hinge | TM | CP | | |

TABLE A1-5
EXEMPLARY NKG2D-BASED SINGLE CHAIN SARS

| SAR Class | | | | | |
|---|---|---|---|---|---|
| 1 | NKG2D-CP | NKG2D-TM | NKG2D-ECD | L | (AABD) |
| 2 | NKG2D-CP | NKG2D-TM | NKG2D-ECD | L | (AABD-L)n |
| 3 | NKG2D-CP | NKG2D-TM | NKG2D-ECD | L | scFv |
| 4 | NKG2D-CP | NKG2D-TM | NKG2D-ECD | L | (scFv-L)n |

TABLE: A1-6
EXEMPLARY SARS

| SAR | | | | | | | | |
|---|---|---|---|---|---|---|---|---|
| Class | | | | | | | | |
| 1 | SP | L | (AABD- | L | Ig (Ig | TCR- | TM | IC |
| | | | L)n | | linker) | ConP | | |
| | SP | L | (AABD- | L | Ig (Ig | TCR- | TM | IC |
| | | | L)n | | linker) | ConP | | |
| 2 | SP | L | (AABD- | L | IgCL | CD16- | CD16- | CD16- |
| | | | L)n | | | Hinge | TM | CP |
| | SP | L | (AABD- | L | Ig- | CD16- | CD16- | CD16- |
| | | | L)n | | CH1 | Hinge | TM | CP |
| 3 | SP | L | (AABD- | L | IgCL | CD16- | CD16- | CD16- |
| | | | L)n | | | Hinge | TM | CP |
| | SP | L | (AABD- | L | IgG1- | CD16- | CD16- | CD16- |
| | | | L)n | | CH1 | Hinge | TM | CP |
| 4 | SP | L | (AABD- | L | IgCL | CD16- | CD16- | CD16- |
| | | | L)n | | | Hinge | TM | CP |
| | SP | L | (AABD- | L | IgA1- | CD16- | CD16- | CD16- |
| | | | L)n | | CH1 | Hinge | TM | CP |
| 5 | SP | L | (AABD- | L | IgCL | CD16- | CD16- | CD16- |
| | | | L)n | | | Hinge | TM | CP |
| | SP | L | (AABD- | L | IgD- | CD16- | CD16- | CD16- |
| | | | L)n | | CH1 | Hinge | TM | CP |
| 6 | SP | L | (AABD- | L | IgCL | CD16- | CD16- | CD16- |
| | | | L)n | | | Hinge | TM | CP |
| | SP | L | (AABD- | L | IgM- | CD16- | CD16- | CD16- |
| | | | L)n | | CH1 | Hinge | TM | CP |
| 7 | SP | L | (AABD- | L | Ig (Ig | CD16- | CD16- | CD16- |
| | | | L)n | | linker) | ECD | TM | CP |
| | SP | L | (AABD- | L | Ig (Ig | CD16- | CD16- | CD16- |
| | | | L)n | | linker) | ECD | TM | CP |
| 8 | SP | L | (AABD- | L | IgCL | CD16- | CD16- | CD16- |
| | | | L)n | | | ECD | TM | CP |
| | SP | L | (AABD- | L | Ig- | CD16- | CD16- | CD16- |
| | | | L)n | | CH1 | ECD | TM | CP |
| 9 | SP | L | (AABD- | L | IgCL | CD16- | CD16- | CD16- |
| | | | L)n | | | ECD | TM | CP |
| | SP | L | (AABD- | L | IgA1- | CD16- | CD16- | CD16- |
| | | | L)n | | CH1 | ECD | TM | CP |
| 10 | SP | L | (AABD- | L | IgCL | CD16- | CD16- | CD16- |
| | | | L)n | | | ECD | TM | CP |
| | SP | L | (AABD- | L | IgD- | CD16- | CD16- | CD16- |
| | | | L)n | | CH1 | ECD | TM | CP |
| 11 | SP | L | (AABD- | L | IgCL | CD16- | CD16- | CD16- |
| | | | L)n | | | ECD | TM | CP |
| | SP | L | (AABD- | L | IgM- | CD16- | CD16- | CD16- |
| | | | L)n | | CH1 | ECD | TM | CP |

TABLE A1-7

| SAR | | | | | | | | | |
|---|---|---|---|---|---|---|---|---|---|
| Class | | | | | | | | | |
| 1 | SP | L | (AABD- | vL | L | CD16- | CD16- | CD16- | |
| | | | L)n | | | Hinge | TM | CP | |
| | SP | L | (AABD- | vH | L | CD16- | CD16- | CD16- | |
| | | | L)n | | | Hinge | TM | CP | |
| 2 | SP | L | (AABD- | vL | L | CD16- | CD16- | CD16- | |
| | | | L)n | | | ECD | TM | CP | |
| | SP | L | (AABD- | vH | L | CD16- | CD16- | CD16- | |
| | | | L)n | | | ECD | TM | CP | |
| 3 | SP | L | (AABD- | vL | L | Nkp30- | Nkp30- | Nkp30- | |
| | | | L)n | | | Hinge | TM | CP | |
| | SP | L | (AABD- | vH | L | Nkp30- | Nkp30- | Nkp30- | |
| | | | L)n | | | Hinge | TM | CP | |
| 4 | SP | L | (AABD- | vL | L | Nkp30- | Nkp30- | Nkp30- | Nkp30- |
| | | | L)n | | | Ig | Hinge | TM | CP |
| | SP | L | (AABD- | vH | L | Nkp30- | Nkp30- | Nkp30- | Nkp30- |
| | | | L)n | | | Ig | Hinge | TM | CP |
| 5 | SP | L | (AABD- | vL | L | Nkp44- | Nkp44- | Nkp44- | |
| | | | L)n | | | Hinge | TM | CP | |
| | SP | L | (AABD- | vH | L | Nkp44- | Nkp44- | Nkp44- | |
| | | | L)n | | | Hinge | TM | CP | |
| 6 | SP | L | (AABD- | vL | L | Nkp44- | Nkp44- | Nkp44- | Nkp44- |
| | | | L)n | | | Ig | Hinge | TM | CP |
| | SP | L | (AABD- | vH | L | Nkp44- | Nkp44- | Nkp44- | Nkp44- |
| | | | L)n | | | Ig | Hinge | TM | CP |
| 7 | SP | L | (AABD- | vL | L | Nkp46- | Nkp46- | Nkp46- | |
| | | | L)n | | | Hinge | TM | CP | |
| | SP | L | (AABD- | vH | L | Nkp46- | Nkp46- | Nkp46- | |
| | | | L)n | | | Hinge | TM | CP | |
| 8 | SP | L | (AABD- | vL | L | Nkp46- | Nkp46- | Nkp46- | Nkp46- |
| | | | L)n | | | Ig1-Ig2 | Hinge | TM | CP |
| | SP | L | (AABD- | vH | L | Nkp46- | Nkp46- | Nkp46- | Nkp46- |
| | | | L)n | | | Ig1-Ig2 | Hinge | TM | CP |
| 9 | SP | L | (AABD- | vL | L | Dap10- | Dap10- | Dap10- | |
| | | | L)n | | | Hinge | TM | CP | |
| | SP | L | (AABD- | vH | L | Dap10- | Dap10- | Dap10- | |
| | | | L)n | | | Hinge | TM | CP | |

TABLE A1-8

| SAR | | | | | | | | | |
|---|---|---|---|---|---|---|---|---|---|
| Class | | | | | | | | | |
| 1 | SP | L | (AABD- | vL | Ig (Ig | Hinge | TM | CP | |
| | | | L)n | | linker) | | | | |
| | SP | L | (AABD- | vH | Ig (Ig | Hinge | TM | CP | |
| | | | L)n | | linker) | | | | |
| 2 | SP | L | (AABD- | vL | IgCL | CD16- | CD16- | CD16- | |
| | | | L)n | | | Hinge | TM | CP | |
| | SP | L | (AABD- | vH | Ig- | CD16- | CD16- | CD16- | |
| | | | L)n | | CH1 | Hinge | TM | CP | |
| 3 | SP | L | (AABD- | vL | IgCL | CD16- | CD16- | CD16- | |
| | | | L)n | | | ECD | TM | CP | |
| | SP | L | (AABD- | vH | Ig- | CD16- | CD16- | CD16- | |
| | | | L)n | | CH1 | ECD | TM | CP | |
| 4 | SP | L | (AABD- | vL | IgCL | Nkp30- | Nkp30- | Nkp30- | |
| | | | L)n | | | Hinge | TM | CP | |
| | SP | L | (AABD- | vH | Ig- | Nkp30- | Nkp30- | Nkp30- | |
| | | | L)n | | CH1 | Hinge | TM | CP | |
| 5 | SP | L | (AABD- | vL | IgCL | Nkp30- | Nkp30- | Nkp30- | Nkp30- |
| | | | L)n | | | Ig | Hinge | TM | CP |
| | SP | L | (AABD- | vH | Ig- | Nkp30- | Nkp30- | Nkp30- | Nkp30- |
| | | | L)n | | CH1 | Ig | Hinge | TM | CP |
| 6 | SP | L | (AABD- | vL | IgCL | Nkp44- | Nkp44- | Nkp44- | |
| | | | L)n | | | Hinge | TM | CP | |
| | SP | L | (AABD- | vH | Ig- | Nkp44- | Nkp44- | Nkp44- | |
| | | | L)n | | CH1 | Hinge | TM | CP | |
| 7 | SP | L | (AABD- | vL | IgCL | Nkp44- | Nkp44- | Nkp44- | Nkp44- |
| | | | L)n | | | Ig | Hinge | TM | CP |
| | SP | L | (AABD- | vH | Ig- | Nkp44- | Nkp44- | Nkp44- | Nkp44- |
| | | | L)n | | CH1 | Ig | Hinge | TM | CP |
| 8 | SP | L | (AABD- | vL | IgCL | Nkp46- | Nkp46- | Nkp46- | |
| | | | L)n | | | Hinge | TM | CP | |
| | SP | L | (AABD- | vH | Ig- | Nkp46- | Nkp46- | Nkp46- | |
| | | | L)n | | CH1 | Hinge | TM | CP | |
| 9 | SP | L | (AABD- | vL | IgCL | Nkp46- | Nkp46- | Nkp46- | Nkp46- |
| | | | L)n | | | Ig1-Ig2 | Hinge | TM | CP |
| | SP | L | (AABD- | vH | Ig- | Nkp46- | Nkp46- | Nkp46- | Nkp46- |
| | | | L)n | | CH1 | Ig1-Ig2 | Hinge | TM | CP |
| 10 | SP | L | (AABD- | vL | IgCL | Dap10- | Dap10- | Dap10- | |
| | | | L)n | | | Hinge | TM | CP | |
| | SP | L | (AABD- | vH | Ig- | Dap10- | Dap10- | Dap10- | |
| | | | L)n | | CH1 | Hinge | TM | CP | |
| 11 | SP | L | (AABD- | vL | IgCL | Dap10- | Dap10- | Dap10- | CD3ZCP |
| | | | L)n | | | Hinge | TM | CP | |
| | SP | L | (AABD- | vH | Ig- | Dap10- | Dap10- | Dap10- | CD3ZCP |
| | | | L)n | | CH1 | Hinge | TM | CP | |

TABLE A1-9

| SAR | | | | | | | | | |
|---|---|---|---|---|---|---|---|---|---|
| Class | | | | | | | | | |
| 1 | SP | L | (AABD- | vL | L | CD16- | CD16- | CD16- | |
| | | | L)n | | | Hinge | TM | CP | |
| | SP | L | (AABD- | vH | L | Nkp30- | Nkp30- | Nkp30- | |
| | | | L)n | | | Hinge | TM | CP | |
| 2 | SP | L | (AABD- | vL | L | CD16- | CD16- | CD16- | |
| | | | L)n | | | ECD | TM | CP | |
| | SP | L | (AABD- | vH | L | Nkp30- | Nkp30- | Nkp30- | |
| | | | L)n | | | ECD | TM | CP | |
| 3 | SP | L | (AABD- | vL | L | Nkp30- | Nkp30- | Nkp30- | |
| | | | L)n | | | Hinge | TM | CP | |
| | SP | L | (AABD- | vH | L | Nkp44- | Nkp44- | Nkp44- | |
| | | | L)n | | | Hinge | TM | CP | |
| 4 | SP | L | (AABD- | vL | L | Nkp30- | Nkp30- | Nkp30- | Nkp30- |
| | | | L)n | | | Ig | Hinge | TM | CP |
| | SP | L | (AABD- | vH | L | Nkp44- | Nkp44- | Nkp44- | Nkp44- |
| | | | L)n | | | Ig | Hinge | TM | CP |
| 5 | SP | L | (AABD- | vL | L | Nkp44- | Nkp44- | Nkp44- | |
| | | | L)n | | | Hinge | TM | CP | |
| | SP | L | (AABD- | vH | L | Nkp46- | Nkp46- | Nkp46- | |
| | | | L)n | | | Hinge | TM | CP | |
| 6 | SP | L | (AABD- | vL | L | Nkp44- | Nkp44- | Nkp44- | Nkp44- |
| | | | L)n | | | Ig | Hinge | TM | CP |
| | SP | L | (AABD- | vH | L | Nkp46- | Nkp46- | Nkp46- | Nkp46- |
| | | | L)n | | | Ig1-Ig2 | Hinge | TM | CP |
| 7 | SP | L | (AABD- | vL | L | CD16- | CD16- | CD16- | |
| | | | L)n | | | Hinge | TM | CP | |
| | SP | L | (AABD- | vH | L | Nkp46- | Nkp46- | Nkp46- | |
| | | | L)n | | | Hinge | TM | CP | |
| 8 | SP | L | (AABD- | vL | L | CD16- | CD16- | CD16- | |
| | | | L)n | | | Hinge | TM | CP | |
| | SP | L | (AABD- | vH | L | CD3z- | CD3z- | CD3z- | |
| | | | L)n | | | Hinge | TM | CP | |
| 9 | SP | L | (AABD- | vL | L | CD3z- | CD3z- | CD3z- | |
| | | | L)n | | | Hinge | TM | CP | |
| | SP | L | (AABD- | vH | L | Dap10- | Dap10- | Dap10- | |
| | | | L)n | | | Hinge | TM | CP | |
| 10 | SP | L | (AABD- | vL | L | CD16- | CD16- | CD16- | |
| | | | L)n | | | ECD | TM | CP | |
| | SP | L | (AABD- | vH | L | C-abgd (TCRα/β/γ/δ | | | |
| | | | L)n | | | constant chain) | | | |
| 11 | SP | L | (AABD- | vH | L | CD16- | CD16- | CD16- | |
| | | | L)n | | | ECD | TM | CP | |
| | SP | L | (AABD- | vL | L | C-abgd (TCRα/β/γ/δ | | | |
| | | | L)n | | | constant chain) | | | |
| 12 | SP | L | (AABD- | vL | L | Nkp30- | Nkp30- | Nkp30- | |
| | | | L)n | | | Ig | TM | CP | |
| | SP | L | (AABD- | vH | L | C-abgd (TCRα/β/γ/δ | | | |
| | | | L)n | | | constant chain) | | | |
| 13 | SP | L | (AABD- | vH | L | NKp30- | Nkp30- | Nkp30- | |
| | | | L)n | | | Ig | TM | CP | |
| | SP | L | (AABD- | vL | L | C-abgd (TCRα/β/γ/δ | | | |
| | | | L)n | | | constant chain) | | | |
| 14 | SP | L | (AABD- | vL | L | Nkp44- | Nkp44- | Nkp44- | |
| | | | L)n | | | Ig | TM | CP | |
| | SP | L | (AABD- | vH | L | C-abgd (TCRα/β/γ/δ | | | |
| | | | L)n | | | constant chain) | | | |
| 15 | SP | L | (AABD- | vH | L | NKp44- | Nkp44- | Nkp44- | |
| | | | L)n | | | Ig | TM | CP | |
| | SP | L | (AABD- | vL | L | C-abgd (TCRα/β/γ/δ | | | |
| | | | L)n | | | constant chain) | | | |
| 14 | SP | L | (AABD- | vL | L | Dap10- | Dap10- | Dap10- | |
| | | | L)n | | | Hinge | TM | CP | |
| | SP | L | (AABD- | vH | L | C-abgd (TCRα/β/γ/δ | | | |
| | | | L)n | | | constant chain) | | | |
| 15 | SP | L | (AABD- | vH | L | Dap10- | Dap10- | Dap10- | |
| | | | L)n | | | Hinge | TM | CP | |
| | SP | L | (AABD- | vL | L | C-abgd (TCRα/β/γ/δ | | | |
| | | | L)n | | | constant chain) | | | |
| 16 | SP | L | (AABD- | vH | L | CD28- | NKG2D- | 2B4- | CD3z- |
| | | | L)n | | | Hinge | TM | CSD | CP |
| | SP | L | (AABD- | vL | L | CD16- | CD16- | CD16- | |
| | | | L)n | | | Hinge | TM | CP | |
| 17 | SP | L | (AABD- | vH | L | CD28- | NKG2D- | 2B4- | CD3z- |
| | | | L)n | | | Hinge | TM | CSD | CP |
| | SP | L | (AABD- | vL | L | CD3z- | CD3z- | CD3z- | |
| | | | L)n | | | Hinge | TM | CP | |
| 18 | SP | L | (AABD- | vH | L | CD8- | NKG2D- | 2B4- | CD3z- |
| | | | L)n | | | Hinge | TM | CSD | CP |
| | SP | L | (AABD- | vL | L | CD8- | NKG2D- | 2B4- | CD3z- |
| | | | L)n | | | Hinge | TM | CSD | CP |
| 19 | SP | L | (AABD- | vH | L | CD8- | NKG2D- | 2B4- | CD3z- |
| | | | L)n | | | Hinge | TM | CSD | CP |
| | SP | L | (AABD- | vL | L | CD16- | CD16- | CD16- | |
| | | | L)n | | | Hinge | TM | CP | |
| 20 | SP | L | (AABD- | vL | IgCL | Dap10- | Dap10- | Dap10- | CD3z- |
| | | | L)n | | | Hinge | TM | CP | CP |
| | SP | L | (AABD- | vH | Ig- | CD16- | CD16- | CD16- | |
| | | | L)n | | CH1 | Hn | TM | CP | |

TABLE A1-10

| SAR | | | | | | | | | |
|---|---|---|---|---|---|---|---|---|---|
| Class | | | | | | | | | |
| 1 | SP | L | (AABD- | vL | Ig | Hinge | TM | CP | |
| | | | L)n | | linker | | | | |
| | SP | L | (AABD- | vH | Ig | Hinge2 | TM2 | CP2 | |
| | | | L)n | | linker-2 | | | | |
| 1 | SP | L | (AABD- | vL | Ig | CD16- | CD16- | CD16- | |
| | | | L)n | | linker | Hinge | TM | CP | |
| | SP | L | (AABD- | vH | Ig | Nkp30- | Nkp30- | Nkp30- | |
| | | | L)n | | linker | Hinge | TM | CP | |
| 2 | SP | L | (AABD- | vL | IgCL | CD16- | CD16- | CD16- | |
| | | | L)n | | | ECD | TM | CP | |
| | SP | L | (AABD- | vH | IgG1- | Nkp30- | Nkp30- | Nkp30- | |
| | | | L)n | | CH1 | ECD | TM | CP | |
| 3 | SP | L | (AABD- | vL | IgCL | Nkp30- | Nkp30- | Nkp30- | |
| | | | L)n | | | Hinge | TM | CP | |
| | SP | L | (AABD- | vH | IgG1- | Nkp44- | Nkp44- | Nkp44- | |
| | | | L)n | | CH1 | Hinge | TM | CP | |
| 4 | SP | L | (AABD- | vL | IgCL | Nkp30- | Nkp30- | Nkp30- | Nkp30- |
| | | | L)n | | | Ig | Hinge | TM | CP |
| | SP | L | (AABD- | vH | IgG1- | Nkp44- | Nkp44- | Nkp44- | Nkp44- |
| | | | L)n | | CH1 | Ig | Hinge | TM | CP |
| 5 | SP | L | (AABD- | vL | IgCL | Nkp44- | Nkp44- | Nkp44- | |
| | | | L)n | | | Hinge | TM | CP | |
| | SP | L | (AABD- | vH | IgG1- | Nkp46- | Nkp46- | Nkp46- | |
| | | | L)n | | CH1 | Hinge | TM | CP | |
| 6 | SP | L | (AABD- | vL | IgCL | Nkp44- | Nkp44- | Nkp44- | Nkp44- |
| | | | L)n | | | Ig | Hinge | TM | CP |
| | SP | L | (AABD- | vH | IgG1- | Nkp46- | Nkp46- | Nkp46- | Nkp46- |
| | | | L)n | | CH1 | Ig1-Ig2 | Hinge | TM | CP |
| 7 | SP | L | (AABD- | vL | IgCL | CD16- | CD16- | CD16- | |
| | | | L)n | | | Hinge | TM | CP | |
| | SP | L | (AABD- | vH | IgG1- | Nkp46- | Nkp46- | Nkp46- | |
| | | | L)n | | CH1 | Hinge | TM | CP | |
| 8 | SP | L | (AABD- | vL | IgCL | CD16- | CD16- | CD16- | |
| | | | L)n | | | Hinge | TM | CP | |
| | SP | L | (AABD- | vH | IgG1- | CD3z- | CD3z- | CD3z- | |
| | | | L)n | | CH1 | Hinge | TM | CP | |
| 9 | SP | L | (AABD- | vL | IgCL | CD3z- | CD3z- | CD3z- | |
| | | | L)n | | | Hinge | TM | CP | |
| | SP | L | (AABD- | vH | IgG1- | Dap10- | Dap10- | Dap10- | |
| | | | L)n | | CH1 | Hinge | TM | CP | |
| 10 | SP | L | (AABD- | vL | IgCL | CD16- | CD16- | CD16- | |
| | | | L)n | | | ECD | TM | CP | |
| | SP | L | (AABD- | vH | IgG1- | C-abgd (TCRα/β/γ/δ | | | |
| | | | L)n | | CH1 | constant chain) | | | |
| 11 | SP | L | (AABD- | vH | IgCL | CD16- | CD16- | CD16- | |
| | | | L)n | | | ECD | TM | CP | |
| | SP | L | (AABD- | vL | IgG1- | C-abgd (TCRα/β/γ/δ | | | |
| | | | L)n | | CH1 | constant chain) | | | |
| 12 | SP | L | (AABD- | vL | IgCL | Nkp30- | Nkp30- | Nkp30- | |
| | | | L)n | | | Ig | TM | CP | |
| | SP | L | (AABD- | vH | IgG1- | C-abgd (TCRα/β/γ/δ | | | |
| | | | L)n | | CH1 | constant chain) | | | |
| 13 | SP | L | (AABD- | vH | IgCL | NKp30- | Nkp30- | Nkp30- | |
| | | | L)n | | | Ig | TM | CP | |
| | SP | L | (AABD- | vL | IgG1- | C-abgd (TCRα/β/γ/δ | | | |
| | | | L)n | | CH1 | constant chain) | | | |
| 14 | SP | L | (AABD- | vL | IgCL | Nkp44- | Nkp44- | Nkp44- | |
| | | | L)n | | | Ig | TM | CP | |
| | SP | L | (AABD- | vH | IgG1- | C-abgd (TCRα/β/γ/δ | | | |
| | | | L)n | | CH1 | constant chain) | | | |
| 15 | SP | L | (AABD- | vH | IgG1- | NKp44- | Nkp44- | Nkp44- | |
| | | | L)n | | CH1 | Ig | TM | CP | |
| | SP | L | (AABD- | vL | IgCL | C-abgd (TCRα/β/γ/δ | | | |
| | | | L)n | | | constant chain) | | | |
| 14 | SP | L | (AABD- | vL | IgG1- | Dap10- | Dap10- | Dap10- | |
| | | | L)n | | CH1 | Hinge | TM | CP | |
| | SP | L | (AABD- | vH | IgCL | C-abgd (TCRα/β/γ/δ | | | |
| | | | L)n | | | constant chain) | | | |
| 15 | SP | L | (AABD- | vH | IgG1- | Dap10- | Dap10- | Dap10- | |
| | | | L)n | | CH1 | Hinge | TM | CP | |

| | | | | | |
|---|---|---|---|---|---|
| SP | L | (AABD- | vL | IgCL | C-abgd (TCRα/β/γ/δ |
| | | L)n | | | constant chain) |

TABLE A1-11
EXEMPLARY TCR-SAR WITH BACKBONE OF zSAR

| SAR | | | | | | | | | | |
|---|---|---|---|---|---|---|---|---|---|---|
| Class | | | | | | | | | | |
| 1 | SP | L | (AABD- | Va | L | Ig | ECD | TM | CP | |
| | | | L)n | | | | | | | |
| | SP | L | (AABD- | Vb | L | Ig | ECD | TM | CP | |
| | | | L)n | | | | | | | |
| 2 | SP | L | (AABD- | Va | L | Ig | Hinge | TM | CP | |
| | | | L)n | | | | | | | |
| | SP | L | (AABD- | Vb | L | Ig | Hinge | TM | CP | |
| | | | L)n | | | | | | | |
| 3 | SP | L | (AABD- | Va | L | Ig | CD3z- | CD3z- | CD3z-CP | |
| | | | L)n | | | | ECD | TM | | |
| | SP | L | (AABD- | Vb | L | Ig (Ig | CD16- | CD16- | CD16-CP | |
| | | | L)n | | | linker) | ECD | TM | | |
| 4 | SP | L | (AABD- | Va | L | TCR- | CD3z- | CD3z- | CD3z-CP | |
| | | | L)n | | | Ig | ECD | TM | | |
| | SP | L | (AABD- | Vb | L | TCR- | CD16- | CD16- | CD16-CP | |
| | | | L)n | | | Ig | hinge | TM | | |
| 5 | SP | L | (AABD- | Va | L | TCRa- | CD3z- | CD3z- | CD3z-CP | |
| | | | L)n | | | Ig3 | ECD | TM | | |
| | SP | L | (AABD- | Vb | L | TCRb- | CD16- | CD16- | CD16-CP | |
| | | | L)n | | | Ig3 | hinge | TM | | |
| 6 | SP | L | (AABD- | Va | L | TCRa- | CD3z- | CD3z- | CD3z-CP | |
| | | | L)n | | | Ig3 | ECD | TM | | |
| | SP | L | (AABD- | Vb | L | TCRb- | CD3z- | CD16- | CD16-CP | |
| | | | L)n | | | Ig3 | ECD | TM | | |
| 7 | SP | L | (AABD- | Va | L | TCRa- | CD3z- | CD3z- | CD3z-CP | |
| | | | L)n | | | Ig3 | ECD | TM | | |
| | SP | L | (AABD- | Vb | L | TCRb- | NKp30- | NKp30- | NKp30-CP | |
| | | | L)n | | | Ig3 | hinge | TM | | |
| 8 | SP | L | (AABD- | Va | L | TCRa- | CD3z- | CD3z- | CD3z-CP | |
| | | | L)n | | | Ig3 | ECD | TM | | |
| | SP | L | (AABD- | Vb | L | TCRb- | CD3z- | NKp30- | NKp30-CP | |
| | | | L)n | | | Ig3 | ECD | TM | | |
| 9 | SP | L | (AABD- | Va | L | TCRa- | CD3z- | CD3z- | CD3z-CP | |
| | | | L)n | | | Ig3 | ECD | TM | | |
| | SP | L | (AABD- | Vb | L | TCRb- | NKp46- | NKp46- | NKp46-CP | |
| | | | L)n | | | Ig3 | hinge | TM | | |
| 10 | SP | L | (AABD- | Va | L | TCRa- | CD3z- | CD3z- | CD3z-CP | |
| | | | L)n | | | Ig3 | ECD | TM | | |
| | SP | L | (AABD- | Vb | L | TCRb- | DAP10- | NKp44- | NKp44-CP | |
| | | | L)n | | | Ig3 | ECD | TM | | |
| 11 | SP | L | (AABD- | Va | L | Ig | ECD | TM | CSD | CP |
| | | | L)n | | | | | | | |
| | SP | L | (AABD- | Vb | L | Ig | ECD | TM | CSD | CP |
| | | | L)n | | | | | | | |
| 12 | SP | L | (AABD- | Va | L | TCR- | CD3z- | CD3z- | 4-1BB | CD3z- |
| | | | L)n | | | Ig | ECD | TM | | CP |
| | SP | L | (AABD- | Vb | L | TCR- | CD3z- | CD3z- | 4-1BB | CD3z- |
| | | | L)n | | | Ig | ECD | TM | | CP |
| 13 | SP | L | (AABD- | Va | L | TCR- | CD3z- | CD3z- | CD3z- | |
| | | | L)n | | | Ig | ECD | TM | CP | |
| | SP | L | (AABD- | Vb | L | TCR- | CD3z- | CD3z- | 4-1BB | CD3z- |
| | | | L)n | | | Ig | ECD | TM | | CP |

TABLE A1-12
EXEMPLARY TCR-SAR WITH BACKBONE OF zSAR

| SAR | | | | | | | | | | |
|---|---|---|---|---|---|---|---|---|---|---|
| Class | | | | | | | | | | |
| 1 | SP | L | (AABD- | Va | L | Ig | ECD | TM | CP | |
| | | | L)n | | | | | | | |
| | SP | L | (AABD- | Vb | L | Ig | ECD | TM | CP | |
| | | | L)n | | | | | | | |
| 2 | SP | L | (AABD- | Va | L | Ig | Hinge | TM | CP | |
| | | | L)n | | | | | | | |
| | SP | L | (AABD- | Vb | L | Ig | Hinge | TM | CP | |
| | | | L)n | | | | | | | |
| 3 | SP | L | (AABD- | Va | L | Ig | CD3z- | CD3z- | CD3z-CP | |
| | | | L)n | | | | ECD | TM | | |
| | SP | L | (AABD- | Vb | L | Ig (Ig | CD16- | CD16- | CD16-CP | |
| | | | L)n | | | linker) | ECD | TM | | |
| 4 | SP | L | (AABD- | Va | L | TCR- | CD3z- | CD3z- | CD3z-CP | |
| | | | L)n | | | Ig | ECD | TM | | |
| | SP | L | (AABD- | Vb | L | TCR- | CD16- | CD16- | CD16-CP | |
| | | | L)n | | | Ig | hinge | TM | | |
| 5 | SP | L | (AABD- | Va | L | TCRa- | CD3z- | CD3z- | CD3z-CP | |
| | | | L)n | | | Ig3 | ECD | TM | | |
| | SP | L | (AABD- | Vb | L | TCRb- | CD16- | CD16- | CD16-CP | |
| | | | L)n | | | Ig3 | hinge | TM | | |
| 6 | SP | L | (AABD- | Va | L | TCRa- | CD3z- | CD3z- | CD3z-CP | |
| | | | L)n | | | Ig3 | ECD | TM | | |
| | SP | L | (AABD- | Vb | L | TCRb- | CD3z- | CD16- | CD16-CP | |
| | | | L)n | | | Ig3 | ECD | TM | | |
| 7 | SP | L | (AABD- | Va | L | TCRa- | CD3z- | CD3z- | CD3z-CP | |
| | | | L)n | | | Ig3 | ECD | TM | | |
| | SP | L | (AABD- | Vb | L | TCRb- | NKp30- | NKp30- | NKp30-CP | |
| | | | L)n | | | Ig3 | hinge | TM | | |
| 8 | SP | L | (AABD- | Va | L | TCRa- | CD3z- | CD3z- | CD3z-CP | |
| | | | L)n | | | Ig3 | ECD | TM | | |
| | SP | L | (AABD- | Vb | L | TCRb- | CD3z- | NKp30- | NKp30-CP | |
| | | | L)n | | | Ig3 | ECD | TM | | |
| 9 | SP | L | (AABD- | Va | L | TCRa- | CD3z- | CD3z- | CD3z-CP | |
| | | | L)n | | | Ig3 | ECD | TM | | |
| | SP | L | (AABD- | Vb | L | TCRb- | NKp46- | NKp46- | NKp46-CP | |
| | | | L)n | | | Ig3 | Hn | TM | | |
| 10 | SP | L | (AABD- | Va | L | TCRa- | CD3z- | CD3z- | CD3z-CP | |
| | | | L)n | | | Ig3 | ECD | TM | | |
| | SP | L | (AABD- | Vb | L | TCRb- | DAP10- | NKp44- | NKp44-CP | |
| | | | L)n | | | Ig3 | ECD | TM | | |
| 11 | SP | L | (AABD- | Va | L | Ig | ECD | TM | CSD | CP |
| | | | L)n | | | | | | | |
| | SP | L | (AABD- | Vb | L | Ig | ECD | TM | CSD | CP |
| | | | L)n | | | | | | | |
| 12 | SP | L | (AABD- | Va | L | TCR- | CD3z- | CD3z- | 4-1BB | CD3z- |
| | | | L)n | | | Ig | ECD | TM | | CP |
| | SP | L | (AABD- | Vb | L | TCR- | CD3z- | CD3z- | 4-1BB | CD3z- |
| | | | L)n | | | Ig | ECD | TM | | CP |
| 13 | SP | L | (AABD- | Va | L | TCR- | CD3z- | CD3z- | CD3z- | |
| | | | L)n | | | Ig | ECD | TM | CP | |
| | SP | L | (AABD- | Vb | L | TCR- | CD3z- | CD3z- | 4-1BB | CD3z- |
| | | | L)n | | | Ig | ECD | TM | | CP |

TABLE A1-13
EXEMPLARY SAR

| SP | L | (AABD- | (scFv- | L | CD16- | CD16- | CD8- | CD8- | 4-1BB | CD3z |
|---|---|---|---|---|---|---|---|---|---|---|
| | | L)n | L)n | | D1 | D2 | Hn | TM | | |
| SP | L | (AABD- | (scFv- | L | CD16- | CD16- | CD28- | CD28- | CD28 | CD3z |
| | | L)n | L)n | | D1 | D2 | Hn | TM | | |
| SP | L | | (scFv- | L | CD16- | CD16- | CD28- | CD28- | CD28 | CD3z |
| | | | L)n | | D1 | D2 | Hn | TM | | |
| SP | L | (AABD- | | L | CD16- | CD16- | CD28- | CD28- | CD28 | CD3z |
| | | L)n | | | D1 | D2 | Hn | TM | | |
| SP | L | (AABD- | (scFv- | L | CD16- | CD16- | CD16- | CD28- | CD28 | CD3z |
| | | L)n | L)n | | D1 | D2 | Hn | TM | | |
| SP | L | | (scFv- | L | CD16- | CD16- | CD16- | CD28- | CD28 | CD3z |
| | | | L)n | | D1 | D2 | Hn | TM | | |
| SP | L | | scTCR | L | CD16- | CD16- | CD16- | CD28- | CD28 | CD3z |
| | | | | | D1 | D2 | Hn | TM | | |
| SP | L | (AABD- | (scFv- | L | CD16- | CD16- | 2B4- | 2B4- | 2B4 | CD3z |
| | | L)n | L)n | | D1 | D2 | Hn | TM | | |
| SP | L | | (scFv- | L | CD16- | CD16- | 2B4- | 2B4- | 2B4 | CD3z |
| | | | L)n | | D1 | D2 | Hn | TM | | |
| SP | L | (AABD- | | L | CD16- | CD16- | 2B4- | 2B4- | 2B4 | CD3z |
| | | L)n | | | D1 | D2 | Hn | TM | | |
| SP | L | | scTCR | L | CD16- | CD16- | CD16- | 2B4- | 2B4 | CD3z |
| | | | | | D1 | D2 | Hn | TM | | |
| SP | L | (AABD- | (scFv- | L | CD64- | CD64- | CD16- | CD16- | CD16-CP | |
| | | L)n | L)n | | D1 | D2-3 | Hn | TM | | |
| SP | L | (AABD- | | L | CD64- | CD64- | CD64- | CD16- | CD16-CP | |
| | | L)n | | | D1 | D2-3 | Hn | TM | | |
| SP | L | | (scFv- | L | CD64- | CD64- | CD64- | CD16- | CD16-CP | |
| | | | L)n | | D1 | D2-3 | Hn | TM | | |
| SP | L | | scTCR | L | CD64- | CD64- | CD16- | CD16- | CD16-CP | |
| | | | | | D1 | D2-3 | Hn | TM | | |
| SP | L | (AABD- | (scFv- | L | CD64- | CD64- | CD64- | CD16- | CD16-CP | |
| | | L)n | L)n | | D1 | D2-3 | Hn | TM | | |
| SP | L | (AABD- | (scFv- | L | CD32- | CD32- | CD16- | CD16- | CD16-CP | |
| | | L)n | L)n | | D1 | D2 | Hn | TM | | |
| SP | L | (AABD- | (scFv- | L | CD32- | CD32- | CD32- | CD16- | CD16-CP | |
| | | L)n | L)n | | D1 | D2 | Hn | TM | | |
| SP | L | (AABD- | (scFv- | L | CD32- | CD32- | CD16- | CD16- | CD16-CP | |
| | | L)n | L)n | | D1 | D2 | Hn | TM | | |
| SP | L | (AABD- | (scFv- | L | Nkp30- | Nkp30- | Nkp30- | CD3z | | |
| | | L)n | L)n | | Ig | Hi | TM | | | |
| SP | L | (AABD- | (scFv- | L | Nkp30- | Nkp30- | Nkp30- | 2B4 | CD3z | |
| | | L)n | L)n | | Ig | Hn | TM | | | |
| SP | L | (AABD- | (scFv- | L | Nkp30- | Nkp30- | Nkp30- | 2B4 | Nkp30 | |
| | | L)n | L)n | | Ig | Hn | TM | | | |
| SP | L | (AABD- | (scFv- | L | Nkp30- | Nkp30- | 2B4- | 2B4 | Nkp30 | |
| | | L)n | L)n | | Ig | Hn | TM | | | |
| SP | L | (AABD- | (scFv- | L | Nkp30- | 2B4- | 2B4- | 2B4 | CD3z | |
| | | L)n | L)n | | Ig | Hn | TM | | | |
| SP | L | (AABD- | (scFv- | L | Nkp46- | Nkp46- | CD28- | CD28- | CD28 | CD3z |
| | | L)n | L)n | | Ig1 | Ig2 | Hn | TM | | |

TABLE A1-14
EXEMPLARY TCR-SAR WITH BACKBONE OF zSAR

| SAR | | | | | | | | | | |
|---|---|---|---|---|---|---|---|---|---|---|
| Class | | | | | | | | | | |
| 1 | SP | L | (AABD- | Va | L | IgCL | CD3z- | CD3z- | CD3z-CP | |
| | | | L)n | | | | ECD | TM | | |
| | SP | L | (AABD- | Vb | L | Ig- | CD3z- | CD3z- | CD3z-CP | |
| | | | L)n | | | CH1 | ECD | TM | | |
| 2 | SP | L | (AABD- | Va | L | IgCL | CD3z- | CD3z- | CD3z-CP | |
| | | | L)n | | | | ECD | TM | | |
| | SP | L | (AABD- | Vb | L | IgG1- | CD3z- | CD3z- | CD3z-CP | |
| | | | L)n | | | CH1 | ECD | TM | | |
| 3 | SP | L | (AABD- | Va | L | IgCL | CD3z- | CD3z- | 4-1BB | CD3z-CP |
| | | | L)n | | | | ECD | TM | | |
| | SP | L | (AABD- | Vb | L | IgG1- | CD3z- | CD3z- | 4-1BB | CD3z-CP |
| | | | L)n | | | CH1 | ECD | TM | | |
| 4 | SP | L | (AABD- | Va | L | TCR- | CD3z- | CD3z- | CD3z-CP | |
| | | | L)n | | | Ig | ECD | TM | | |
| | SP | L | (AABD- | Vb | L | TCR- | CD3z- | CD3z- | CD3z-CP | |
| | | | L)n | | | Ig | ECD | TM | | |
| 5 | SP | L | (AABD- | Va | L | TCRa- | CD3z- | CD3z- | CD3z-CP | |
| | | | L)n | | | Ig3 | ECD | TM | | |
| | SP | L | (AABD- | Vb | L | TCRb- | CD3z- | CD3z- | CD3z-CP | |
| | | | L)n | | | Ig3 | ECD | TM | | |
| 6 | SP | L | (AABD- | Va | L | TCRa- | CD3z- | CD3z- | 4-1BB | CD3z-CP |
| | | | L)n | | | Ig3 | ECD | TM | | |
| | SP | L | (AABD- | Vb | L | TCRb- | CD3z- | CD3z- | 4-1BB | CD3z-CP |
| | | | L)n | | | Ig3 | ECD | TM | | |
| 7 | SP | L | (AABD- | Va | L | TCRa- | CD3z- | CD3z- | CD28 | CD3z-CP |
| | | | L)n | | | Ig3 | ECD | TM | | |
| | SP | L | (AABD- | Vb | L | TCRb- | CD3z- | CD3z- | CD28 | CD3z-CP |
| | | | L)n | | | Ig3 | ECD | TM | | |
| 8 | SP | L | (AABD- | Va | L | TCRa- | CD3z- | CD3z- | 41BB | CD3z-CP |
| | | | L)n | | | Ig3 | ECD | TM | | |
| | SP | L | (AABD- | Vb | L | TCRb- | CD3z- | CD3z- | CD28 | CD3z-CP |
| | | | L)n | | | Ig3 | ECD | TM | | |
| 9 | SP | L | (AABD- | Vg | L | Ig (Ig | CD3z- | CD3z- | CD3z-CP | |
| | | | L)n | | | linker) | ECD | TM | | |
| | SP | L | (AABD- | Vd | L | Ig (Ig | CD3z- | CD3z- | CD3z-CP | |
| | | | L)n | | | linker) | ECD | TM | | |
| 10 | SP | L | (AABD- | Vg | L | IgCL | CD3z- | CD3z- | CD3z-CP | |
| | | | L)n | | | | ECD | TM | | |
| | SP | L | (AABD- | Vd | L | Ig- | CD3z- | CD3z- | 41BB | CD3z-CP |
| | | | L)n | | | CH1 | ECD | TM | | |
| 11 | SP | L | (AABD- | Vg | L | TCRg- | CD3z- | CD3z- | CD28 | CD3z-CP |
| | | | L)n | | | Ig3 | ECD | TM | | |
| | SP | L | (AABD- | Vd | L | TCRd- | CD3z- | CD3z- | CD3z-CP | |
| | | | L)n | | | Ig3 | ECD | TM | | |

TABLE A1-15
EXEMPLARY TCR-SAR WITH BACKBONE OF zSAR

| SAR | | | | | | | | | |
|---|---|---|---|---|---|---|---|---|---|
| Class | | | | | | | | | |
| 1 | SP | L | (AABD- | Va | L | Ig (Ig | ECD | TM | CP |
| | | | L)n | | | linker) | | | |
| | SP | L | (AABD- | Vb | L | Ig (Ig | ECD | TM | CP |
| | | | L)n | | | linker) | | | |
| 2 | SP | L | (AABD- | Va | L | Ig (Ig | Hinge | TM | CP |
| | | | L)n | | | linker) | | | |
| | SP | L | (AABD- | Vb | L | Ig (Ig | Hinge | TM | CP |
| | | | L)n | | | linker) | | | |
| 3 | SP | L | (AABD- | Va | L | Ig (Ig | CD3z- | CD3z- | CD3z-CP |
| | | | L)n | | | linker) | ECD | TM | |
| | SP | L | (AABD- | Vb | L | Ig (Ig | CD3z- | CD3z- | CD3z-CP |
| | | | L)n | | | linker) | ECD | TM | |
| 4 | SP | L | (AABD- | Va | L | IgCL | CD3z- | CD3z- | CD3z-CP |
| | | | L)n | | | | ECD | TM | |
| | SP | L | (AABD- | Vb | L | Ig- | CD3z- | CD3z- | CD3z-CP |
| | | | L)n | | | CH1 | ECD | TM | |
| 5 | SP | L | (AABD- | Va | L | IgCL | CD3z- | CD3z- | CD3z-CP |
| | | | L)n | | | | ECD | TM | |
| | SP | L | (AABD- | Vb | L | IgG1- | CD3z- | CD3z- | CD3z-CP |
| | | | L)n | | | CH1 | ECD | TM | |
| 6 | SP | L | (AABD- | Va | L | IgCL | CD3z- | CD3z- | CD3z-CP |
| | | | L)n | | | | ECD | TM | |
| | SP | L | (AABD- | Vb | L | IgA1- | CD3z- | CD3z- | CD3z-CP |
| | | | L)n | | | CH1 | ECD | TM | |
| 7 | SP | L | (AABD- | Va | L | IgCL | CD3z- | CD3z- | CD3z-CP |
| | | | L)n | | | | ECD | TM | |
| | SP | L | (AABD- | Vb | L | IgD- | CD3z- | CD3z- | CD3z-CP |
| | | | L)n | | | CH1 | ECD | TM | |
| 8 | SP | L | (AABD- | Va | L | IgCL | CD3z- | CD3z- | CD3z-CP |
| | | | L)n | | | | ECD | TM | |
| | SP | L | (AABD- | Vb | L | IgM- | CD3z- | CD3z- | CD3z-CP |
| | | | L)n | | | CH1 | ECD | TM | |
| 9 | SP | L | (AABD- | Vg | L | Ig (Ig | ECD | TM | CP |
| | | | L)n | | | linker) | | | |
| | SP | L | (AABD- | Vd | L | Ig (Ig | ECD | TM | CP |
| | | | L)n | | | linker) | | | |
| 10 | SP | L | (AABD- | Vg | L | Ig (Ig | Hinge | TM | CF |
| | | | L)n | | | linker) | | | |
| | SP | L | (AABD- | Vd | L | Ig (Ig | Hinge | TM | CP |
| | | | L)n | | | linker) | | | |
| 11 | SP | L | (AABD- | Vg | L | Ig (Ig | CD3z- | CD3z- | CD3z-CP |
| | | | L)n | | | linker) | ECD | TM | |
| | SP | L | (AABD- | Vd | L | Ig (Ig | CD3z- | CD3z- | CD3z-CP |
| | | | L)n | | | linker) | ECD | TM | |
| 12 | SP | L | (AABD- | Vg | L | IgCL | CD3z- | CD3z- | CD3z-CP |
| | | | L)n | | | | ECD | TM | |
| | SP | | (AABD- | Vd | L | Ig- | CD3z- | CD3z- | CD3z-CP |
| | | | L)n | | | CH1 | ECD | TM | |
| 13 | SP | L | (AABD- | Vg | L | IgCL | CD3z- | CD3z- | CD3z-CP |
| | | | L)n | | | | ECD | TM | |
| | SP | L | (AABD- | Vd | L | IgA1- | CD3z- | CD3z- | CD3z-CP |
| | | | L)n | | | CH1 | ECD | TM | |
| 14 | SP | L | (AABD- | Vg | L | IgCL | CD3z- | CD3z- | CD3z-CP |
| | | | L)n | | | | ECD | TM | |
| | SP | L | (AABD- | Vd | L | IgD- | CD3z- | CD3z- | CD3z-CP |
| | | | L)n | | | CH1 | ECD | TM | |
| 15 | SP | L | (AABD- | Vg | L | IgCL | CD3z- | CD3z- | CD3z-CP |
| | | | L)n | | | | ECD | TM | |
| | SP | L | (AABD- | Vd | L | IgM- | CD3z- | CD3z- | CD3z-CP |
| | | | L)n | | | CH1 | ECD | TM | |

TABLE A1-16
EXEMPLARY TCR-SAR

| | | | | | | | | | | |
|---|---|---|---|---|---|---|---|---|---|---|
| 1 | SP | L | (AABD- | Va | L | Ig (Ig | ECD | TM | CSD | CP (AD) |
| | | | L)n | | | linker) | | | | |
| | SP | L | (AABD- | Vb | L | Ig (Ig | ECD | TM | CSD | CP (AD) |
| | | | L)n | | | linker) | | | | |
| 2 | SP | L | (AABD- | Va | L | Ig (Ig | Hinge | TM | CSD | CP (AD) |
| | | | L)n | | | linker) | | | | |
| | SP | L | (AABD- | Vb | L | Ig (Ig | Hinge | TM | CSD | CP (AD) |
| | | | L)n | | | linker) | | | | |
| 3 | SP | L | (AABD- | Va | L | Ig (Ig | CD3z- | CD3z- | BB | CD3z-CP |
| | | | L)n | | | linker) | ECD | TM | | |
| | SP | L | (AABD- | Vb | L | Ig (Ig | CD3z- | CD3z- | BB | CD3z-CP |
| | | | L)n | | | linker) | ECD | TM | | |
| 4 | SP | L | (AABD- | Va | L | IgCL | CD3z- | CD3z- | BB | CD3z-CP |
| | | | L)n | | | | ECD | TM | | |
| | SP | L | (AABD- | Vb | L | IgG1- | CD3z- | CD3z- | BB | CD3z-CP |
| | | | L)n | | | CH1 | ECD | TM | | |
| 5 | SP | L | (AABD- | Va | L | IgCL | CD3z- | CD3z- | CD28 | CD3z-CP |
| | | | L)n | | | | ECD | TM | | |
| | SP | L | (AABD- | Vb | L | IgG1- | CD3z- | CD3z- | CD28 | CD3z-CP |
| | | | L)n | | | CH1 | ECD | TM | | |
| 6 | SP | L | (AABD- | Va | L | IgCL | CD3z- | CD3z- | 2B4 | CD3z-CP |
| | | | L)n | | | | ECD | TM | | |
| | SP | L | (AABD- | Vb | L | IgG1- | CD3z- | CD3z- | 2B4 | CD3z-CP |
| | | | L)n | | | CH1 | ECD | TM | | |
| 7 | SP | L | (AABD- | Va | L | IgCL | CD3z- | CD3z- | OX40 | CD3z-CP |
| | | | L)n | | | | ECD | TM | | |
| | SP | L | (AABD- | Vb | L | IgG1- | CD3z- | CD3z- | OX40 | CD3z-CP |
| | | | L)n | | | CH1 | ECD | TM | | |
| 8 | SP | L | (AABD- | Va | L | Ig (Ig | CD3z- | CD3z- | CD3z-CP | |
| | | | L)n | | | linker) | ECD | TM | | |
| | SP | L | (AABD- | Vb | L | Ig (Ig | CD3z- | CD3z- | BB | CD3z-CP |
| | | | L)n | | | linker) | ECD | TM | | |

TABLE A1-17
EXEMPLARY TCR-SAR

| | | | | | | | | | |
|---|---|---|---|---|---|---|---|---|---|
| SP | L | (AABD- | Vg | L | Ig (Ig | CD3z- | CD3z- | CD3z-CP | |
| | | L)n | | | linker) | ECD | TM | | |
| SP | L | (AABD- | Vd | L | Ig (Ig | CD3z- | CD3z- | CD3z-CP | |
| | | L)n | | | linker) | ECD | TM | | |
| SP | L | (AABD- | Vg | L | TCRg- | CD3z- | CD3z- | CD3z-CP | |
| | | L)n | | | Ig3 | ECD | TM | | |
| SP | L | (AABD- | Vd | L | TCRd- | CD3z- | CD3z- | CD3z-CP | |
| | | L)n | | | Ig3 | ECD | TM | | |
| SP | L | (AABD- | Vg | L | IgCL | CD3z- | CD3z- | CD3z-CP | |
| | | L)n | | | | ECD | TM | | |
| SP | L | (AABD- | Vd | L | IgA1- | CD3z- | CD3z- | CD3z-CP | |
| | | L)n | | | CH1 | ECD | TM | | |
| SP | L | (AABD- | Vg | L | IgCL | CD3z- | CD3z- | CD3z-CP | |
| | | L)n | | | | ECD | TM | | |
| SP | L | (AABD- | Vd | L | IgD- | CD3z- | CD3z- | CD3z-CP | |
| | | L)n | | | CH1 | ECD | TM | | |
| SP | L | (AABD- | Vg | L | IgCL | CD3z- | CD3z- | CD3z-CP | |
| | | L)n | | | | ECD | TM | | |
| SP | L | (AABD- | Vd | L | IgM- | CD3z- | CD3z- | CD3z-CP | |
| | | L)n | | | CH1 | ECD | TM | | |
| SP | L | (AABD- | Va | L | Ig (Ig | CD3z- | CD3z- | 4-1BB | z |
| | | L)n | | | linker) | ECD | TM | | |
| SP | L | (AABD- | Vb | L | Ig (Ig | CD3z- | CD3z- | 4-1BB | z |
| | | L)n | | | linker) | ECD | TM | | |
| SP | L | (AABD- | Va | L | IgCL | CD3z- | CD3z- | 4-1BB | z |
| | | L)n | | | | ECD | TM | | |
| SP | L | (AABD- | Vb | L | IgG1- | CD3z- | CD3z- | 4-1BB | z |
| | | L)n | | | CH1 | ECD | TM | | |
| SP | L | (AABD- | Va | L | IgCL | CD3z- | CD3z- | CD28 | z |
| | | L)n | | | | ECD | TM | | |
| SP | L | (AABD- | Vb | L | IgG1- | CD3z- | CD3z- | CD28 | z |
| | | L)n | | | CH1 | ECD | TM | | |
| SP | L | (AABD- | Va | L | IgCL | CD3z- | CD3z- | 2B4 | z |
| | | L)n | | | | ECD | TM | | |
| SP | L | (AABD- | Vb | L | IgG1- | CD3z- | CD3z- | 2B4 | z |
| | | L)n | | | CH1 | ECD | TM | | |
| SP | L | (AABD- | Va | L | IgCL | CD3z- | CD3z- | OX40 | z |
| | | L)n | | | | ECD | TM | | |
| SP | L | (AABD- | Vb | L | IgG1- | CD3z- | CD3z- | OX40 | z |
| | | L)n | | | CH1 | ECD | TM | | |
| SP | L | (AABD- | Va | L | Ig (Ig | CD3z- | CD3z- | z | |
| | | L)n | | | linker) | ECD | TM | | |
| SP | L | (AABD- | Vb | L | Ig (Ig | CD3z- | CD3z- | 4-1BB | z |
| | | L)n | | | linker) | ECD | TM | | |

TABLE A1-18
EXEMPLARY TCR-SAR WITH BACKBONE OF zSAR

| SAR | | | | | | | | | |
|---|---|---|---|---|---|---|---|---|---|
| Class | | | | | | | | | |
| 1 | SP | L | (AABD- | Va | L | Ig (Ig | ECD | TM | CP |
| | | | L)n | | | linker) | | | |
| | SP | L | (AABD- | Vb | L | Ig (Ig | ECD | TM | CP |
| | | | L)n | | | linker) | | | |
| 2 | SP | L | (AABD- | Va | L | Ig (Ig | Hinge | TM | CP |
| | | | L)n | | | linker) | | | |
| | SP | L | (AABD- | Vb | L | Ig (Ig | Hinge | TM | CP |
| | | | L)n | | | linker) | | | |
| 3 | SP | L | (AABD- | Va | L | Ig (Ig | CD3z- | CD3z- | CD3z-CP |
| | | | L)n | | | linker) | ECD | TM | |
| | SP | L | (AABD- | Vb | L | Ig (Ig | CD16- | CD16- | CD16-CP |
| | | | L)n | | | linker) | ECD | TM | |
| 4 | SP | L | (AABD- | Va | L | TCR- | CD3z- | CD3z- | CD3z-CP |
| | | | L)n | | | Ig | ECD | TM | |
| | SP | L | (AABD- | Vb | L | TCR- | CD16- | CD16- | CD16-CP |
| | | | L)n | | | Ig | hinge | TM | |
| 5 | SP | L | (AABD- | Va | L | TCRa- | CD3z- | CD3z- | CD3z-CP |
| | | | L)n | | | Ig3 | ECD | TM | |
| | SP | L | (AABD- | Vb | L | TCRb- | CD16- | CD16- | CD16-CP |
| | | | L)n | | | Ig3 | hinge | TM | |
| 6 | SP | L | (AABD- | Va | L | TCRa- | CD3z- | CD3z- | CD3z-CP |
| | | | L)n | | | Ig3 | ECD | TM | |
| | SP | L | (AABD- | Vb | L | TCRb- | CD3z- | CD16- | CD16-CP |
| | | | L)n | | | Ig3 | ECD | TM | |
| 7 | SP | L | (AABD- | Va | L | TCRa- | CD3z- | CD3z- | CD3z-CP |
| | | | L)n | | | Ig3 | ECD | TM | |
| | SP | L | (AABD- | Vb | L | TCRb- | NKp30- | NKp30- | NKp30-CP |
| | | | L)n | | | Ig3 | hinge | TM | |
| 8 | SP | L | (AABD- | Va | L | TCRa- | CD3z- | CD3z- | CD3z-CP |
| | | | L)n | | | Ig3 | ECD | TM | |
| | SP | L | (AABD- | Vb | L | TCRb- | NKp44- | NKp44- | NKp44-CP |
| | | | L)n | | | Ig3 | hinge | TM | |
| 9 | SP | L | (AABD- | Va | L | TCRa- | CD3z- | CD3z- | CD3z-CP |
| | | | L)r | | | Ig3 | ECD | TM | |
| | SP | L | (AABD- | Vb | L | TCRb- | NKp46- | NKp46- | NKp46-CP |
| | | | L)n | | | Ig3 | hinge | TM | |
| 10 | SP | L | (AABD- | Va | L | TCRa- | CD3z- | CD3z- | CD3z-CP |
| | | | L)n | | | Ig3 | ECD | TM | |
| | SP | L | (AABD- | Vb | L | TCRb- | CD3z- | NKp30- | NKp30-CP |
| | | | L)n | | | Ig3 | ECD | TM | |
| 11 | SP | L | (AABD- | Va | L | TCRa- | CD3z- | CD3z- | CD3z-CP |
| | | | L)n | | | Ig3 | ECD | TM | |
| | SP | L | (AABD- | Vb | L | TCRb- | DAP10- | NKp44- | NKp44-CP |
| | | | L)n | | | Ig3 | ECD | TM | |
| 12 | SP | L | (AABD- | Va | L | TCRa- | CD3z- | CD3z- | CD3z-CP |
| | | | L)n | | | Ig3 | ECD | TM | |
| | SP | L | (AABD- | Vb | L | TCRb- | DAP12- | NKp46- | NKp46-CP |
| | | | L)n | | | Ig3 | ECD | TM | |
| 13 | SP | L | (AABD- | Va | L | TCRa- | FCRG- | FCRG- | FCRG-CP |
| | | | L)n | | | Ig3 | ECD | TM | |
| | SP | L | (AABD- | Vb | L | TCRb- | CD16- | CD16- | CD16-CP |
| | | | L)n | | | Ig3 | hinge | TM | |
| 14 | SP | L | (AABD- | Va | L | TCRa- | FCRG- | FCRG- | FCRG-CP |
| | | | L)n | | | Ig3 | ECD | TM | |
| | SP | L | (AABD- | Vb | L | TCRb- | CD3z- | CD3z- | CD3z-CP |
| | | | L)n | | | Ig3 | ECD | TM | |
| 15 | SP | L | (AABD- | Va | L | TCRa- | CD3z- | CD3z- | CD3z-CP |
| | | | L)n | | | Ig3 | ECD | TM | |
| | SP | L | (AABD- | Vb | L | TCRb- | FCRG- | FCRG- | FCRG-CP |
| | | | L)n | | | Ig3 | ECD | TM | |
| 16 | SP | L | (AABD- | Va | L | TCRa- | DAP10- | DAP10- | DAP10-CP |
| | | | L)n | | | Ig3 | ECD | TM | |
| | SP | L | (AABD- | Vb | L | TCRb- | DAP10- | DAP10- | DAP10-CP |
| | | | L)n | | | Ig3 | ECD | TM | |
| 17 | SP | L | (AABD- | Va | L | TCRa- | CD3z- | CD3z- | CD3z-CP |
| | | | L)n | | | Ig3 | ECD | TM | |
| | SP | L | (AABD- | Vb | L | TCRb- | DAP10- | DAP10- | DAP10-CP |
| | | | L)n | | | Ig3 | ECD | TM | |
| 18 | SP | L | (AABD- | Va | L | TCRa- | DAP10- | DAP10- | DAP10-CP |
| | | | L)n | | | Ig3 | ECD | TM | |
| | SP | L | (AABD- | Vb | L | TCRb- | CD3z- | CD3z- | CD3z-CP |
| | | | L)n | | | Ig3 | ECD | TM | |
| 19 | SP | L | (AABD- | Va | L | TCRa- | DAP10- | DAP10- | DAP10-CP |
| | | | L)n | | | Ig3 | ECD | TM | |
| | SP | L | (AABD- | V | L | TCRb- | FCRG- | FCRG- | FCRG-CP |
| | | | L)n | b | | Ig3 | ECD | TM | |
| 20 | SP | L | (AABD- | Va | L | TCRa- | FCRG- | FCRG- | FCRG-CP |
| | | | L)n | | | Ig3 | ECD | TM | |
| | SP | L | (AABD- | Vb | L | TCRb- | DAP10- | DAP10- | DAP10-CP |
| | | | L)r | | | Ig3 | ECD | TM | |
| 21 | SP | L | (AABD- | Va | L | TCRa- | DAP12- | DAP12- | DAP12-CP |
| | | | L)n | | | Ig3 | ECD | TM | |
| | SP | L | (AABD- | Vb | L | TCRb- | DAP12- | DAP12- | DAP12-CP |
| | | | L)n | | | Ig3 | ECD | TM | |
| 22 | SP | L | (AABD- | Va | L | TCRa- | CD3z- | CD3z- | CD3z-CP |
| | | | L)n | | | Ig3 | ECD | TM | |
| | SP | L | (AABD- | Vb | L | TCRb- | DAP12- | DAP12- | DAP12-CP |
| | | | L)n | | | Ig3 | ECD | TM | |
| 23 | SP | L | (AABD- | Va | L | TCRa- | DAP12- | DAP12- | DAP12-CP |
| | | | L)n | | | Ig3 | ECD | TM | |
| | SP | L | (AABD- | Vb | L | TCRb- | CD3z- | CD3z- | CD3z-CP |
| | | | L)n | | | Ig3 | ECD | TM | |
| 24 | SP | L | (AABD- | Va | L | TCRa- | DAP12- | DAP12- | DAP12-CP |
| | | | L)n | | | Ig3 | ECD | TM | |
| | SP | L | (AABD- | Vb | L | TCRb- | FCRG- | FCRG- | FCRG-CP |
| | | | L)n | | | Ig3 | ECD | TM | |
| 25 | SP | L | (AABD- | Va | L | TCRa- | FCRG- | FCRG- | FCRG-CP |
| | | | L)n | | | Ig3 | ECD | TM | |
| | SP | L | (AABD- | Vb | L | TCRb- | DAP12- | DAP12- | DAP12-CP |
| | | | L)n | | | Ig3 | ECD | TM | |
| 26 | SP | L | (AABD- | Va | L | TCRa- | DAP10- | DAP10- | DAP10-CP |
| | | | L)n | | | Ig3 | ECD | TM | |
| | SP | L | (AABD- | Vb | L | TCRb- | DAP12- | DAP12- | DAP12-CP |
| | | | L)n | | | Ig3 | ECD | TM | |

TABLE A1-19
EXEMPLARY TCR-SAR

| | | | | | | | | | | |
|---|---|---|---|---|---|---|---|---|---|---|
| SP | L | (AABD- | (scFv-L)n | L | CD16- | CD16- | CD8- | CD8- | BB | Z |
| | | L)n | | | D1 | D2 | Hn | TM | | |
| SP | L | (AABD- | (scFv-L)n | L | CD16- | CD16- | CD28- | CD28- | 28 | Z |
| | | L)n | | | D1 | D2 | Hn | TM | | |
| SP | L | | (scFv-L)n | L | CD16- | CD16- | CD28- | CD28- | 28 | Z |
| | | | | | D1 | D2 | Hn | TM | | |
| SP | L | (AABD- | | L | CD16- | CD16- | CD28- | CD28- | 28 | Z |
| | | L)n | | | D1 | D2 | Hn | TM | | |
| SP | L | | scTCR | L | CD16- | CD16- | CD16- | CD28- | 28 | Z |
| | | | | | D1 | D2 | Hn | TM | | |
| SP | L | (AABD- | (scFv-L)n | L | CD16- | CD16- | 2B4- | 2B4- | 2B4 | Z |
| | | L)n | | | D1 | D2 | Hn | TM | | |
| SP | L | | (scFv-L)n | L | CD16- | CD16- | 2B4- | 2B4- | 2B4 | Z |
| | | | | | D1 | D2 | Hn | TM | | |
| SP | L | (AABD- | | L | CD16- | CD16- | 2B4- | 2B4- | 2B4 | Z |
| | | L)n | | | D1 | D2 | Hn | TM | | |
| SP | L | | scTCR | L | CD16- | CD16- | CD16- | 2B4- | 2B4 | Z |
| | | | | | D1 | D2 | Hn | TM | | |
| SP | L | (AABD- | (scFv-L)n | L | Nkp30- | Nkp30- | Nkp30- | z | | |
| | | L)n | | | Ig | Hi | TM | | | |
| SP | L | | (scFv-L)n | L | Nkp30- | Nkp30- | Nkp30- | 2B4 | z | |
| | | | | | Ig | Hn | TM | | | |
| SP | L | (AABD- | (scFv-L)n | L | Nkp30- | Nkp30- | Nkp30- | 2B4 | Nkp30 | |
| | | L)n | | | Ig | Hn | TM | | | |
| SP | L | (AABD- | (scFv-L)n | L | Nkp30- | Nkp30- | 2B4- | 2B4 | Nkp30 | |
| | | L)n | | | Ig | Hn | TM | | | |
| SP | L | (AABD- | (scFv-L)n | L | Nkp30- | 2B4- | 2B4- | 2B4 | z | |
| | | L)n | | | Ig | Hn | TM | | | |
| SP | L | (AABD- | (scFv-L)n | L | Nkp30- | CD28- | CD28- | CD28 | z | |
| | | L)n | | | Ig | Hn | TM | | | |
| SP | L | (AABD- | (scFv-L)n | L | Nkp44- | Nkp44- | Nkp44- | | z | |
| | | L)n | | | Ig | Hn | TM | | | |
| SP | L | (AABD- | (scFv-L)n | L | Nkp44- | Nkp44- | Nkp44- | 2B4 | z | |
| | | L)n | | | Ig | Hn | TM | | | |
| SP | L | (AABD- | (scFv-L)n | L | Nkp44- | Nkp44- | Nkp44- | 2B4 | Nkp30 | |
| | | L)n | | | Ig | Hn | TM | | | |
| SP | L | (AABD- | (scFv-L)n | L | Nkp44- | Nkp44- | 2B4- | 2B4 | Nkp30 | |
| | | L)n | | | Ig | Hn | TM | | | |
| SP | L | (AABD- | (scFv-L)n | L | Nkp44- | 2B4- | 2B4- | 2B4 | z | |
| | | L)n | | | Ig | Hn | TM | | | |
| SP | L | (AABD- | (scFv-L)n | L | Nkp44- | CD28- | CD28- | CD28 | z | |
| | | L)n | | | Ig | Hn | TM | | | |
| SP | L | (AABD- | (scFv-L)n | L | Nkp46- | Nkp46- | CD28- | CD28- | 28 | z |
| | | L)n | | | Ig1 | Ig2 | Hn | TM | | |
| SP | L | | (scFv-L)n | L | Nkp46- | Nkp46- | CD28- | CD28- | 28 | z |
| | | | | | Ig1 | Ig2 | Hn | TM | | |
| SP | L | (AABD- | | L | Nkp46- | Nkp46- | CD28- | CD28- | 28 | z |
| | | L)n | | | Ig1 | Ig2 | Hn | TM | | |
| SP | L | | scTCR | L | Nkp46- | Nkp46- | NKp46- | CD28- | 28 | z |
| | | | | | Ig1 | Ig2 | Hn | TM | | |
| SP | L | (AABD- | (scFv-L)n | L | Nkp46- | Nkp46- | 2B4- | 2B4- | 2B4 | z |
| | | L)n | | | Ig1 | Ig2 | Hn | TM | | |
| SP | L | | (scFv-L)n | L | Nkp46- | Nkp46- | 2B4- | 2B4- | 2B4 | z |
| | | | | | Ig1 | Ig2 | Hn | TM | | |
| SP | L | (AABD- | | L | Nkp46- | Nkp46- | 2B4- | 2B4- | 2B4 | z |
| | | L)n | | | Ig1 | Ig2 | Hn | TM | | |
| SP | L | | scTCR | L | Nkp46- | Nkp46- | CD16- | 2B4- | 2B4 | z |
| | | | | | Ig1 | Ig2 | Hn | TM | | |

[0101] As used herein “beneficial results” or “desired results” may include, but are not limited to, lessening or alleviating the severity of the disease condition, preventing the disease condition from worsening, curing the disease condition, preventing the disease condition from developing, lowering the chances of a patient developing the disease condition and prolonging a patient's life or life expectancy.

[0102] “Binds the same epitope as” means the ability of an antibody, scFv, or other antigen binding domain to bind to a target antigen and having the same epitope as an exemplified antibody, scFv, or other antigen binding domain. As an example, the epitopes of the exemplified antibody, scFv, or other binding agent and other antibodies can be determined using standard epitope mapping techniques. Epitope mapping techniques, well known in the art include Epitope Mapping Protocols in Methods in Molecular Biology, Vol. 66 (Glenn E. Morris, Ed., 1996) Humana Press, Totowa, New Jersey. Exemplary epitopes of human CD20, BCMA and human MPL antigen bound by scFv, SARs, antibodies and other immunotherapeutics of the current disclosure are provided in SEQ ID NO: 15149-15154, 15155-15159 and 15160, respectively of patent application PCT/US18/53247, which is incorporated in its entirety by reference herein.

[0103] It is to be inferred without explicit recitation and unless otherwise intended, that when the disclosure relates to a polypeptide, protein, polynucleotide, antibody, SAR or fragment thereof, an equivalent or a biologically equivalent of such is intended within the scope of this disclosure. As used herein, the term “biological equivalent thereof” or “variant” or “functional variant” is intended to be synonymous with “equivalent thereof” when referring to a reference protein, antibody or fragment thereof, receptor of fragment thereof, ligand or fragment thereof, non-immunoglobulin antigen binding domain or fragment thereof, SAR or a fragment thereof, polypeptide or nucleic acid, intends those having minimal homology while still maintaining desired structure or functionality. Unless specifically recited herein, it is contemplated that any of the above also includes equivalents thereof, including alternatively spliced isoforms and equivalents from other animal species. For example, an equivalent intends at least about 70% homology or identity, or at least 80% homology or identity and alternatively, or at least about 85%, or alternatively at least about 90%, or alternatively at least about 95%, or alternatively at least 98% percent homology or identity and exhibits substantially equivalent biological activity to the reference protein, polypeptide, antibody or fragment thereof or nucleic acid. Alternatively, when referring to polynucleotides, an equivalent thereof is a polynucleotide that hybridizes under stringent conditions to the reference polynucleotide or its complement. Alternatively, when referring to polypeptides or proteins, an equivalent thereof is an expressed polypeptide or protein from a polynucleotide that hybridizes under stringent conditions to the polynucleotide or its complement that encodes the reference polypeptide or protein.

[0104] It will be recognized that proteins can have identity or homology to one another and retain similar or identical functions. A polypeptide “variant,” as used herein, is a polypeptide that differs from the recited polypeptide only in conservative substitutions and/or modifications, such that therapeutic, antigenic and/or immunogenic properties of the polypeptide are retained. Polypeptide variants typically exhibit at least about 70%, more typically at least about 90% and most typically at least about 95% homology to the identified polypeptides. For polypeptides with immunoreactive properties, variants can, alternatively, be identified by modifying the amino acid sequence of one of the above polypeptides, and evaluating the immunoreactivity of the modified polypeptide. Such modified sequences can be prepared and tested using, for example, the representative procedures described herein. The disclosure includes SAR and SAR components (e.g., extracellular, hinge, transmembrane and cytosolic regions of CD16, CD32, CD64, FcRγ, DAP10, DAP12, DNAM1, OX40, 2B4, KIR2DL1, KIR2DS4, NKp30, NKp44, NKp46, NKG2D, NKG2A, NKG2C, NKG2E, NKG2F, NKG2H, TCRα, TCRβ, TCRγ, TCRδ, and CD3z etc.) that have at least 70%, 80%, 85%, 90%, 95%, 97%, 98%, 98.5%, 99% or 99.9% identity to any of the amino acid sequences described herein while retaining the biological activity. The disclosure also includes antigen binding domains, extracellular domains, hinge domains, transmembrane domains, cytosolic domains, costimulatory domains, accessory modules that have at least 70%, 80%, 85%, 90%, 95%, 97%, 98%, 98.5%, 99% or 99.9% identity to any of the sequences described herein while retaining the biological activity. Variants include homologs from other species and alternative spliced isoforms.

[0105] As used herein, the term “CD3 complex” refers to a cell surface molecule assembly comprising numerous proteins for transmembrane signaling of TCR activation.

[0106] As used herein, the term “CDR” or “complementarity determining region” is intended to mean the non-contiguous antigen combining sites found within the variable region of both heavy and light chain polypeptides. These particular regions have been described by Kabat et al., J. Bio. Chem. 252:6609-6616 (1977); Kabat et al., U.S. Dept. of Health and Human Services, “Sequences of proteins of immunological interest” (1991); Chothia et al., J. Mol. Bio. 196:901-917 (1987); and MacCallum et al., J. Mol. Bio. 25 262:732-745 (1996), where the definitions include overlapping or subsets of amino acid residues when compared against each other. Nevertheless, application of either definition to refer to a CDR of an antibody or grafted antibodies or variants thereof is intended to be within the scope of the term as defined and used herein. As used herein, the different CDRs of an antibody could be also defined by a combination of the different definitions. For example, vHCDR1 could be defined based on Kabat and VHCDR2 could be defined based on Chothia. The amino acid residues which encompass the CDRs as defined by each of the above cited references are as follows:

| | Kabat | Chothia | MacCallum |
|---|---|---|---|
| VHCDR1 | 31-35 | 26-32 | 30-35 |
| VHCDR2 | 50-65 | 53-55 | 47-58 |
| VHCDR3 | 95-102 | 96-10 | 193-101 |
| VLCDR1 | 24-34 | 26-32 | 30-36 |
| VLCDR2 | 50-56 | 50-52 | 46-55 |
| VLCDR3 | 89-97 | 91-96 | 89-96 |

(Residue Numbers correspond to the identified reference).

[0107] The SEQ IDs of the CDRs of the exemplary vL and vH segments that can make up antigen binding domains of SAR, bispecific antibodies and other immunotherapeutics of the current disclosure are provided in SEQ ID NO: 13204-14121 and SEQ ID NO: 14122-15039, respectively (Tables 6A, B) of PCT/US2018/053247, in Tables 5-6 of PCT/US2017/064379 and in Table 39 of PCT/US2021/022641, which are incorporated herein by reference. The SEQ IDs of the exemplary vL and vH segments that can make up antigen binding domains of SAR, antibodies and other immunotherapeutics are also provided in Table 3 of the current disclosure. The light chain CDR1, CDR2 and CDR3 of the vL fragments and scFvs provided in the current disclosure (e.g., Table 3) are provided in SEQ ID NO: 10882-11118, 11119-11355 and 11356-11592. The CDR1, CDR2 and CDR3 of the vL fragments provided in the current disclosure (e.g., Table 3) are provided in SEQ ID NO: 10882-11118, 11119-11355 and 11356-11592. The heavy chain CDR1, CDR2 and CDR3 of the vH fragments and scFvs provided in the current disclosure (e.g., Table 3) are provided in SEQ ID NO:11593-11829, 11830-12066, 12067-12303, respectively.

[0108] In some embodiments, reference to an antigen-binding module (such as a Fab-like or Fv-like antigen-binding module) that specifically binds to a target antigen means that the antigen-binding module binds to the target antigen with (a) an affinity that is at least about 10 (e.g., about 10, 20, 30, 40, 50, 75,100,200, 300, 400, 500, 750, 1000 or more) times its binding affinity for other molecules; or (b) a Ka no more than about 1/10 (e.g., 1/10, 1/20, 1/30, 1/40, 1/50, 1175, 1/100, 1/200, 1/300, 1/400, 1/500, 1/750, 1/1000 or less) times its Ka for binding to other molecules. Binding affinity can be determined by methods known in the art, such as ELISA, fluorescence activated cell sorting (FACS) analysis, Malibu-Glo assay, Topanga Assay, or radioimmunoprecipitation assay (RIA).

[0109] “Cancer” and “cancerous” refer to or describe the physiological condition in mammals that is typically characterized by unregulated cell growth. The terms “tumor” and “cancer” are used interchangeably herein, e.g., both terms encompass solid and liquid, e.g., diffuse or circulating, tumors. As used herein, the term “cancer” or “tumor” includes premalignant, as well as malignant cancers and tumors. The term “cancer” is meant to include all types of cancerous growths or oncogenic processes, metastatic tissues or malignantly transformed cells, tissues, or organs, irrespective of histopathologic type or stage of invasiveness.

[0110] “Cell therapy” or “Cell-based therapy” or “Immune cell therapy” or Immune effector cell therapy” refers to a therapy that involves the use of cells for the prevention or treatment of a disease. Non-limiting examples of cell therapy include CAR-T cell therapy, NK-cell therapy, recombinant TCR-T cell therapy, TIL (tumor infiltrating lymphocytes).

[0111] “Chemotherapeutic agents” are compounds that are known to be of use in chemotherapy for cancer.

[0112] “Chimeric antigen receptors” (CARs) are artificial (non-naturally occurring) immune cell (e.g., T cell) receptors contemplated for use as a therapy for cancer, using a technique called adoptive cell transfer. CARs are also known as artificial T-cell receptors, chimeric T-cell receptors or chimeric immunoreceptors. CARs are constructed specifically to stimulate T cell activation and proliferation in response to a specific antigen to which the CAR binds. Generally, a CAR refers to a set of polypeptides, typically two in the simplest embodiments, which when expressed in an immune effector cell, provides the cell with specificity for a target cell, typically a cancer cell, and with intracellular signal generation. In some embodiments, a CAR comprises at least an extracellular antigen binding domain, a transmembrane domain and a cytoplasmic signaling domain (also referred to herein as “an intracellular signaling domain”) comprising a functional signaling domain derived from a stimulatory molecule and/or costimulatory molecule. In some aspects, the set of polypeptides are contiguous with each other. In one aspect, the stimulatory molecule is the zeta chain associated with the T cell receptor complex. In one aspect, the cytoplasmic signaling domain further comprises one or more functional signaling domains derived from at least one costimulatory molecule as defined below. In one embodiment, the costimulatory molecule is chosen from the costimulatory molecules described herein, e.g., 4-1BB (i.e., CD137), CD27, OX40, 2B4, and/or CD28. In one embodiment, the CAR comprises an optional leader sequence at the amino-terminus (N-ter) of the CAR fusion protein. In one embodiment, the CAR further comprises a leader sequence at the N-terminus of the extracellular antigen binding domain, wherein the leader sequence is optionally cleaved from the antigen binding domain (e.g., a scFv) during cellular processing and localization of the CAR to the cellular membrane. In various embodiments, CARs are recombinant polypeptides comprising an antigen-specific domain (ASD), a hinge region (HR), a transmembrane domain (TMD), an optional co-stimulatory domain (CSD) and an intracellular signaling domain (ISD). The optional costimulatory domain is generally absent in the 1t generation CAR constructs. The nucleic acid and protein sequences of several exemplary 2nd generation CARs comprising the different antigen binding domains (e.g., vL and vH fragments, vHH, ligands and receptors etc.) and incorporating the 41BB costimulatory domain are presented in SEQ ID NO: 1455-1703 and 341-7589 (Table 8) of PCT/US2020/014237.

[0113] “Codon optimization” or “controlling for species codon bias” refers to the preferred codon usage of a particular host cell. As will be understood by those of skill in the art, it can be advantageous to modify a coding sequence to enhance its expression in a particular host. Those of skill in the art will recognize that, due to the degenerate nature of the genetic code, a variety of DNA compounds differing in their nucleotide sequences can be used to encode a given polypeptide of the disclosure.

[0114] As used herein, “co-express” refers to expression of two or more polynucleotides or genes. Genes may be nucleic acids encoding, for example, a single protein or a chimeric protein as a single polypeptide chain. A SAR (e.g., a CAR, SIR, zSIR, or TCR etc.) described herein may be encoded by a single polynucleotide chain and expressed as single polypeptide chain, which is subsequently cleaved into different polypeptides, each representing a distinct functional unit. In some embodiments, where the SAR consists of two or more functional polypeptide units, the different functional units are coexpressed using one or more polynucleotide chains. In one embodiment, costimulation is provided by an accessory module that is co-expressed with the SAR or a TCR but is not an integral part of the SAR (e.g., a CAR, SIR, zSIR, or TCR etc.) polypeptide. In another embodiment, the different polynucleotide chains are linked by nucleic acid sequences that encode for cleavable linkers (e.g., T2A, F2A, P2A, E2A etc.) (Table 20). In another embodiment, a Ser-Gly-Ser-Gly (SGSG) motif (SEQ ID NO: 1239 and 1240) is also added upstream of the cleavable linker sequences to enhance the efficiency of cleavage. The nucleic acid and amino acid sequences of exemplary cleavable linkers and Furine cleavage sites are provided in Table 20. The polynucleotides encoding the different units of a SAR may be linked by IRES (Internal Ribosomal Entry Site) sequences. In an embodiment, the different functional units (e.g., two or more chains) of a SAR are expressed using a single vector. The different functional units of a SAR may be expressed using a single promoter or multiple promoters. In an embodiment, the different functional units of a SAR are expressed using two or more vectors. The nucleic acid and amino acid sequences of exemplary cleavable linkers and Furine cleavage sites are provided in Table 20.

[0115] A “conservative substitution” or “conservative sequence modifications” refers to amino acid modifications that do not significantly affect or alter the binding characteristics or function of the encoded protein. For example, “conservative sequence modifications” refers to amino acid modifications that do not significantly affect or alter the binding characteristics or function of a SAR of the disclosure (e.g., a conservative change in the constant chain, antibody, antibody fragment, or non-immunoglobulin binding domains). Such conservative modifications include amino acid substitutions, additions and deletions. Conservative amino acid substitutions are ones in which the amino acid residue is replaced with an amino acid residue having a similar side chain. Families of amino acid residues having similar side chains have been defined in the art. These families include amino acids with basic side chains (e.g., lysine, arginine, histidine), acidic side chains (e.g., aspartic acid, glutamic acid), uncharged polar side chains (e.g., glycine, asparagine, glutamine, serine, threonine, tyrosine, cysteine, tryptophan), nonpolar side chains (e.g., alanine, valine, leucine, isoleucine, proline, phenylalanine, methionine), beta-branched side chains (e.g., threonine, valine, isoleucine) and aromatic side chains (e.g., tyrosine, phenylalanine, tryptophan, histidine). Thus, one or more amino acid residues within a SAR of the disclosure can be replaced with other amino acid residues from the same side chain family and the altered SAR can be tested using the binding and/or functional assays described herein.

[0116] A “costimulatory intracellular signaling domain” or “Co-stimulatory domain” or “CSD” as used herein refers to the portion of a SAR which enhances the proliferation, survival and/or development of T cells. The SARs of the disclosure may comprise zero, one or more co-stimulatory domains. Each co-stimulatory domain comprises the costimulatory domain of any one or more of, for example, members of the TNFR superfamily, CD28, CD137 (4-1BB), CD134 (OX40), BAFF-R, HVEM, CD27, CD2, CD5, TNFR-I, TNFR-II, Fas, CD30, CD40 or combinations thereof. Additional exemplary co-stimulatory domains include the signaling domains of 2B4, NKp30, NKp44, NKp46, GITR, CD81, CD160, DAP10 and B7-H3. Other co-stimulatory domains (e.g., from other proteins) will be apparent to those of skill in the art and may be used in connection with alternate embodiments of the disclosure. The co-stimulatory domain can comprise the entire intracellular portion, or the entire native intracellular signaling domain, of the molecule from which it is derived, or a functional fragment or derivative thereof. The SARs of the disclosure may comprise zero, one or more co-stimulatory domains.

[0117] The term a “costimulatory molecule” or a “costimulatory receptor” refers to a cognate binding partner on an immune cell (e.g., T cell, NK cell, macrophage, granulocyte, dendritic cell etc.) that specifically binds with a costimulatory ligand, thereby mediating a costimulatory response by the immune cell such as, but not limited to, proliferation, activation or cytokine secretion. Costimulatory extracellular molecules are cell surface molecules other than antigen receptors or their ligands that contribute to an efficient immune response. Costimulatory molecules include, but are not limited to, an MHC class I molecule, BTLA and a Toll ligand receptor, as well as OX40, Dap10, CD27, CD28, CD2, CD5, CD8, ICAM-1, LFA-1 (CD11a/CD18), ICOS (CD278), Lck, TNFR-I, TNFR-II, Fas, CD30, CD40, CD81 and 4-1BB (CD137). A co-stimulatory receptor may be expressed on cells other than T cells, such as NK cells or macrophages.

[0118] The term “cTCR” refers to a wild-type TCR nucleic acid coding sequence and the corresponding wild-type TCR protein linked to an antigen binding domain that is not derived from a TCR. cTCR have been described in (Gross, Waks, & Eshhar, 1989). cTCRs are used in some embodiments and as reference controls. For example, a cTCR having a CD19 binding domain and a CD19-SIR (comprising a mutant TCR chain and CD19 binding domain) will have different expression and/or difference binding affinities to the target antigen.

[0119] The term “cytosolic” or “cytoplasmic” refers to an agent, e.g., a protein that is situated in the cytoplasm of a cell in its mature form. A cytosolic protein can translocate into the nucleus but is not a transmembrane protein and is not secreted outside the cell.

[0120] Cytokine Release Syndrome (CRS) is a complication of cell therapies (e.g., SAR-T, bispecific T cell engaging antibodies etc.) that manifests itself with a constellation of signs and symptoms such as fever, hypotension, shortness of breath, renal dysfunction, pulmonary dysfunction and/or capillary leak syndrome.

[0121] The term “degenerative disorders” refers to a disease that is the result of a continuous process based on degenerative cell changes, affecting tissues or organs, which will increasingly deteriorate over time, whether due to normal bodily wear or lifestyle choices such as exercise or eating habits. Exemplary degenerative diseases include Alzheimer's disease, Creutzfeldt-Jakob disease, Diabetes mellitus (type II), and Atherosclerosis.

[0122] “Derived from” as that term is used herein, indicates a relationship between a first and a second molecule. It generally refers to structural similarity between the first molecule and a second molecule and does not connotate or include a process or source limitation on a first molecule that is derived from a second molecule. For example, in the case of an antigen binding domain that is derived from an antibody molecule, the antigen binding domain retains sufficient antibody structure such that is has the required function, namely, the ability to bind to an antigen. It does not connotate or include a limitation to a particular process of producing the antibody, e.g., it does not mean that, to provide the antigen binding domain, one must start with an antibody sequence and delete unwanted sequence, or impose mutations, to arrive at the antigen binding domain.

[0123] “Dimerization molecule,” as that term is used herein refers to a molecule that promotes the association of a first switch domain with a second switch domain. In embodiments, the dimerization molecule does not naturally occur in the subject, or does not occur in concentrations that would result in significant dimerization. In embodiments, the dimerization molecule is a small molecule, e.g., rapamycin or a rapalogue, e.g., RAD001, Rimiducid or AP20187. Rimiducid can be at about 0.01-1 mg/kg and has an EC50 in cell culture of about 0.1 nM. AP20187 can be administered from about 2-10 mg/kg/day in single or multi-doses.

[0124] The phrase “disease associated with expression of a target antigen” or “disease associated antigen as described herein” includes, but is not limited to, a disease associated with expression of a target antigen as described herein or condition associated with cells which express a target antigen as described herein including, e.g., proliferative diseases such as a cancer or malignancy or a precancerous condition such as a myelodysplasia, a myelodysplastic syndrome or myeloproliferative disorder or a pre leukemia; or a noncancer related indication associated with cells which express a target antigen as described herein.

[0125] “Disease targeted by genetically modified cells” as used herein encompasses the targeting of any cell involved in any manner in any disease by the genetically modified cells of the disclosure, irrespective of whether the genetically modified cells target diseased cells or healthy cells to effectuate a therapeutically beneficial result.

[0126] The term “Dissociation constant (Kd)” is defined as the equilibrium constant of the dissociation of a receptor-ligand (e.g., binding domain—cognate) interaction. In some embodiments, a SAR of the disclosure binds to the target antigen with an equilibrium dissociation constant (Kd) from about 0.1 pM to about 500 nM.

[0127] As used herein a “diverse set of non-naturally occurring immune receptors” or “diverse set of SARs” refers to a plurality of non-naturally occurring immune receptors or SARS targeting an antigen. In embodiment, diverse set of SARs have the same binding domain linked to a diverse set of signaling chains or “backbones”. In an embodiment, the diverse set of SARs may possess diverse range of binding affinities to a target antigen. In an embodiment, the diverse set of SARs may exhibit varied expression levels.

[0128] As used herein, an “epitope” is defined to be the portion of an antigen capable of eliciting an immune response, or the portion of an antigen that binds to an antibody or antibody fragment. Epitopes can be a protein sequence or subsequence.

[0129] As used herein, the term “engager” refers to a molecule, e.g., a fusion polypeptide, which is capable of forming a link between an immune cell (e.g., a T cell, a NK cell, a NKT cell, a B cell, a macrophage, a neutrophil) and a tumor cell that results in activation of the immune cell. Examples of engagers include, but are not limited to, bi-specific T cell engagers (BiTEs), bi specific killer cell engagers (BiKEs), tri-specific killer cell engagers (TRiKE), or multi-specific killer cell engagers, or universal engagers compatible with multiple immune cell types.

[0130] The term “expression vector” refers to a vector comprising a recombinant polynucleotide comprising expression control sequences operatively linked to a nucleotide sequence to be expressed. An expression vector comprises sufficient cis-acting elements for expression; other elements for expression can be supplied by the host cell or in an in vitro expression system. Expression vectors include all those known in the art, including cosmids, plasmids (e.g., naked or contained in liposomes) and viruses (e.g., lentiviruses, retroviruses, adenoviruses, and adeno-associated viruses) that incorporate the recombinant polynucleotide.

[0131] A “functional portion” (“biologically active portion”) of a protein (e.g., SAR, IL-2, IL-15 etc.) refers to a portion of a protein that retains one or more functions of full length or mature protein. Such functions for IL-12 or IL-15 include the promotion of NK cell survival, regulation of NK cell and T cell activation and proliferation as well as the support of NK cell development from hematopoietic stem cells.

[0132] As used herein, “F(ab)” refers to a fragment of an antibody structure that binds to an antigen but is monovalent and does not have a Fc portion, for example, an antibody digested by the enzyme papain yields two F(ab) fragments and an Fc fragment (e.g., a heavy (H) chain constant region; Fc region that does not bind to an antigen).

[0133] As used herein, “F(ab′)2” refers to an antibody fragment generated by pepsin digestion of whole IgG antibodies, wherein this fragment has two antigen binding (ab′) (bivalent) regions, wherein each (ab′) region comprises two separate amino acid chains, a part of a H chain and a light (L) chain linked by an S—S bond for binding an antigen and where the remaining H chain portions are linked together. A “F(ab′)2” fragment can be split into two individual Fab′ fragments.

[0134] The term “FcRγ” or “FCER1G” or “FCRG” or “FcRy” as used herein refers to gene represented by Gene ID: 2207. It is a disulfide linker transmembrane signaling adaptor that is part of high affinity IgE receptor and other Fc receptors.

[0135] The term “functional portion” when used in reference to a SAR refers to any part or fragment of the SAR, which part or fragment retains the biological activity of the SAR of which it is a part (the parent SAR). Functional portions encompass, for example, those parts of a SAR that retain the ability to recognize target cells, or detect, treat, or prevent a disease, to a similar extent, the same extent, or to a higher extent, as the parent SAR. In reference to the parent SAR, the functional portion can comprise, for instance, about 10%, 25%, 30%, 50%, 68%, 80%, 90%, 95%, or more, of the parent SAR.

[0136] The term “flexible polypeptide linker” as used herein refers to a peptide linker that consists of amino acids such as glycine and/or serine residues used alone or in combination, to link polypeptide chains together (e.g., variable heavy and variable light chain regions together). In one embodiment, the flexible polypeptide linker is a Gly/Ser linker and comprises the amino acid sequence (Gly-Gly-Gly-Gly-Ser)ₙ, (e.g., SEQ ID NO:2431) where n is a positive integer equal to or greater than 1. For example, n=l, n=2, n=3. n=4, n=5 and n=6, n=7, n=8, n=9 and n=10. In one embodiment, the flexible polypeptide linkers include, but are not limited to, (Gly₄Ser)₄ or (Gly₄Ser)₃.

[0137] “Genetically modified cells”, “redirected cells”, “genetically engineered cells” or “modified cells” as used herein refer to cells that express a SAR of the disclosure. In some embodiments, the genetically modified cells comprise vectors that encode a SAR. In some embodiments, the genetically modified cells comprise vectors that encode a SAR and one or more accessory molecules (e.g., PDL1, PDL2, crmA, MC159 etc.) in the same vector. In some embodiments, the genetically modified cells comprise a first vector that encodes a SAR and a second vector that encodes the accessory molecule. In some embodiments, the genetically modified cells comprise a first vector that encodes a SAR and a second vector that encodes more than one accessory molecule. In some embodiments, the genetically modified cells comprise a first vector that encodes a SAR and a second vector that encodes the first accessory molecule and a third vector that encodes a second accessory molecule.

[0138] An “HLA-independent TCR” or an “MHC-independent TCR” as defined herein is a TCR that can recognize an antigen independent of MHC restriction. In an exemplary embodiment, an HLA-independent TCR may bind to an antigen on the cell surface that is not presented by the MHC complex. In an embodiment, an HLA-independent TCR may bind to an antigen that is expressed on the cell surface independent of presentation by the MHC complex. An HLA-independent TCR may be a naturally occurring TCR. In an exemplary embodiment, an HLA-independent TCR is MC.7.G5 (MC7G5) that recognizes MR1, a ubiquitously expressed, monomorphic antigen presenting molecule. An HLA-independent TCR may be an engineered or recombinant TCR. In an exemplary embodiment, an HLA-independent TCR is an engineered TCR that may bind to proteins that are expressed on cell surface such as CD19, CD20, Mesothelin, PSMS or BCMA. Methods to engineer the variable domains of a TCR (e.g., CDR grafting etc.) are known in the art and can be used to generate HLA-independent TCR that can bind to proteins (e.g., CD19, MSLN, PSMA etc.) or protein epitopes expressed extracellularly independent of the MHC complex. This disclosure provides bispecific, biparatopic and multispecific SARs with the backbone of a TCR, including HLA-independent TCR, comprising one or more AABDs. The AABD domains of the SARs of the disclosure with the backbone of a TCR (e.g., HLA independent TCR) can be fully human, humanized or non-human. In an embodiment, the disclosure provides TCR (e.g., HLA independent TCR) comprising one or more fully human vH domains. In an embodiment, the disclosure provides TCR (e.g., HLA independent TCR) comprising one or more fully human vL domains.

[0139] An “HLA-independent TCR variable domain” as defined herein is the variable domain of a TCR that can bind to an antigen in an HLA-independent manner. An HLA independent variable domain may be the variable domain of an HLA independent TCRα, TCRβ, TCRγ, TCRδ or pre-TCRα. An HLA independent TCR variable domain may be a single variable domain TCR (i.e., svd-TCR). An HLA independent TCR variable domain may be a naturally occurring HLA-independent variable domain or an engineered HLA-independent variable domain. In an exemplary embodiment, an engineered HLA-independent variable domain can be generated against the extracellular domain of a protein (e.g., CD19, CD22, BCMA, MSLN, PSMA) using techniques known in the art (e.g., CDR grafting, screening phage display libraries etc.).

[0140] As used herein, “HLA-restricted” or “MHC-restricted” refers to antigen recognition requiring both MHC molecule and its peptide. Unlike antigen recognition that is “not HLA-restricted” or “HLA-independent” or “not MHC-restricted.”

[0141] As used herein, the term “heterologous gene” refers to a gene that is not in its natural environment. For example, a heterologous gene includes a gene from one species introduced into another species. A heterologous gene also includes a gene native to an organism that has been altered in some way (e.g., mutated, added in multiple copies, linked to non-native regulatory sequences, etc.). As another example, a heterologous gene includes a gene expressed in a previous or future cell lineage or differentiation state of a cell. Heterologous genes are distinguished from endogenous genes in that the heterologous gene sequences are typically joined to DNA sequences that are not found naturally associated with the gene sequences in the chromosome or are associated with portions of the chromosome not found in nature (e.g., genes expressed in loci where the gene is not normally expressed).

[0142] “Hinge region” (HR) as used herein refers to the hydrophilic region which is between the antigen binding domain and the transmembrane domain of a SAR. The hinge regions include but are not limited to Fc fragments of antibodies or fragments or derivatives thereof, hinge regions of antibodies or fragments or derivatives thereof, CH2 regions of antibodies, CH3 regions of antibodies, artificial spacer sequences or combinations thereof. Examples of hinge regions include but are not limited to CD8a hinge, and artificial spacers made of polypeptides which may be as small as, for example, Gly3 or CH1 and CH3 domains of IgGs (such as human IgG4). In some embodiments, the hinge region is any one or more of (i) a hinge, CH2 and CH3 regions of IgG4, (ii) a hinge region of IgG4, (iii) a hinge and CH2 of IgG4, (iv) a hinge region of CD8a, (v) a hinge, CH2 and CH3 regions of IgG1, (vi) a hinge region of IgG1 or (vi) a hinge and CH2 region of IgG1. Several exemplary hinge regions are provided in Table 29 of the disclosure. Other hinge regions will be apparent to those of skill in the art and may be used in connection with alternate embodiments of the disclosure.

[0143] The term “immune disorder” refers to a disease characterized by dysfunction of immune system. An autoimmune disease is a condition arising from an abnormal immune response to a normal body part. There are at least 80 types of autoimmune diseases.

[0144] “Immune effector cell,” as that term is used herein, refers to a cell that is involved in an immune response, e.g., in the promotion of an immune effector response. Examples of immune effector cells include T cells, e.g., alpha/beta T cells and gamma/delta T cells, B cells, natural killer (NK) cells, natural killer T (NKT) cells, mast cells, monocytes/macrophages and myeloid-derived phagocytes.

[0145] “Immune effector function” or “immune effector response,” “effector function” refers to the specialized function of a differentiated cell. Effector function of a T-cell or NK-cells, for example, may be cytolytic activity or helper activity including the secretion of cytokines. For example, an immune effector function or response refers a property of a T or NK cell that promotes killing or the inhibition of growth or proliferation, of a target cell. In the case of a T cell, primary stimulation and co-stimulation are examples of immune effector function or response. In case of antigen presenting cells (e.g., dendritic cells) antigen presentation and cytokine secretion are examples of effector functions.

[0146] “Immune response” as used herein refers to immunities including but not limited to innate immunity, humoral immunity, cellular immunity, immunity, inflammatory response, acquired (adaptive) immunity, autoimmunity and/or overactive immunity.

[0147] As used herein “Interleukin-2” (“IL-2”) and “Interleukin-15” (“IL-15”) refer to cytokines that regulates T and NK cell activation and proliferation. These cytokines share many biological activities. They are found to bind common receptor subunits, and may compete for the same receptor, and thus negatively regulate each other's activity. The sequence of a variety of IL-2 and IL-15 molecules are known in the art. In one aspect, the IL-2 is a wild type IL-2 or its variants with 70-99.9% amino acid sequence homology (e.g., SEQ ID NO: 7833-7837). In one aspect, the IL-15 is a wild type IL-15 or its variants with 70-99.9% amino acid sequence homology (e.g., SEQ ID NO: 7838-7841). In some aspects, IL-2 is a mammalian IL-2. In some aspects, the IL-15 is a mammalian IL-15 (e.g., Homo sapiens interleukin 15 (IL15), transcript variant 3, mRNA, NCBI Reference Sequence: NM_000585.4; Canis lupus familiaris interleukin 15 (IL15), mRNA, NCBI Reference Sequence: NM_001197188.1; Felis catus interleukin 15 (IL15), mRNA, NCBI Reference Sequence: NM_001009207.1). In particular aspects, all or a functional portion of the IL-2 or IL-15 are linked to all or a portion of a transmembrane protein. In one aspect, the NK cell or T cell expresses a fusion protein comprising all or a portion of IL-2 or IL-15 fused to all or a portion of a transmembrane protein. In a particular aspect, the portion of the transmembrane protein comprises all or a portion of a transmembrane domain of the transmembrane protein.

[0148] An “intracellular signaling domain,” (ISD) or “activation domain” as the term is used herein, refers to an intracellular signaling portion of a molecule. The intracellular signaling domain generates a signal that promotes an immune effector function of the cell. Examples of immune effector function include cytolytic activity and helper activity, including the secretion of cytokines. Examples of domains that transduce the effector function signal include but are not limited to the z chain of the T-cell receptor complex or any of its homologs, human CD3 zeta chain, CD3 polypeptides (γ, δ and ε), syk family tyrosine kinases (Syk, ZAP 70, etc.), src family tyrosine kinases (Lck, Fyn, Lyn, etc.) and other molecules involved in T-cell transduction, such as CD2, CD5 and CD28. Other intracellular signaling domains will be apparent to those of skill in the art and may be used in connection with alternate embodiments of the disclosure.

[0149] In another embodiment, the intracellular signaling domain can comprise a “primary intracellular signaling domain” or an “activation domain”. Exemplary primary intracellular signaling domains include those derived from the molecules responsible for primary stimulation, or antigen dependent simulation. In another embodiment, the intracellular signaling domain can comprise a costimulatory intracellular domain. Exemplary costimulatory intracellular signaling domains include those derived from molecules responsible for costimulatory signals, or antigen independent stimulation. For example, a primary intracellular signaling domain can comprise a cytoplasmic sequence of CD3z, and a costimulatory intracellular signaling domain can comprise cytoplasmic sequence from co-receptor or costimulatory molecule, such as CD28 or 41BB.

[0150] A primary intracellular signaling domain can comprise a signaling motif which is known as an immunoreceptor tyrosine-based activation motif or ITAM. Examples of ITAM containing primary cytoplasmic signaling sequences include, but are not limited to, those derived from CD3-zeta, common FcR gamma (FCER1G or FcRγ or FCRG), Fc gamma RIIIa, FcR beta (Fc Epsilon Rib), CD3 gamma, CD3 delta, CD3 epsilon, CD79a, CD79b, DAP10, and DAP12.

[0151] The term “isolated” as used herein refers to molecules or biologicals or cellular materials being substantially free from other materials. In one aspect, the term “isolated” refers to nucleic acid, such as DNA or RNA, or protein or polypeptide (e.g., an antibody or derivative thereof), or cell or cellular organelle, or tissue or organ, separated from other DNAs or RNAs, or proteins or polypeptides, or cells or cellular organelles, or tissues or organs, respectively, that are present in the natural source. The term “isolated” also refers to a nucleic acid or peptide that is substantially free of cellular material, viral material, or culture medium when produced by recombinant DNA techniques, or chemical precursors or other chemicals when chemically synthesized. Moreover, an “isolated nucleic acid” is meant to include nucleic acid fragments which are not naturally occurring as fragments and would not be found in the natural state. The term “isolated” is also used herein to refer to polypeptides which are isolated from other cellular proteins and is meant to encompass both purified and recombinant polypeptides. The term “isolated” is also used herein to refer to cells or tissues that are isolated from other cells or tissues and is meant to encompass both, cultured and engineered cells or tissues.

[0152] A “long linker” or “long linker domain” is a linker that is between 25 to 500 amino acids in length. In an embodiment, a long linker is about 25, 30, 35, 40, 45, 50, 55, 60, 65, 70, 75, 80, 85, 90, 95,100,105, 110, 115, 120, 125, 130, 135, 140, 145, 150, 160, 170, 180, 190, 200, 210, 220, 230, 250, 275, 300, 325, 350, 375, 400, 450, 500 amino acids and any number in between in length. In an embodiment, a long linker is between 25 and 125 amino acids in length. In an embodiment, a long linker is between 50 and 150 amino acids in length. In an embodiment, a long linker is between 75 and 175 amino acids in length. In an embodiment, a long linker is between 100 and 200 amino acids in length. In an embodiment, a long linker is between 120 and 220 amino acids in length. In an embodiment, a long linker is between 100 and 300 amino acids in length.

[0153] In an embodiment, the linker encodes for or comprises of an immunoglobulin (Ig) domain or an Ig like domain or a fragment thereof. The terms “Ig domain”, “Ig linker domain”, “Ig like domains” or “Ig like linker domains” are used interchangeably in this disclosure. The immunoglobulin domain is a type of protein domain that consists of a 2-layer sandwich of 7-9 antiparallel P-strands arranged in two P-sheets with a Greek key topology, consisting of about 125 amino acids. The Ig domains can be classified as IgV, IgC1, IgC2, or IgI. IgV domains with 9 beta strands are generally longer than IgC domains with 7 beta strands. In an embodiment, the linker comprises an IgV domain or a fragment thereof. In an embodiment, the linker comprises an IgC domain or a fragment thereof. Ig domains are found in immunoglobulins, T cell receptor chains, class I MHC, class II MHC, 02 microglobulin, coreceptors (e.g., CD4, CD8, CD19 etc.), antigen receptor accessory molecules (e.g., CD3y, CD36, CD3R, CD79a, CD79b), costimulatory or inhibitory molecules (e.g., CD28, CD80, CD86), NK cell receptors (e.g., KIR), Leukocyte immunologlobulin like receptor (LILR), IgSF CAMs (e.g., NCAM, ICAM, CD2 etc.), cytokine receptors (e.g., IL-1R, CSF-1R etc.), growth factor receptors (e.g., PDGFR), Receptor tyrosine kinases and phosphatases, Ig binding receptors, cytoskeleton proteins (e.g., titin, palladin etc.) and other proteins (e.g., CD147, CD90 etc.). Exemplary Ig linker domains are IgCL (SEQ ID NO:3536) and IgG1-CH1 (SEQ ID NO: 3537). Additional exemplary Ig linkers are presented in Table 13 (SEQ ID NO (PRT): 3538-3569). In an embodiment, the linker possesses an E set domain. An E set domain is an “Early” Ig-like fold families possibly related to the immunoglobulin and/or fibronectin type III superfamilies. In an embodiment, the linker possesses a Fibronectin type III domain.

[0154] In some embodiments, the SAR of the disclosure comprises an Fv-like or Fc-TCR antigen-binding module comprising a) a first polypeptide chain comprising a first antigen-binding domain comprising a vL, Vα or Vγ domain and b) a second polypeptide chain comprising a second antigen-binding domain comprising a vH, Vβ or Vδ domain. In some embodiments, there is a first peptide linker fused to the C-terminus of the vL, Vα or Vγ domain and/or a second peptide linker fused to the C-terminus of the vL, Vα or Vγ domain. In some embodiments, the first and second peptide linkers are capable of binding to one another. In some embodiments, the first and/or second peptide linkers are derived from immunoglobulin heavy and/or light chain constant regions. In some embodiments, the first and/or second peptide linkers comprise a CH3 antibody domain or a variant thereof. In some embodiments, immunoglobulin heavy chain constant domains (e.g., CHI or CH3) contained in the peptide linkers are derived from an IgG (e.g., IgG1, IgG2, IgG3, or IgG4), IgA (e.g., IgA1 or IgA2), IgD, IgM, or IgE heavy chain, optionally human. In some embodiments, the first and/or second peptide linkers are derived from TCR subunit constant regions. For example, in some embodiments, the first and/or second peptide linkers are derived from a) TCR α and β subunit constant domains; or b) TCR γ and δ subunit constant domains. In some embodiments, the first and/or second peptide linkers are synthetic. In some embodiments, all of the vL, Vα or Vγ and vH, Vβ or Vδ CDRs are derived from the same antibody or TCR moiety. In some embodiments, the vL antibody domain and the vH antibody domain comprise antibody CDRs derived from more than one antibody moiety. In some embodiments, the vL antibody domain comprises antibody CDRs derived from a vH antibody domain and/or the vL antibody domain comprises antibody CDRs derived from a vH antibody domain. In some embodiments, the vL antibody domain comprises framework regions derived from one antibody and one or more CDRs derived from another antibody and/or the vH antibody domain comprises framework regions derived from one antibody and one or more CDRs derived from another antibody. In some embodiments, the Vα domain and the Vβ domain comprise TCR CDRs derived from more than one TCR. In some embodiments, the Vα domain comprises CDRs derived from a Vβ TCR domain and/or the Vβ domain comprises CDRs derived from Vα domain. In some embodiments, the Vα domain comprises framework regions derived from one TCR and one or more CDRs derived from another TCR and/or the Vβ domain comprises framework regions derived from one TCR and one or more CDRs derived from another TCR. In some embodiments, the Vγ domain and the Vδ domain comprise TCR CDRs derived from more than one TCR. In some embodiments, the Vγ domain comprises CDRs derived from a Vδ TCR domain and/or the Vδ domain comprises CDRs derived from Vγ domain. In some embodiments, the Vγ domain comprises framework regions derived from one TCR and one or more CDRs derived from another TCR and/or the Vδ domain comprises framework regions derived from one TCR and one or more CDRs derived from another TCR. In some embodiments, the first and second polypeptide chains are linked, such as by a covalent linkage (e.g., peptide or other chemical linkage) or non-covalent linkage. In some embodiments, the first and second antigen-binding domains are linked by a disulfide bond. In some embodiments, the first and second peptide linkers are linked by a disulfide bond. In some embodiments, the first and/or second peptide linker is a variant comprising one or more modifications (e.g., amino acid substitutions, insertions, and/or deletions) compared to the sequence from which it is derived. In some embodiments, the first and/or second peptide linkers comprise one or more modifications that do not substantially alter their binding affinity for one another. In some embodiments, the first and/or second peptide linkers comprise one or more modifications that increase their binding affinity for one another and/or introduce a non-naturally occurring disulfide bond. In some embodiments, the first and second peptide linkers comprise a knob-into-hole modification (see, for example, Carter P. Immunol Methods. 248:7-15, 2001). In some embodiments, the first and second peptide linkers are modified by electrostatic steering to enhance their association with one another (see, for example, WO2006106905 and Gunasekaran K, et al. J Biol Chem. 285: 19637-46, 2010). In some embodiments, the Fv-like or TCR-Fv-like antigen-binding module is human, humanized, chimeric, semi-synthetic, or fully synthetic.

[0155] An exemplary SAR construct comprising IgCL and IgG1-CH1 linkers is represented by CD8SP-hu-mROO5-1-vL-xho-IgCL-Bam-DAP10-opt1-Spe-CD3zCP-opt1-F-P2A-dSPE-IgSP-hu-mROO5-1-vH-Mlu-IgG1-CH1-Kpn-DAP10-opt2-Xba-CD3zCP-opt2-F-F2A-dXBA-Nde-K13-opt (SEQ ID NO: 5869). The IgG1-CH1 inker (SEQ ID NO (DNA): 1143, SEQ ID NO (PRT): 3537) in this construct can be replaced by other Ig like linkers shown in Table 13 such as IgG2-IC-CHI1, IgG3-CHI1, IgG4-CHI1, IgAI-CHI1, IgA2-CHI1, IgD-CHI1, IgE-CHI1 or IgM-CHI1. The IgCL and IgG1-CH1 linkers can be also replaced by the Ig like linkers derived from TCRα and TCRβ, respectively (Table 13). Alternatively, the IgCL and IgG1-CH1 linkers can be also replaced by the Ig like linkers derived from TCRγ and TCRδ chains (Table 13).

[0156] As used herein, the term “ligand” refers to a molecule that binds to a receptor. In particular, the ligand binds a receptor on another cell, allowing for cell-to-cell recognition and/or interaction.

[0157] As used herein, the term “linker” (also “linker domain” or “linker region”) refers to an oligo or a polypeptide (or an oligo encoding the polypeptide) that joins together two or more domains or regions of a SAR polynucleotide or polypeptide, respectively, disclosed herein. The linker can be anywhere from 1 to 500 amino acids in length or 3 to 1500 nucleotide in length. In some embodiments the “linker” is cleavable or non-cleavable. Unless specified otherwise, the term “linker” used herein means a non-cleavable linker. Said non-cleavable linkers may be composed of flexible residues which allow freedom of motion of adjacent protein domains relative to one another. Non-limiting examples of such residues include glycine and serine. In some embodiments, linkers include non-flexible residues. Examples of cleavable linkers include 2A linkers (for example T2A), 2A-like linkers or functional equivalents thereof and combinations thereof. In some embodiments, the linkers include the picornaviral 2A-like linker, CHYSEL sequences of porcine teschovirus (P2A), Thosea asigna virus (T2A) or combinations, variants and functional equivalents thereof. In some embodiments, the linker sequences may comprise a motif that results in cleavage between the 2A glycine and the 2B proline (see, e.g., T2A sequence). The nucleic sequences of several exemplary cleavable linkers are provided in SEQ ID NO: 1233 to SEQ ID NO: 1238 and amino acid sequences of several exemplary linkers are provided in SEQ ID NO: 3627 to SEQ ID NO: 3632. Other cleavable linkers that may be used herein are readily appreciated by those of skill in the art. Linker modules also refer to TCR and Antibody linkers presented in Table 13.

[0158] In an embodiment, a Ser-Gly-Ser-Gly (SGSG) motif (SEQ ID NOs: 3633) is also added upstream of the cleavable linker sequences to enhance the efficiency of cleavage. A potential drawback of the cleavable linkers is the possibility that the small 2A tag left at the end of the N-terminal protein may affect protein function or contribute to the antigenicity of the proteins. To overcome this limitation, in some embodiments, a furine cleavage site (RAKR) (SEQ ID NO: 3635) is added upstream of the SGSG motifs to facilitate cleavage of the residual 2A peptide following translation.

[0159] The term “lentivirus” refers to a genus of the Retroviridae family. Lentiviruses are unique among the retroviruses in being able to infect non-dividing cells; they can deliver a significant amount of genetic information into the DNA of the host cell, so they are one of the most efficient methods of a gene delivery vector. HIV, SIV, and FIV are all examples of lenti viruses.

[0160] The term “lentiviral vector” refers to a vector derived from at least a portion of a lentivirus genome, including especially a self-inactivating lentiviral vector as provided in Milone et al., Mol. Ther. 17(8): 1453-1464 (2009). Other examples of lentivirus vectors that may be used in the clinic include but are not limited to, e.g., the LENTIVECTOR® gene delivery technology from Oxford BioMedica, the LENTIMAX™ vector system from Lentigen and the like. Nonclinical types of lentiviral vectors are also available and would be known to one skilled in the art. Other examples of lentivirus vectors are pLENTI-EF1α (SEQ ID NO: 1), pLENTI-EF1α-DWPRE (SEQ ID NO: 2), pCCLc-MNDU3-WPRE (SEQ ID NO: 4) and pCCLc-MNDU3-Eco-Nhe-Sal-WPRE (SEQ ID NO: 5). In an exemplary embodiment, the nucleic acid fragment encoding a SAR, or SAR plus accessory module(s), or the accessory module(s) can be cloned between the Nhe I and Sal I sites present in the pLENTI-EF1α and the pCCLc-MNDU3-Eco-Nhe-Sal-WPRE vectors using methods known in the art.

[0161] “Killer cell immunoglobulin-like receptors” or “KIRs” as used herein refer to a family of transmembrane glycoproteins expressed by natural killer cells and subsets of T cells.

[0162] “Mammal” as used herein refers to any member of the class Mammalia.

[0163] A “marker gene” encodes for a protein not normally expressed by the target cell which allows for identification of successful transduction. A marker gene can be also used for selective depletion or enrichment of transduced cells (e.g., SAR-expressing cells). Exemplary marker genes include tEGFR, CD20, tCD19, tBCMA and RQR8.

[0164] A “multipurpose switch” or “multipurpose gene” encodes for a protein that provide suicide, survival and marker functions. In an embodiment, all the above functions are provided by a single polypeptide chain. Exemplary multipurpose switches include IL2-tBCMA, IL15-tBCMA, IL2-RQR8, and IL2-tHer2 etc.

[0165] “Mimotope” as used herein is a macromolecule, often a peptide, which mimics the structure of an epitope. Because of this property it causes an antibody response similar to the one elicited by the epitope. An antibody for a given epitope antigen will recognize a mimotope which mimics that epitope. Mimotopes are a kind of peptide aptamers.

[0166] The term “multi-chain synthetic antigen receptor” “multi-chain SAR” means a synthetic antigen receptor comprising two or more polypeptide chains. A multi-chain SAR can be a double chain SAR. A double chain SAR comprises two membrane associated domain (e.g., transmembrane or membrane anchoring domains). An exemplary multi-chain SAR targeting CD19 is CD8SP-CD19-hu-mROO5-1-vL-Xho-CD16-F158V-FL-TMCP-v1-F-P2A-Spe-SP-Bst-CD19-hu-mROO5-1-vH-Mlu-CD16-F158V-S197P-FL-TMCP-v3-F-F2A-Xba-PAC (SEQ ID NO (DNA): 5451 and SEQ ID NO (PRT): 6283). In this SAR construct, the hu-mROO5-1 vL fragment is operationally linked to CD16-F158V-FL-TMCP-v1 module and the hu-mROO5-1-vH fragment is operationally linked to the CD16-F158V-S197P-FL-TMCP-v3. The two chains of this SAR are separated by Furine (F) and P2A cleavable linker sequences. This SAR construct also expresses a puromycin resistance gene (PAC) that is separated from the SAR polypeptide by a Furine (F) and F2A cleavable linker sequences. As SAR are modular in design, the CD16A-F158V-S197P-FL-v3 module and CD16-F158V-FL-TMCP-v1 modules can be replaced by other signaling modules to generate SAR with different signaling chains. Further the hu-mROO5-1 vL and hu-mROO5-vH fragments can be replaced by antigen binding domains (e.g., vL, vH, vHH, FHVH, centyrin, svd-TCR etc.) targeting other antigens to generate SAR targeting different antigens. Exemplary such multi-chain SARs are provided in Table 41 of provisional application. (e.g., SEQ ID NO: 5451-5462, 5483-5494, 5515-5526, 5547-5558, 5579-5590, 5611-5622, 5643-5654 etc.). The expression and activity of these novel SARs can be tested using methods described in the disclosure to select the SARs with optimal functional activities.

[0167] As used herein, “MHC” or “major histocompatibility complex” refers to cell surface molecules encoded by a large number of genes in mammals. MHC molecules include Class I and Class II. Class I molecules are alternatively referred to in humans as “HLA” or “human leukocyte antigen.” In part due to the complexity of HLA molecule expression HLA may also be referred to as an HLA system. Humans express HLA-A, HLA-B and HLA-C molecules that are typically involved with presenting processed antigen to CD8 cells, i.e., HLA restricted. Class II molecules, such as DR, DQ, DP, etc., are typically involved with presenting externally derived peptides to CD4+ cells, i.e., MHC Class II restricted. MHC restricted in general encompasses both Class I and Class II as in transplantation (bone marrow) matching.

[0168] “Native” or “Naturally occurring” or “endogenous” as used herein refers to a gene, protein, nucleic acid (e.g., DNA, RNA etc.) or fragment thereof that is native to a cell or is naturally expressed in a cell. Thus, a native or endogenous TCRα chain polypeptide of a T cell consists of a variable domain (Vu) joined to a TCRα constant chain. The native or endogenous TCRα chain precursor polypeptide also consists of an amino-terminal signal peptide that is cleaved from the mature polypeptide.

[0169] “Native receptor” or “Naturally occurring receptor” or “endogenous receptor” or “native receptor” as used herein refers to any receptor that occurs in nature and comprises an antigen binding or a ligand binding domain. The term includes functional variants, isoforms and homologs from other mammalian species. A native receptor can be “native signaling receptor” or a “naturally occurring signaling receptor” if it is capable of transmitting a cell signal upon binding to its target. A naturally occurring receptor or native receptor is native to a cell or is naturally expressed in a cell. Examples of naturally occurring signaling receptors or native receptors include, but are not limited to, CD16A, CD16B, NKp30, NKp44, NKp46, KIR2DS4, NKG2D etc. For the purpose of this disclosure, the CD3 signaling chains (CD3ε, CD3γ, CD3δ and CD3ƒ) are not included within the definition of a “naturally occurring receptor” and are instead classified as a signaling adaptor.

[0170] As used herein, the term “non-TCR naturally occurring receptor” or ““non-TCR naturally occurring signaling receptor” or “non-TCR receptor” or ‘non-TCR signaling receptor” refers to a receptor that is not a T cell receptor (TCR). A non-TCR receptor can be expressed in cells other than a T cell. A non-TCR receptor can be expressed in cells that lack the expression of CD3ƒ, CD38, CD3δ and/or CD3y chains. A “non-TCR naturally occurring receptor” lacks the transmembrane domain and/or cytosolic domain of TCRα, TCRβ, TCRγ, TCRδ or pre-TCRα. A “non-TCR naturally occurring receptor” does not recruit the entire TCR signaling module. In an embodiment, a “non-TCR naturally occurring receptor” does not comprise the TCRα, TCRβ, TCRγ, TCRδ or pre-TCRα polypeptides. In an embodiment, a “non-TCR naturally occurring receptor” does not comprise the entire coding region of TCRα, TCRβ, TCRγ, TCRδ or pre-TCRα. In an embodiment, a “non-TCR naturally occurring receptor” does not comprise the entire constant chains of TCRα, TCRβ, TCRγ, TCRδ or pre-TCRα. In an embodiment, a “non-TCR naturally occurring receptor” does not comprise the entire hinge domains (or connecting peptides) of TCRα, TCRβ, TCRγ, TCRδ or pre-TCRα. In an embodiment, a “non-TCR naturally occurring receptor” does not comprise the entire transmembrane domains and cytosolic domains of TCRα, TCRβ, TCRγ, TCRδ or pre-TCRα. A non-TCR receptor can be expressed in cells other than a T cell. A ‘non-TCR signaling receptor” may comprise a fragment of a TCR such as TCR variable domains (e.g., Vα, Vβ, Vγ, Vδ) or Ig domains (e.g., SEQ ID: 1158-1175). A non-TCR signaling receptor does not comprise the entire TCR constant chains (i.e., constant chains of TCRα, TCRβ, TCRγ, TCRδ or pre-TCRα).

[0171] As used herein, the term “non-T cell receptor module” or ““non-TCR module” or “non-TCR signaling module” or “NTCRM” refers to a module that lacks sequences comprised of the T cell receptor transmembrane domains and may further lack all or a portion of T cell receptor connecting peptides and/or intracellular domains. An NTCRM lacks sequences comprised of the transmembrane domains of TCRα, TCRβ, TCRγ, TCRδ or pre-TCRα. An NTCRM may further lack all or a portion of the connecting peptides and/or intracellular domains of TCRα, TCRβ, TCRγ, TCRδ or pre-TCRα.

[0172] As used herein, the term “non-CD3 adaptor module” or “non-CD3 adaptor” or “non-TCR/CD3 adaptor” or ““non-TCR/CD3 signaling adaptor” or ““NCAM” refers to a signaling adaptor that is not a component of the T cell receptor/CD3 receptor complex. In an embodiment, a “non-TCR/CD3 adaptor” does not comprise the transmembrane and/or cytosolic regions of CD3ε, CD3ƒ, CD3y or CD3δ chains or variants thereof.

[0173] The term “near the N-terminus” as used herein means within the N-terminal 30 amino acids. For example, the term “an AABD operably linked to the N-terminus or near the N-terminus of a vL and/or vH domain”, mean an AABD that is operably linked at the N-terminus of a vL or a vH fragment or operably linked to the N-terminal 2, 3, 4, 5, 6, 7, 8, 9, 10, 11, 12, 13, 14, 15, 16, 17, 18, 19, 25 or 30 amino acid comprising the vL or the vH domain. Similarly, the term “an AABD operably linked to the N-terminus or near the N-terminus of a Va and/or Vb domain”, mean an AABD that is operably linked at the N-terminus of a Va or a Vb fragment or operably linked to the N-terminal 2, 3, 4, 5, 6, 7, 8, 9, 10, 11, 12, 13, 14, 15, 16, 17, 18, 19, 20, 21, 22, 23, 24, 25 or 30 amino acid comprising the Va or the Vb domain. An AABD of the disclosure may be operably linked to or near the N-terminus of another domain either directly or via an intervening linker sequence.

[0174] As used herein, “Natural Killer Cell Receptor” or “NK receptor” refers to a cell surface receptor that is expressed in natural killer (NK) cells and includes functional variants, isoforms and homologs from other mammalian species. An NK receptor may be an activating receptor or an inhibitory receptor. Exemplary activating NK receptors include NKp30, NKp44, NKp46, NKG2D and KIR3DS4. Exemplary inhibitory NK receptors include CD94-NKG2A, TIGIT and CD96.

[0175] As used herein, “Natural Killer Cells” (“NK cells”) refer to a type of cytotoxic lymphocyte of the immune system.

[0176] As used herein “NKp30” or “NCR3” is a gene (Gene ID: 259197) that encodes for a protein that is a natural cytotoxicity receptor (NCR) that may aid NK cells in the lysis of tumor cells. The term includes functional variants, isoforms and homologs from other mammalian species.

[0177] As used herein “NKp44” or “NCR2” is a gene (Gene ID: 9436) that encodes for a protein that is a natural cytotoxicity receptor (NCR). The term includes functional variants, isoforms and homologs from other mammalian species.

[0178] As used herein “NKp46” or “NCRT” is a gene (Gene ID: 9437) that encodes for a protein that is a natural cytotoxicity receptor (NCR). Five transcript variants encoding different isoforms have been found for this gene. The term includes functional variants, isoforms and homologs from other mammalian species.

[0179] As used herein “NKG2D” or “KLRK1” is a gene (Gene ID: 22914) that encodes for a protein is a member of C-type lectins. The encoded transmembrane protein is characterized by a type II membrane orientation (has an extracellular C terminus) and the presence of a C-type lectin domain. The term includes functional variants, isoforms and homologs from other mammalian species.

[0180] As used herein a “non-naturally occurring agent” or “non-native” or “exogenous” refers to an agent that is not naturally expressed in a cell. Stated another way, the non-naturally occurring agent is “engineered” to be expressed in a cell. A non-naturally occurring agent may be a cloned version of a naturally occurring agent. Exemplary non-naturally occurring agents include SARs (e.g., CAR, SIRs, Ab-TCRs, TFPs, recombinant TCR). A non-naturally occurring agent may be expressed into a cell using techniques of gene transfer known in the art, such as lentiviral or retroviral mediated gene transfer. A non-naturally occurring agent may be expressed in an immune cell using an exogenous promoter (e.g., EF1α promoter) or an endogenous promoter (e.g., TCRα or TRAC promoter). When an endogenous gene (e.g., CD16, NKp30 etc.) is cloned and ectopically expressed in a cell, it represents another example of a non-naturally occurring agent.

[0181] As used herein a “non-naturally occurring immune receptor” or “exogenous immune receptor” “non-naturally occurring receptor” refers to an immune receptor that is not naturally expressed in an immune cell. Stated another way, the non-naturally occurring immune receptor is “engineered” to be expressed in an immune cell. A non-naturally occurring immune receptor may be a cloned version of a naturally occurring immune receptor. Alternatively, a non-naturally occurring immune receptor may be a chimeric receptor that is produced using recombinant molecular biology techniques. An exemplary non-naturally occurring immune receptors is a SAR (e.g., 2^{nd} generation CAR, SIR, cTCR, STAR, zSIR, Ab-TCRs, TFPs and recombinant TCR).

[0182] As used herein a “non-naturally occurring TCR antigen binding domain” or “exogenous TCR antigen binding domain” refers to a binding domain operably linked to a TCR constant region that is chimeric and non-naturally occurring with respect to a TCR present in nature. Stated another way, the non-naturally occurring TCR antigen binding domain is “engineered” using recombinant molecular biology techniques to be operably linked to a TCR and moreover, that the antigen binding domain is obtain or derived from a molecule that is distinct from a TCR found in nature. An antigen binding domain that is distinct from a TCR in nature includes antibody vH and vL fragments, humanized antibody fragments, chimeric antibody fragments, receptor ligands, and the like.

[0183] As used herein a “non-naturally occurring antigen binding domain” or “non-naturally occurring extracellular antigen binding domain” or “heterologous antigen binding domain” refers to an antigen binding domain that is not part of a naturally occurring receptor. Stated another way, the non-naturally occurring antigen binding domain is “engineered” using recombinant molecular biology techniques to be operably linked to a naturally occurring signaling receptor and moreover, that the antigen binding domain is obtained or derived from a molecule that is distinct from a signaling receptor found in nature. Exemplary heterologous antigen binding domains include antibodies, antibody fragments (e.g., vL, vH, scFv, Fab, F(ab)2 etc.), single domain antibodies (e.g., sVH, FHVH, vHH etc.), non-immunoglobulin antigen binding domains, single variable domain-TCR (svd-TCR), recombinant TCRs, HLA-independent TCR, scTCR, epitopes, adaptors, ligands and receptors.

[0184] The term “operably linked” or “functionally linked” or “operationally linked” refers to functional linkage or association between a first component and a second component such that each component can be functional. For example, operably linked includes the association between a regulatory sequence and a heterologous nucleic acid sequence resulting in expression of the latter. For example, a first nucleic acid sequence is operably linked with a second nucleic acid sequence when the first nucleic acid sequence is placed in a functional relationship with the second nucleic acid sequence. In the context of two polypeptides that are operably linked a first polypeptide functions in the manner it would independent of any linkage and the second polypeptide functions as it would absent a linkage between the two. The term “operationally linked” when used in the context of different domains of SARs of the disclosure refers to domains that are linked via a covalent bond (e.g., a peptide bond or a non-peptide chemical bond). In an exemplary embodiment, a SAR comprising a heterologous antigen binding domain (e.g., a CD19 scFv) that is operationally linked to the N-terminus of the extracellular domain of CD16A refers to a SAR polypeptide that is encoded by a nucleic acid sequence comprising a CD19 scFv that is fused in frame to the nucleic acid sequence encoding the extracellular, transmembrane and cytosolic domains of CD16A. In an embodiment, the operational linkage between the different domains of a SAR polypeptide is achieved via a peptide bond. However, in certain embodiments, the different domains of a SAR can be linked via non-peptide bonds, e.g., a disulfide bond or via chemical conjugation etc.

[0185] “Percent identity” in the context of two or more nucleic acids or polypeptide sequences, refers to two or more sequences that are the same. Two sequences are “substantially identical” if two sequences have a specified percentage of amino acid residues or nucleotides that are the same (e.g., 60% identity, optionally 70%, 71%, 72%, 73%, 74%, 75%, 76%, 77%, 78%7, 79%, 80%,81%, 82%, 83%, 84%, 85%, 86%, 87%, 88%, 89%, 90%, 91%, 92%, 93%, 94%, 95%, 96%, 97%, 98%, 99% identity over a specified region, or, when not specified, over the entire sequence), when compared and aligned for maximum correspondence over a comparison window, or designated region as measured using one of the following sequence comparison algorithms or by manual alignment and visual inspection. Optionally, the identity exists over a region that is at least about 50 nucleotides (or 10 amino acids) in length, or more typically over a region that is 100 to 500 or 1000 or more nucleotides (or 20, 50, 200 or more amino acids) in length.

[0186] Two examples of algorithms that can be used for determining percent sequence identity and sequence similarity are the BLAST and BLAST 2.0 algorithms, which are described in Altschul et al., (1977) Nuc. Acids Res. 25:3389-3402; and Altschul et al., (1990) J. Mol. Biol. 215:403-410, respectively. Software for performing BLAST analyses is publicly available through the National Center for Biotechnology Information.

[0187] The percent identity between two amino acid sequences can also be determined using the algorithm of E. Meyers and W. Miller, (1988) Comput. Appl. Biosci. 4:11-17) which has been incorporated into the ALIGN program (version 2.0), using a PAM120 weight residue table, a gap length penalty of 12 and a gap penalty of 4.

[0188] Non-limiting examples of target antigens are listed in Table B. A SAR of the disclosure may bind one or more (e.g., 2, 3, 4, 5 or more) target antigens listed in Table B either directly or via SAR adaptors described herein.

TABLE B
TABLE B: Exemplary Antigens Targeted by Antibodies, antibody
fragments (e.g., scFv), AABD (e.g., FHVH, vHH, DARPIN, Centryin,
D domains, Adaptors etc.) and SARS of the disclosure

CD5; CD19; CD123; CD22; CD30; CD171; CS1 (also referred to as CD2 subset 1,
CRACC, SLAMF7, CD319, and 19A24); C-type lectin-like molecule-1 (CLL-1 or
CLECL1); CD33; epidermal growth factor receptor variant III (EGFRviii); ganglioside G2
(GD2); ganglioside GD3 (aNeu5Ac(2-8)aNeu5Ac(2-3)bDGalp(l-4)bDGlcp(l-l)Cer); TNF
receptor family member B cell maturation (BCMA); Tn antigen ((Tn Ag) or (GalNAcα-
Ser/Thr)); prostate-specific membrane antigen (PSMA); Receptor tyrosine kinase-like
orphan receptor 1 (ROR1); Fms Like Tyrosine Kinase 3 (FLT3); Tumor-associated
glycoprotein 72 (TAG72); CD38; CD44v6; a glycosylated CD43 epitope expressed on
acute leukemia or lymphoma but not on hematopoietic progenitors, a glycosylated CD43
epitope expressed on non-hematopoietic cancers, Carcinoembryonic antigen (CEA);
Epithelial cell adhesion molecule (EPCAM); B7H3 (CD276); KIT (CD117); Interleukin-13
receptor subunit alpha-2 (IL-13Ra2 or CD213A2); Mesothelin; Interleukin 11 receptor
alpha (IL-llRa); prostate stem cell antigen (PSCA); Protease Serine 21 (Testisin or
PRSS21); vascular endothelial growth factor receptor 2 (VEGFR2); Lewis(Y) antigen;
CD24; Platelet-derived growth factor receptor beta (PDGFR-beta); Stage-specific
embryonic antigen-4 (SSEA-4); CD20; Folate receptor alpha (FRa or FR1); Folate receptor
beta (FRb); Receptor tyrosine-protein kinase ERBB2 (Her2/neu); Mucin 1, cell surface
associated (MUC1); epidermal growth factor receptor (EGFR); neural cell adhesion
molecule (NCAM); Prostase; prostatic acid phosphatase (PAP); elongation factor 2
mutated (ELF2M); Ephrin B2; fibroblast activation protein alpha (FAP); insulin-like
growth factor 1 receptor (IGF-I receptor), carbonic anhydrase IX (CAlX); Proteasome
(Prosome, Macropain) Subunit, Beta Type, 9 (LMP2); glycoprotein 100 (gpl00); oncogene
fusion protein consisting of breakpoint cluster region (BCR) and Abelson murine leukemia
viral oncogene homolog 1 (Abl) (bcr-abl); tyrosinase; ephrin type-A receptor 2 (EphA2);
sialyl Lewis adhesion molecule (sLe); ganglioside GM3 (aNeu5Ac(2-3)bDClalp(l-
4)bDGlcp(l-1)Cer); transglutaminase 5 (TGS5); high molecular weight-melanoma
associated antigen (HMWMAA); o-acetyl-GD2 ganglioside (OAcGD2); tumor endothelial
marker 1 (TEM1/CD248); tumor endothelial marker 7-related (TEM7R); claudin 6
(CLDN6); thyroid stimulating hormone receptor (TSHR); G protein coupled receptor class
C group 5, member D (GPRC5D); chromosome X open reading frame 61 (CXORF61);
CD97; CD179a; anaplastic lymphoma kinase (ALK); Polysialic acid; placenta-specific 1
(PLAC1); hexasaccharide portion of globoH glycoceramide (GloboH); mammary gland
differentiation antigen (NY-BR-1); uroplakin 2 (UPK2); Hepatitis A virus cellular receptor
1 (HAVCR1); adrenoceptor beta 3 (ADRB3); pannexin 3 (PANX3); G protein-coupled
receptor 20 (GPR20); lymphocyte antigen 6 complex, locus K 9 (LY6K); Olfactory
receptor 51E2 (OR51E2); TCR Gamma Alternate Reading Frame Protein (TARP); Wilms
tumor protein (WT1); Cancer/testis antigen 1 (NY-ESO-1); Cancer/testis antigen 2 (LAGE-
1a); Melanoma-associated antigen 1 (MAGE-A1); ETS translocation-variant gene 6,
located on chromosome 12p (ETV6-AML); sperm protein 17 (SPA17); X Antigen Family,
Member lA (XAGEl); angiopoietin-binding cell surface receptor 2 (Tie 2); melanoma
cancer testis antigen-1 (MAD-CT-1); melanoma cancer testis antigen-2 (MAD-CT-2); Fos-
related antigen 1; tumor protein p53 (p53); p53 mutant; prostein; survivin; telomerase;
prostate carcinoma tumor antigen-1 (PCT A-1 or Galectin 8), melanoma antigen
recognized by T cells 1 (MelanA or MARTI); Rat sarcoma (Ras) mutant; human
Telomerase reverse transcriptase (hTERT); sarcoma translocation breakpoints; melanoma
inhibitor of apoptosis (ML-IAP); ERG (transmembrane protease, serine 2 (TMPRSS2) ETS
fusion gene); N-Acetyl glucosaminyl-transferase V (NA17); paired box protein Pax-3
(PAX3); Androgen receptor; Cyclin Bl; v-myc avian myelocytomatosis viral oncogene
neuroblastoma derived homolog (MYCN); Ras Homolog Family Member C (RhoC);
Tyrosinase-related protein 2 (TRP-2); Cytochrome P450 lB 1 (CYPlB 1); CCCTC-Binding
Factor (Zinc Finger Protein)-Like (BORIS or Brother of the Regulator oflmprinted Sites),
Squamous Cell Carcinoma Antigen Recognized By T Cells 3 (SART3); Paired box protein
Pax-5 (PAX5); proacrosin binding protein sp32 (OY-TESl); lymphocyte-specific protein
tyrosine kinase (LCK); A kinase anchor protein 4 (AKAP-4); synovial sarcoma, X
breakpoint 2 (SSX2); Receptor for Advanced Glycation Endproducts (RAGE-1); renal
ubiquitous 1 (RUl); renal ubiquitous 2 (RU2); legumain; human papilloma virus E6 (HPV
E6); human papilloma virus E7 (HPV E7); intestinal carboxyl esterase; heat shock protein
70-2 mutated (mut hsp70-2); CD79a; CD79b; CD72; Leukocyte-associated
immunoglobulin-like receptor 1 (LAIRl); Fc fragment of IgA receptor (FCAR or CD89);
Leukocyte immunoglobulin-like receptor subfamily A member 2 (LILRA2); CD300
molecule-like family member f (CD300LF); C-type lectin domain family 12 member A
(CLEC12A); bone marrow stromal cell antigen 2 (BST2); EGF-like module-containing
mucin-like hormone receptor-like 2 (EMR2); lymphocyte antigen 75 (LY75); Glypican-3
(GPC3); Fc receptor-like 5 (FCRL5); and immunoglobulin lambda-like polypeptide 1
(IGLLl), MPL, Biotin, c-MYC epitope Tag, CD34, LAMP1 TROP2, GFRalpha4, CDH17,
CDH6, NYBR1, CDH19, CD200R, Slea (CA19.9; Sialyl Lewis Antigen); Fucosyl-GM1,
PTK7, gpNMB, CDH1-CD324, DLL3, CD276/B7H3, IL11Ra, IL13Ra2, CD179b-IGLl1,
TCRgamma-delta, NKG2D, CD32 (FCGR2A), Tn ag, Tim1-/HVCR1, CSF2RA (GM-
CSFR-alpha), TGFbetaR2, Lews Ag, TCR-betal chain, TCR-beta2 chain, TCR-gamma
chain, TCR-delta chain, FITC, Leutenizing hormone receptor (LHR), Follicle stimulating
hormone receptor (FSHR), Gonadotropin Hormone receptor (CGHR or GR), CCR4, GD3,
SLAMF6, SLAMF4, HIV1 envelope glycoprotein, HTLV1-Tax, CMV pp65, EBV-
EBNA3c, KSHV K8.1, KSHV-gH, influenza A hemagglutinin (HA), GAD, PDL1,
Guanylyl cyclase C (GCC), auto antibody to desmoglein 3 (Dsg3), auto antibody to
desmoglein 1 (Dsg1), HLA, HLA-A, HLA-A2, HLA-B, HLA-C, HLA-DP, HLA-DM,
HLA-DOA, HLA-DOB, HLA-DQ, HLA-DR, HLA-G, IgE, CD99, Ras G12V, Tissue
Factor 1 (TF1), AFP, GPRC5D, Claudin18.2 (CLD18A2 or CLDN18A.2), P-glycoprotein,
STEAP1, Liv1, Nectin-4, Cripto, gpA33, BST1/CD157, low conductance chloride channel
(LCCC), TAJ/TROY, MPL (TPO-R), KIR3DL2, CD32b, CD229, Toso and BAFF-R.

[0189] In some embodiments, the SAR of the disclosure comprise one or more antigen binding domains (e.g., vL, vH, Va, Vb, Vg, Vd, Fv, TCR-Fv, svd-TCR, scTCR etc.) that specifically bind to a complex comprising a peptide derived from a disease-associated antigen (such as a tumor-associated or virally-encoded antigen; e.g., a peptide derived from NY-ESO-1, MAGE-A3, MAGE-A4, WT1, mutant Ras, HPV16-E7, EBV-LMP2A, AFP, gp100, PSA, mutant p53, HIV-1, etc.) and an MHC class I protein, wherein the MHC class I protein is HLA-A, HLA-B, HLA-C, HLA-E, HLA-F, or HLA-G. In some embodiments, the MHC class I protein is HLA-A, HLA-B, or HLA-C. In some embodiments, the MHC class I protein is HLA-A. In some embodiments, the MHC class I protein is HLA-B. In some embodiments, the MHC class I protein is HLA-C. In some embodiments, the MHC class I protein is HLA-A01, HLA-A02, HLA-A03, HLA-A09, HLA-A 10, HLA-A11, HLA-A 19, HLA-A23, HLA-A24, HLA-A25, HLA-A26, HLA-A28, HLA-A29, HLA-A30, HLA-A31, HLA-A32, HLA-A33, HLA-A34, HLA-A36, HLA-A43, HLA-A66, HLA-A68, HLA-A69, HLA-A74, or HLA-A80. In some embodiments, the MHC class I protein is HLA-A02. In some embodiments, the MHC class I protein is any one of HLA-A*02:01-555, such as HLA-A*02:01, HLA-A*02:02, HLA-A*02:03, HLA-A*02:04, HLA-A*02:05, HLA-A*02:06, HLA-A*02:07, HLA-A*02:08, HLA-A*02:09, HLA-A*02: 10, HLA-A*02: 11, HLA-A*02: 12, HLA-A*02: 13, HLA-A*02: 14, HLA-A*02: 15, HLA-A*02: 16, HLA-A*02: 17, HLA-A*02: 18, HLA-A*02: 19, HLA-A*02:20, HLA-A*02:21, HLA-A*02:22, or HLA-A*02:24. In some embodiments, the MHC class I protein is HLA-A*02:01. HLA-A*02:01 is expressed in 39-46% of all Caucasians, and therefore represents a suitable choice of MHC class I protein for use in the disclosure.

[0190] In some embodiments, the SAR of the disclosure comprise one or more antigen binding domains (e.g., vL, vH, Va, Vb, Vg, Vd, Fv, TCR-Fv, svd-TCR, scTCR etc.) that specifically bind to a complex comprising a peptide derived from a disease-associated antigen (such as a tumor-associated or virally-encoded antigen) (e.g., a peptide derived from NY-ESO-1, MAGE-A3, MAGE-A4, WT1, mutant Ras, HPV16-E7, EBV-LMP2A, AFP, gp100, PSA, mutant p53, HIV-1, etc.) and an MHC class II protein, wherein the MHC class II protein is an HLA-DP, HLA-DQ, or HLA-DR.

[0191] The SAR of the disclosure can also bind to complex comprising a peptide derived from a disease-associated antigen and an MHC class I or class II protein from other species (e.g., dog, cat, mouse, rat, cow, horse, monkey etc.)

[0192] As used herein, the term “receptor” refers to a polypeptide, or portion thereof, present on a cell membrane that selectively binds one or more ligand.

[0193] As used herein, the terms “region” or “portion” when used in reference to a nucleic acid molecule refers to a set of linked nucleotides that is less than the entire length of the molecule, such as a CD3 signaling region described herein.

[0194] The term “retrovirus vector” refers to a vector derived from at least a portion of a retrovirus genome. Examples of retrovirus vector include MSCVneo, MSCV-pac (or MSCV-puro), MSCV-hygro as available from Addgene or Clontech.

[0195] The term “SAR” or “Synthetic Antigen Receptor”, as used herein, comprises conventional CARs (e.g., 2^{nd} generation CARs comprising 41BB or CD28 costimulatory domains and CD3z activation domain) and also encompasses newer approaches to conferring antigen specificity onto cells, such as Antibody-TCR chimeric molecules or Ab-TCR (WO 2017/070608 A1 incorporated herein by reference), TCR receptor fusion proteins or TFP (WO 2016/187349 A1 incorporated herein by reference), Synthetic Immune Receptors (SIRs) (see, WO 2018/102795 A1, incorporated herein by reference), STAR (see, WO 2020/029774), HLA-independent TCR (see, WO2019157454A1), Tri-functional T cell antigen coupler (Tri-TAC or TAC) (see, WO 2015/117229 A1, incorporated herein by reference) and zSIR (see, PCT/US2019/035096, incorporated herein by reference). Bispecific and multispecific CARs have been described in PCT/US2021/022641. The term “SAR” covers CAR as well as other antigen binding receptors, including but not limited to recombinant TCR.

[0196] Typically, the term “SAR-T” is used, to refer to T-cells that have been engineered to express a Synthetic antigen receptor. Thus, T lymphocytes bearing such SARs are generally referred to as SAR-T lymphocytes. SARs can be also expressed in cells other than T cells, such as hematopoietic stem cells, induced pluripotent stem cells (iPSC), NK cells and macrophage. In some embodiment, the SAR is expressed in an immortalized cell line, such as NK92, NK92MI or a derivative thereof. The term “SAR-NK” refers to an NK cell that has been engineered to express a SAR.

[0197] Typically, the term “SAR-T” is used, to refer to T-cells (e.g., αβ T cell, γδ T cell, Treg, TIL etc.) that have been engineered to express a Synthetic antigen receptor. Thus, T lymphocytes bearing such SARs are generally referred to as SAR-T lymphocytes. SARs can be also expressed in cells other than T cells, such as hematopoietic stem cells, embryonic stem cells, induced pluripotent stem cells (iPSC), NK cells, NKT cells, monocytes, macrophage, B-cells, granulocytes, dendritic cells, cytokine induced killer cells (CIK) etc. In some embodiment, the SAR is expressed in an immortalized cell line, such as NK92, NK92MI or a derivative thereof. The term “SAR-NK” refers to an NK (natural killer) cell that has been engineered to express a SAR.

[0198] The term “Sleeping Beauty Transposon” or “Sleeping Beauty Transposon Vector” refers to a vector derived from at least a portion of a Sleeping Beauty Transposon genome.

[0199] The term “TCR constant chain” or “constant region of T cell receptor” is defined as the constant chain of TCRα/TCRα, TCRβ1/TCRb1, TCRβ2/TCRb2, TCRγ/TCRd, TCRδ/TCRd and pre-TCRα. Exemplary TCR constant chains are listed in Table 12. A TCR constant chain can be divided into several subdomains such as Ig like C1 domain (e.g., SEQ ID NO: 1168-1175; Table 13), connecting peptide (e.g., SEQ ID NO: 1177-1184; Table 14), transmembrane domain (SEQ ID NO:1187-1190; Table 15), and cytosolic domain (e.g., SEQ ID NO: 1193-1196; Table 16). The cytosolic domains of TCRα, TCRβ1/β2, TCRγ and TCRδ chains are short and generally not believed to play any significant role in their signaling activities. The disclosure also provides exemplary deletion mutants and variants of the TCR chains (Table 12). These deletion mutants and variants can be used in the construction of SAR as long as they retain one or more of the functional and biological properties of the original TCR chains, such as the ability to pair with the complementary TCR chain, the ability to assemble with the TCR/CD3 complex and the ability to transmit a T cell signal (e.g., activate NFAT pathway) when engaged by target antigen expressing cells.

[0200] The term “single chain variable region” or “scFv” refers to a fusion protein comprising at least one antibody fragment comprising a variable region of a light chain and at least one antibody fragment comprising a variable region of a heavy chain, wherein the light and heavy chain variable regions are contiguously linked, e.g., via a synthetic linker, e.g., a short flexible polypeptide linker, and capable of being expressed as a single chain polypeptide, and wherein the scFv retains the specificity of the intact antibody from which it is derived. Unless specified, as used herein an scFv may have the vL and vH variable regions in either order, e.g., with respect to the N-terminal and C-terminal ends of the polypeptide, the scFv may comprise vL-linker-vH or may comprise vH-linker-vL. In this disclosure, a scFv is also described as vL-Gly-Ser-Linker-vH. Alternatively, a scFv is also described as (vL+vH) or (vH+vL).

[0201] As use herein, the term “specifically binds” or “is specific for” refers to measurable and reproducible interactions, such as binding between a target and an antibody or antibody moiety, that is determinative of the presence of the target in the presence of a heterogeneous population of molecules, including biological molecules. In some embodiments, a SAR or an antigen binding domain that specifically binds to an antigen reacts with one or more antigenic determinants of the antigen (for example a cell surface antigen or a peptide/MHC protein complex) with a binding affinity that is at least about 10 times its binding affinity for other targets.

[0202] The term “signaling domain” refers to the functional region of a protein which transmits information within the cell to regulate cellular activity via defined signaling pathways by generating second messengers or functioning as effectors by responding to such messengers.

[0203] The term “signaling module” refers to a molecule or molecular complex comprising one or more signaling mediators or signaling adaptors that is capable of initiating a cell signal. The cell signal may include but is not limited to activation of cell signaling pathways such as NFAT, AKT, STAT or NF-κB pathways. In an exemplary embodiment, the signaling module recruits one or more proteins having a cytoplasmic immunoreceptor tyrosine-based activation motif (ITAM) that is part of a signaling complex. For example, TCR-associated signaling modules include CDγε, CDδε and CD3ƒƒ. Exemplary, signaling modules that are operational in NK cells comprise signaling adaptors such as CD3ƒ, FcRy, DAP10 and DAP12.

[0204] The term “signaling mediator” or “signaling adaptor” refers to molecule that is capable of initiating or inhibiting a cell signal when recruited by a natural or a non-natural signaling receptor. In contrast to a signaling receptor, a signaling adaptor lacks its own antigen binding domain or ligand binding domain. Exemplary signaling adaptors include CD3ƒ(CD3z), FcRγ, DAP10, DAP12, CD38, CD3y and CD36. In an embodiment, the disclosure provides a SAR in which one or more heterologous antigen binding domains are operationally linked to the hinge domain or the transmembrane domain of one or more chains of a signaling adaptor. In an embodiment, the SAR comprises a signaling adaptor that is a component of a TCR complex (e.g., CD3ƒ, CD3ε, CD3γ, CD3ε etc.). In an embodiment, the SAR comprises a signaling adaptor that interacts with TCRα, β, γ and/or δ chains of the TCR complex. In an embodiment, the SAR comprises a signaling adaptor that does not interacts with TCRα, β, γ and/or δ chains of the TCR complex. In an embodiment, the SAR comprises a signaling adaptor (e.g., CD3ƒ that has a conserved aspartic acid residue in its transmembrane domain which interacts with positive charged residues in the TCRα/β transmembrane regions. In an embodiment, the SAR comprises a signaling adaptor that lacks a conserved aspartic acid residue in its transmembrane domain. In an embodiment, the SAR comprises a signaling adaptor that is not a component of a TCR complex (e.g., DAP10). In an embodiment, the SAR comprises a signaling adaptor that activates cell signaling (e.g., CD3ƒ). In an embodiment, the SAR comprises a signaling adaptor that inhibits cell signaling. In an embodiment, the SAR comprises a signaling adaptor that possesses one or more ITAM motifs. In an embodiment, the SAR comprises a signaling adaptor that possesses two or more ITAM motifs. In an embodiment, the SAR comprises a signaling adaptor that possesses a single ITAM motif. In an embodiment, the SAR comprises a signaling adaptors that lacks ITAM motifs. In an embodiment, the SAR comprises a signaling adaptor that is a disulfide linker dimer in its native form. In an embodiment, the signaling adaptor is not a disulfide linker dimer in its native form. In an embodiment, the SAR comprises a signaling adaptor that in its native state contains an interchain disulfide bond located in its transmembrane region. In an embodiment, the SAR comprises a signaling adaptor in its native state that contains an interchain disulfide bond that is not located in its transmembrane region. In an embodiment, the SAR comprises a signaling adaptor that in its native state contains an interchain disulfide bond that is located in its extracellular region. In an embodiment, the extracellular domain of the signaling adaptor is less than 10 amino acids in length. In an embodiment, the extracellular domain of the signaling adaptor is less than 8 amino acids in length. In an embodiment, the extracellular domain of the signaling adaptor is more than 10 amino acids in length. In an embodiment, the extracellular domain of the signaling adaptor is more than 15 amino acids in length. In an embodiment, the SAR comprises a signaling adaptor that induces protein phosphorylation. In an embodiment, the SAR comprises a signaling adaptor that induces protein dephosphorylation. In an embodiment, the SAR comprises a signaling adaptor that interacts with Zap70. In an embodiment, the SAR comprises a signaling adaptor that does not interact with Zap70. In an embodiment, the two chains of a double chain SAR comprise identical signaling adaptors (e.g., CD3ƒ and CD3ƒ). In an embodiment, the two chains of a double chain SAR comprise non-identical signaling adaptors (e.g., CD3ƒ and FcRγ or CD3ƒ and DAP10 etc.).

[0205] The term “signaling chain” or “signaling fragment” refers to a polypeptide comprising the transmembrane and/or intracellular region and optionally the extracellular hinge/connecting peptide regions of a cell signaling receptor. Exemplary signaling chains include the constant chains of TCRα, TCRβ, TCRγ and TCRδ. Additional exemplary signaling chains include chains comprising the transmembrane and/or intracellular regions of CD16, NKp30, NKp44, NKp46, DAP10, DAP12, DNAM-1, NKG2D, CD32, CD64, KIR3DL1, KIR2DS4, FcRγ and CD3z. In some embodiments, the signaling chain also comprise the hinge domains or the connecting peptides of CD16, NKp30, NKp44, NKp46, DAP10, DAP12, DNAM-1, NKG2D, CD32, CD64, KIR3DL1, KIR2DS4, FcRγ and CD3z.

[0206] The term “Synthetic Antigen Receptor” or “SAR” refers to a non-naturally occurring receptor or a synthetic receptor that can be expressed on the surface of a cell and comprises at least one heterologous antigen binding domain and at least one membrane associated domain, wherein the membrane associated domain can be a transmembrane domain or a membrane anchoring domain (i.e., a GPI linked domain). The antigen binding domain of the SAR is heterologous to its membrane associated domain, i.e., the antigen binding domain is derived from a different source than the membrane associated domain. A SAR may further comprise a hinge domain, an extracellular ligand binding domain and/or a cytosolic domain. In an embodiment, a SAR comprises a polypeptide or a set of polypeptides, which when expressed in an effector cell, provides the cell with specificity for a target cell, typically a cancer cell, and with intracellular signal generation. A SAR can be single chain, two chains or more than two chains. A SAR can be unispecific, bispecific or multispecific. A SAR may have one or more heterologous antigen binding domains. The term “SAR” includes conventional chimeric antigen receptors (e.g., 2^{nd} generation CARs) and next generation CARs (e.g., SIR, cTCR, AbTCR, zSIR, HIT, TFP, TAC etc.). The current disclosure describes novel SAR compositions comprising one or more regions derived from CD16A, CD16B, CD64, CD32, NKp30, NKp44, NKp46, KIR2DL1, KIR2DL2, KIR2DL3, KIR2DL5A, KIR2DL5B, KIR3DL1, KIR3DL2, KIR3DL4, KIR2DL4, KIR2DS1, KIR2DS2, KIR2DS3, KIR2DS4, KIR2DS5, KIR3DS1, NKG2D, NKG2C, NKG2A, NKG2E, NKG2F, DNAM-1, 2B4, OX40, CD28, 4-1BB, CD27, CD81, CD2, CD5, TNFR-I, TNFR-II, Fas, CD30, CD40, CRTAM, TIGIT, CD96, SLAMF6, SLAMF7, CD100, CD160, CEACAM, ILT2, KLRG1, LAIR1, CD161, Siglec3, Siglec-7, Siglec-9, CD3ƒ, DAP10, DAP12, FcRγ, TCRαβ and TCRγδ etc. and variants and fragments thereof. The disclosure also provides SARs comprising functional variants of the above genes and/or proteins include alternative spliced isoforms and homologs from other species. The exemplary regions or fragments of the above genes and proteins that can be used in the construction of the SARs of the disclosure are provided in Tables 12-18 and 25-31 of the provisional application. The exemplary extracellular domains of native receptors are provided in SEQ ID NO:10842-10877. The SAR can be also constructed with polypeptides or fragments that have 70%, 75%, 80%, 85%, 90%, 95%, 98% or 99% homology to any of the fragments provided in Tables 12-18 and 25-31 of the provisional application. The nucleic acid and amino acid sequences of exemplary additional components (e.g., vL, vH, scFv, vHH etc.) that can be used in the construction of SAR are provided in Tables 2-11. The SAR can be also constructed with polypeptides or fragments that have 70%, 75%, 80%, 85%, 90%, 95%, 98% or 99% homology to any of the fragments provided in Tables 2-18 and 25-31 of provisional application. The exemplary SARs of the disclosure are provided in Tables 32-34 of provisional application. SARs are modular in design and additional SARs can be constructed by swapping one module of the SAR with a different module. The expression and activity of these novel SARs can be tested using methods described in the disclosure to select the SARs with optimal functional activities.

[0207] The term “single-chain synthetic antigen receptor” or “single chain SAR” means a synthetic antigen receptor comprising a single polypeptide chain. An exemplary single chain SAR targeting CD19 and based on CD16 signaling chain is CD8SP-CD19-hu-mROO5-1-(vL-vH)-CD16A-F158V-S197P-FL-v3 (SEQ ID NO: 4954). In this SAR, a humanized scFv (hu-mROO5-1) targeting CD19 is operationally linked to the extracellular, transmembrane and cytosolic domains of a high affinity non-cleavable mutant of CD16 carrying F158V and S197P mutations (CD16A-F158V-S197P-FL-v3). Additional exemplary single chain SARs in which different antigen binding domains are operationally linked to the CD16A-F158V-S197P-FL-v3 module are provided in Tables 36-39 of provisional application. Additional exemplary single chain SARs are provided in SEQ ID NO: 5463-5482. As SAR are modular in design, the CD16A-F158V-S197P-FL-v3 module (SEQ ID NO (DNA): 1417 and SEQ ID NO (PRT): 3811) can be replaced by other modules, such as NKp30-ECDTMCP-opt2 (SEQ ID NO: 1375), NKp44-ECDTMCP-opt2 (SEQ ID NO: 1389), NKp46-ECDTMCP-opt2 (SEQ ID NO: 1405), CD8-hinge-NKG2D-TM-2B4CP-opt-2 (SEQ ID NO: 1434), CD32-ECDTMCP-opt2 (SEQ ID NO: 1582), CD64-ECDTMCP-opt2 (SEQ ID NO: 1584), 2B4-ECDTMCP-opt2 (SEQ ID NO: 1580), OX40-ECDTMCP-opt2 (SEQ ID NO: 1578), CD28-ECDTMCP-opt2 (SEQ ID NO:1576), 41BB-ECDTMCP-opt2 (SEQ ID NO: 1574), KIR3DL1 (SEQ ID NO: 9644) and KIR2DS4 (SEQ ID NO: 9653) etc. to generate single chain SARs with different signaling chains. Exemplary modules derived from naturally occurring receptors that can be used in the construction of SARs are provided in SEQ ID NO: 9635-9668. Exemplary such SARs are provided in SEQ ID NO: 9860-9895 and in Table 41 of the provisional application. The expression and activity of these novel SARs can be tested using methods described in the disclosure to select the SARs with optimal functional activities.

[0208] The term “Synthetic Immune Receptor” or alternatively a “SIR” refers to a set of polypeptides, typically two in some embodiments, which when expressed in an effector cell, provides the cell with specificity for a target cell, typically a cancer cell, and with intracellular signal generation. SIRs represent next generation CAR platforms that are described in WO 2018/102795 A1 which is incorporated herein by reference. In a typical embodiment, a SIR comprises one or more antigen binding domains (e.g., antibody or antibody fragment, a ligand or a receptor) that bind to antigens as described herein, and are joined to one or more T cell receptor constant chains or regions via an optional linker. In some embodiments, the set of polypeptides are contiguous with each other. In some embodiments, a SIR comprises two or more sets of two or more polypeptides. The polypeptides of each set of SIRs are contiguous with each other (functional polypeptide unit 1) but are not contiguous with the polypeptides of the other set (functional polypeptide unit 2). In some embodiments, the T cell receptor constant chains (or regions) of the SIR is chosen from the constant chain of human T cell receptor-alpha (TCR-alpha or TCRα or TCRα or hTCR-alpha or hTCRα or hTCRα or Cα), human T cell receptor-beta1(TCR-beta1 or TCRβ1 or TCRb1 or hTCR-beta1 or hTCRP1 or hTCRb1 or Cβ1), human T cell receptor-beta 2 (TCR-beta2 or TCRβ2 or TCRb2 or hTCR-beta2 or hTCRP2 or hTCRb2 or Cβ2 also designated TCR-beta, TCRβ or TCRb or Cβ), human Pre-T cell receptor alpha ((preTCR-alpha or preTCRα or preTCRα or preCα), human T cell receptor-gamma (TCR-gamma or TCRγ or TCRg or hTCR-gamma or hTCRγ or hTCRg or hTCRγ1 or hTCRgamma1, or Cγ), or human T cell receptor-delta (TCR-delta or TCRd or TCRS or hTCR-delta or hTCRd or hTCRδ or Cδ). In some embodiments, the TCR constant chains of SIR are encoded by their wild-type nucleotide sequences while in other aspects the TCR constant chains of SIR are encoded by the nucleotide sequences that are not wild-type. In some embodiments, the TCR constant chains of SIR are encoded by their codon optimized sequences. In some embodiments, the TCR constant chains of SIR encode for the wild-type polypeptide sequences while in other embodiments the TCR constant chains of SIR encoded for polypeptides that carry one or more mutations. In some embodiments, the TCR constant chains of SIR are encoded by their codon optimized sequences that carry one or more mutations. The disclosure also covers deletion mutants of TCR constant chains that retain at least one of the biological and functional properties of the corresponding full-length TCR chain. A SIR that comprises an antigen binding domain (e.g., a scFv, or vHH) that targets a specific tumor maker “X”, such as those described herein, is also referred to as X-SIR or XSIR. For example, a SIR that comprises an antigen binding domain that targets CD19 is referred to as CD19-SIR or CD19SIR. The TCR constant chain/domain of a SIR can be derived from the same species in which the SIR will ultimately be used. For example, for use in humans, it may be beneficial for the TCR constant chain of the SIR to be derived from or comprised of human TCR constant chains. However, in some instances, it is beneficial for the TCR constant chain to be derived from the same species in which the SIR will ultimately be used in, but modified to carry amino acid substitutions that enhance the expression of the TCR constant chains. For example, for use in humans, it may be beneficial for the TCR constant chain of the SIR to be derived from or comprised of human TCR constant chains but in which certain amino acids are replaced by the corresponding amino acids from the murine TCR constant chains. Such murinized TCR constant chains provide increased expression of the SIR. The SIR or functional portion thereof, can include additional amino acids at the amino or carboxy terminus, or at both termini, which additional amino acids are not found in the amino acid sequence of the TCR or antigen binding domain which make up the SIR. Desirably, the additional amino acids do not interfere with the biological function of the SIR or functional portion, e.g., recognize target cells, detect cancer, treat or prevent cancer, etc. More desirably, the additional amino acids enhance the biological activity, as compared to the biological activity of the parent SIR.

[0209] The term SVH domain as used herein refers to a single human VH domain antibody (V_{H} sdAb). These terms are thus used interchangeably. The term SVH is also used interchangeably with independent vH domains. A SVH is an example of an autonomous antigen binding domain (AABD). An exemplary SVH is a fully human vH domain (FHVH) presented in SEQ ID NO (DNA): 827-828 and SEQ ID NO (PRT): 3221-3222. Another exemplary SVH is a chVH domain presented in SEQ ID NO (DNA): 830-831 and SEQ ID NO (PRT): 8223-8224. Another exemplary SVH is an aVH domain presented in SEQ ID NO (DNA): 850-851 and SEQ ID NO (PRT): 3244-3245. The SEQ ID numbers of other exemplary SVH domains are presented in Table 5. Additional SVH domains that can be used in the construction of the SARs of the disclosure are provided in WO2016062988, WO2016113556, WO2017191476, WO2018039180, WO2019006072, WO2018237037, WO2018119215, WO2019126756, WO2019055689 and WO2020018922, which are incorporated in their entirety by reference herein.

[0210] The term “stimulation,” refers to a primary response induced by binding of a stimulatory molecule (e.g., a TCR/CD3 complex) with its cognate ligand (or target antigen) thereby mediating a signal transduction event, such as, but not limited to, signal transduction via the TCR/CD3. Stimulation can mediate altered expression of certain molecules.

[0211] The term “stimulatory molecule,” refers to a molecule expressed by an immune cell (e.g., T cell, NK cell, B cell) that provides the cytoplasmic signaling sequence(s) that regulate activation of the immune cell in a stimulatory way for at least some aspect of the immune cell signaling pathway. In one aspect, the signal is a primary signal that is initiated by, for instance, binding of a TCR/CD3 complex with an MHC molecule loaded with peptide, and which leads to mediation of a T cell response, including, but not limited to, proliferation, activation, differentiation, and the like. A primary cytoplasmic signaling sequence (also referred to as a “primary signaling domain”) that acts in a stimulatory manner may contain a signaling motif which is known as immunoreceptor tyrosine-based activation motif or ITAM. Examples of an ITAM containing cytoplasmic signaling sequence includes, but is not limited to, those derived from CD3 zeta, FcRy, CD3 gamma, CD3 delta, CD3 epsilon, CD79a, CD79b, DAP10, and DAP12.

[0212] The term “subject” is intended to include living organisms in which an immune response can be elicited (e.g., any domesticated mammals or a human). The terms “subject” or “individual” or “animal” or “patient” are used interchangeably herein to refer to any subject, particularly a mammalian subject, for whom administration of a composition or pharmaceutical composition of the disclosure is desired. Mammalian subjects include humans, non-human primates, dogs, cats, guinea pigs, rabbits, rats, mice, horses, cattle, cows, and the like, with humans being preferred.

[0213] “Switch domain,” or a “dimerization domain” as used herein, typically refers to a polypeptide-based entity that, in the presence of a dimerization molecule, associates with another switch domain.

[0214] A “suicide gene”, “suicide switch” or a “Kill-switch” encodes for a protein which possesses an inducible capacity to lead to cellular death. Exemplary suicide genes include HSV-TK, iCaspase 9, tEGFR, CD20, tCD19, tHer2, tBCMA, RQR8 etc. For example, CD20-expressing cells can be selectively ablated by treatment with the antibody Rituximab. Similarly, tBCMA expressing cells can be selectively ablated by treatment with belantamab mafodotin and tHer2 expressing cells can be selectively ablated by treatment with Herceptin.

[0215] A “survival gene”, “survival switch” or a “Life-switch” encodes for a protein that provides a pro-survival signal to a cell. Exemplary survival genes include membrane anchored form of IL2 and membrane anchored form of IL15.

[0216] As used herein, the term “T lymphocyte” or “T cell” refers to a cell expressing CD3 (CD3+) and a T Cell Receptor (TCR+). In an embodiment, a T cell is a native cell (i.e., a cell that is not a recombinant or engineered) that expresses CD3 and a TCR.

[0217] As used herein, the term “TCR” or “T cell receptor” refers to a dimeric heterologous cell surface signaling protein forming an alpha-beta or gamma-delta receptor typically involved in recognizing an antigen presented by an MHC molecule (i.e., antigen recognition in the context of an MHC molecule). TCRs of the disclosure may be non-naturally occurring and/or purified and/or engineered. TCRs of the disclosure may have more than one mutation present in the alpha chain variable domain and/or the beta chain variable domain relative to the parental TCR. “Engineered TCR” and “mutant TCR” are used synonymously herein and generally mean a TCR which has one or more mutations introduced relative to the parental TCR, in particular in the Va and/or Vb or Vg and/or Vd domain thereof. An engineered TCR may bind to an antigen in an HLA-dependent or HLA-independent manner.

[0218] As used herein, the term “transgene” refers to a heterologous gene that is integrated into the genome of an organism (e.g., a non-human animal) and that is transmitted to progeny of the organism during sexual reproduction.

[0219] As used herein, the term “T lymphocyte” or “T cell” refers to a cell expressing CD3 (CD3+) and a T Cell Receptor (TCR+). In an embodiment, a T cell is a native cell (i.e., a cell that is not engineered to express CD3 or TCR) that expresses CD3 and a TCR naturally. The terms “T cell” and “T lymphocyte” are interchangeable and used synonymously herein. Examples include but are not limited to naïve T cells (“lymphocyte progenitors”), central memory T cells, effector memory T cells, stem memory T cells (T_{scm}), iPSC-derived T cells, synthetic T cells, tumor infiltrating T cells (TIL), αβ T cells, γδ T cells, regulatory T cells (Tregs) or combinations thereof.

[0220] The term “non-T cell” refers to a cell that is not a T cell. In an embodiment, a non-T cell lacks the cell surface expression of CD3 and a T cell receptor. In an embodiment, a non-T cell does not respond to a T cell activating antibody, such as OKT3. In an embodiment, a non-T cell lacks surface expression of CD3. In an embodiment, a non-T cell lacks the expression of one or more of CD3 chains selected from the group of CD3ε, CD3γ and CD3δ. In an embodiment, a non-T cell shows germline configuration of TCR genes and has not undergone T cell gene rearrangement. In an embodiment, a non-T cell lacks the ability to form a functional T cell/CD3 receptor complex. An exemplary non-T cell includes an NK cell, a B cell, a macrophage, a granulocyte, a dendritic cell and an epithelial cell. A non-T cell can be an immortalized cell line. In an exemplary embodiment, a non-T cell is an NK cell lines, e.g., NK92, NK92MI, NKG and YTS etc. In an embodiment, a non-T cell is an iPSC derived cell that lacks CD3 and T cell receptor expression.

[0221] The term “T cell receptor module,” or “TCRM,” refers to a heterodimer comprising sequences derived from a T cell receptor. The TCRM comprises T cell receptor transmembrane domains and may further comprise all or a portion of T cell receptor connecting peptides and/or intracellular domains.

[0222] The term “TCR-Fv” or “Fv-TCR” of “fragment variable TCR” as used here refers to an antigen binding module that is formed by the variable domains of TCR chains. A TCR-Fv can be formed by the Vα and Vβ domains or by Vγ and Vδ domains. A TCR-Fv shows some or all the specific binding affinity for a target antigen (e.g., peptide/MHC complex) of the TCR from which the variable domains are derived. In an embodiment, the SAR of the disclosure demonstrate the ability to form a TCR-Fv antigen binding module when the Vα/Vβ or Vγ/Vδ chains derived from a TCR are attached to its two polypeptides.

[0223] The term “Fv” or “fragment variable” as used here refers to an antigen binding module that is formed by the variable domains of an antibody. A Fv can be formed by the vL and vH domains. A Fv shows some or all the specific binding affinity for a target antigen of the antibody from which the variable domains are derived. In an embodiment, the SAR of the disclosure demonstrate the ability to form a Fv antigen binding module when the vL and vH chains derived from an antibody are attached to its two polypeptides.

[0224] As used herein, a “transmembrane protein” or “membrane protein” is a protein located at and/or within a membrane such as the phospholipid bilayer of a biological membrane (e.g., biomembranes such as the membrane of a cell). Some proteins are bound only to the membrane surface, whereas others have one or more regions buried within the membrane and/or domains on one or both sides of the membrane. Specific examples of transmembrane proteins include CD8a, CD4, CD3ƒ, CD16, NKp30, NKp44, NKG2D etc.

[0225] As used herein a “transmembrane module” or “TMM” refers to a molecule or a molecular complex comprising a transmembrane protein (e.g., CD16A).

[0226] The term “membrane associated module” or “MAM” refers to a molecule or a molecular complex comprising a transmembrane protein (e.g., CD16A) or a membrane anchored protein (e.g., CD16B). The term encompasses transmembrane proteins, such as CD16A, and GPI (glycosylphosphatidylinositol) linked proteins, such as CD16B. A MAM may further comprise all or portions of hinge domains and/or cytosolic domains.

[0227] “Therapeutic agents” as used herein refers to agents that are used to, for example, treat, inhibit, prevent, mitigate the effects of, reduce the severity of, reduce the likelihood of developing, slow the progression of and/or cure, a disease. Diseases targeted by therapeutic agents include but are not limited to infectious diseases, Carcinomas, sarcomas, lymphomas, leukemia, germ cell tumors, blastomas, antigens expressed on various immune cells, and antigens expressed on cells associated with various hematologic diseases, and/or inflammatory diseases.

[0228] “Therapeutic Controls” as used herein refers to an element used for controlling the activity of a SAR expressing cell. In some embodiments, therapeutic controls for controlling the activity of the SAR expressing cells of the disclosure comprise any one or more of truncated epidermal growth factor receptor (tEGFR), truncated epidermal growth factor receptor viii (tEGFRviii), truncated CD30 (tCD30), truncated BCMA (tBCMA), truncated CD19 (tCD19), thymidine kinase, cytosine deaminase, nitroreductase, xanthine-guanine phosphoribosyl transferase, human caspase 8, human caspase 9, inducible caspase 9, purine nucleoside phosphorylase, linamarase/linamarin/glucose oxidase, deoxyribonucleoside kinase, horseradish peroxidase (HRP)/indole-3-acetic (IAA), Gamma-glutamylcysteine synthetase, CD20/alphaCD20, CD34/thymidine kinase chimera, dox-dependent caspase-2, mutant thymidine kinase (HSV-TKSR39), AP1903/Fas system, a chimeric cytokine receptor (CCR), a selection marker, and combinations thereof. Exemplary therapeutic controls are provided in Table 24 of provisional application.

[0229] The term “therapeutic effect” refers to a biological effect which can be manifested by various means, including but not limited to, e.g., decrease in tumor volume, a decrease in the number of cancer cells, a decrease in the number of metastases, an increase in life expectancy, decrease in cancer cell proliferation, decrease in cancer cell survival, decrease in the titer of the infectious agent, a decrease in colony counts of the infectious agent, amelioration of various physiological symptoms associated with a disease condition. A “therapeutic effect” can also be manifested by the ability of the peptides, polynucleotides, cells and antibodies in prevention of the occurrence of disease in the first place or in the prevention of relapse of the disease.

[0230] The term “therapeutically effective amount” as used herein refers to the amount of a pharmaceutical composition comprising one or more peptides as disclosed herein or a mutant, variant, analog or derivative thereof, to decrease at least one or more symptom of the disease or disorder, and relates to a sufficient amount of pharmacological composition to provide the desired effect. The phrase “therapeutically effective amount” as used herein means a sufficient amount of the composition to treat a disorder, at a reasonable benefit/risk ratio applicable to any medical treatment.

[0231] The term “TCR receptor fusion proteins” or “TFP” refers to a next generation SAR platform as described in WO 2016/187349 A1 which is incorporated herein by reference. In an embodiment, a TFP comprises an antibody moiety that specifically binds to a target antigen fused to a TCR chain such as CD3ε, CD3γ, CD36, TCRα or TCRβ. Exemplary TCR chains that can be used in the construction of TFP are represented by SEQ ID NOs: 11903-11906 of this disclosure and are provided in WO 2017/070608 A1 which is incorporated herein by reference. A TFP incorporating CD3ε chain is referred to as a CD3E TFP or TFPε. A TFP incorporating CD3γ chain is referred to as a CD3γ TFP or TFPγ. A TFP incorporating CD3δ chain is referred to as a CD3δ TFP or TFPδ. The TFP incorporating CD3ε, CD3γ or CD3δ chains are collectively referred to as CD3ε/y/δ TFP or TFPε/γ/δ.

[0232] The term “transfer vector” refers to a composition of matter which comprises an isolated nucleic acid and which can be used to deliver the isolated nucleic acid to the interior of a cell. Numerous vectors are known in the art including, but not limited to, linear polynucleotides, polynucleotides associated with ionic or amphiphilic compounds, plasmids, and viruses. Thus, the term “transfer vector” includes an autonomously replicating plasmid or a virus. The term should also be construed to further include non-plasmid and non-viral compounds which facilitate transfer of nucleic acid into cells, such as, for example, a poly lysine compound, liposome, and the like. Examples of viral transfer vectors include, but are not limited to, adenoviral vectors, adeno-associated virus vectors, retroviral vectors, lentiviral vectors, and the like.

[0233] “Transmembrane domain” (TMD) as used herein refers to the region of a receptor, (e.g., a SAR) which crosses the plasma membrane. The transmembrane domain of the SAR of the disclosure is the transmembrane region of a transmembrane protein (for example Type I transmembrane protein or Type II transmembrane protein), an artificial hydrophobic sequence or a combination thereof. Other transmembrane domains will be apparent to those of skill in the art and may be used in connection with alternate embodiments of the disclosure. In some embodiments, the TMD encoded SAR comprises a transmembrane domain selected from the transmembrane domain of an alpha, beta or zeta chain of a T-cell receptor, CD3γ, CD3ε, CD36, CD28, CD45, CD4, CD5, CD8, CD9, CD16, CD22, CD33, CD37, CD64, CD80, CD86, CD134, CD137, CD154, KIRDS2, OX40, CD2, CD27, LFA-1 (CDl la, CD18), ICOS (CD278), 4-1BB (CD137), GITR, CD40, BAFFR, HVEM (LIGHTR), SLAMF7, NKp80 (KLRFl), CD160, CD19, IL2R beta, IL2R gamma, IL7R a, ITGA1, VLA1, CD49a, ITGA4, IA4, CD49D, ITGA6, VLA-6, CD49f, ITGAD, CDl ld, ITGAE, CD103, ITGAL, CD11a, LFA-1, ITGAM, CD11b, ITGAX, CD11c, ITGB1, CD29, ITGB2, CD18, LFA-1, ITGB7, TNFR2, DNAM1(CD226), SLAMF4 (CD244, 2B4), CD84, CD96 (Tactile), CEACAMI, CRT AM, Ly9 (CD229), CD160 (BY55), PSGL1, CD100 (SEMA4D), SLAMF6 (NTB-A, Lyl08), SLAM (SLAMFI, CD150, IPO-3), BLAME (SLAMF8), SELPLG (CD162), LTBR, PAG/Cbp, NKp44, NKp30, NKp46, NKG2D, and/or NKG2C. Exemplary transmembrane domains are provided in Table 28 of provisional application. The transmembrane domain of the SAR of the disclosure may be native or non-native to the receptor. As the SARs are modular in design, in some embodiments the transmembrane domain of one SAR may be replaced by transmembrane domain of another SAR as long as it retains its biological and functional properties. Thus, the NKp30 transmembrane domain in a NKp30-based SAR may be replaced by the transmembrane domain of NKp44. The resulting SAR with a non-native transmembrane domain can be tested for its cell surface expression and functional activities using assays known in the art and assays described in this disclosure.

[0234] As used herein “Tri-functional T cell antigen coupler” or “Tri-TAC” or “TAC” refer to a next generation SAR platform described in WO 2015/117229 A1, which is incorporated herein by reference. Tri-TAC targeting different antigens can be constructed using the antigen binding domains (e.g., vL and vH fragments, scFv, vHH, ligands and receptors etc.) described in this disclosure using techniques known in the art.

[0235] As used herein, the terms “treat,” “treatment,” “treating,” or “amelioration” refer to therapeutic treatments, wherein the object is to reverse, alleviate, ameliorate, inhibit, slow down or stop the progression or severity of a condition associated with, a disease or disorder.

[0236] “Tumor,” as used herein refers to all neoplastic cell growth and proliferation, whether malignant or benign, and all pre-cancerous and cancerous cells and tissues.

[0237] “Vector”, “cloning vector” and “expression vector” as used herein refer to the vehicle by which a polynucleotide sequence (e.g., a foreign gene) can be introduced into a host cell, so as to transform the host and promote expression (e.g., transcription and translation) of the introduced sequence. Vectors include plasmids, phages, viruses, etc.

[0238] The term “viral vector” refers to a vector obtained or derived from a virus. Typically the virus is a retrovirus including, but not limited to, lentiviruses and gamma retroviruses. The viral vector of the disclosure may be a retroviral vector, such as a gamma-retroviral vector. The viral vector may be based on human immunodeficiency virus. The viral vector of the disclosure may be a lentiviral vector. The vector may be based on a non-primate lentivirus such as equine infectious anemia virus (EIAV). The viral vector of the disclosure comprises a mitogenic T-cell activating transmembrane protein and/or a cytokine-based T-cell activating transmembrane protein in the viral envelope. The mitogenic T-cell activating transmembrane protein and/or cytokine-based T-cell activating transmembrane protein is/are derived from the host cell membrane, as explained above.

[0239] The term “zeta” or alternatively “zeta chain”, “CD3-zeta” or “TCR-zeta” “CD3ƒ “is defined as the protein provided as GenBank Ace. No. BAG36664.1, or the equivalent residues from a non-human species, e.g., mouse, rodent, monkey, ape and the like, and a “zeta stimulatory domain” or alternatively a “CD3-zeta stimulatory domain” or a “TCR-zeta stimulatory domain” is defined as the amino acid residues from the cytoplasmic domain of the zeta chain, or functional derivatives thereof, that are sufficient to functionally transmit an initial signal necessary for T cell activation.

[0240] “HLA deficient”, including HLA-class I deficient, or HLA-class II deficient, or both, refers to cells that either lack, or no longer maintain, or have reduced level of surface expression of a complete MHC complex comprising an HLA class I protein heterodimer and/or an HLA class II heterodimer, such that the diminished or reduced level is less than the level naturally detectable by other cells or by synthetic methods.

[0241] “Modified HLA deficient iPSC,” as used herein, refers to HLA deficient iPSC that is further modified by introducing genes expressing proteins related but not limited to improved differentiation potential, antigen targeting, antigen presentation, antibody recognition, persistence, immune evasion, resistance to suppression, proliferation, costimulation, cytokine stimulation, cytokine production (autocrine or paracrine), chemotaxis, and cellular cytotoxicity, such as non-classical HLA class I proteins (e.g., HLA-E and HLA-G), chimeric antigen receptor (CAR), T cell receptor (TCR), CD16 Fc Receptor, BCL1 lb, NOTCH, RUNX1, IL15, 41BB, DAP 10, DAP 12, CD24, CD3z, 41BBL, CD47, CD 113, and PDL1. The cells that are “modified HLA deficient” also include cells other than iPSCs.

[0242] CD16, a FcγR receptor, has been identified to have two isoforms, Fc receptors FcγRIIIa (CD16a) and FcγRIIIb (CD16b). Unless specified otherwise, CD16 refers to both CD16a and CD16b isoforms and any other alternatively spliced variant from human or non-human species. CD16a is a transmembrane protein expressed by NK cells, which binds monomeric IgG attached to target cells to activate NK cells and facilitate antibody-dependent cell-mediated cytotoxicity (ADCC). “High affinity CD16, ““non-cleavable CD16,” or “high affinity non-cleavable CD16 (hnCD16),” as used herein, refers to a natural or non-natural variant of CD 16. The wildtype CD16 has low affinity and is subject to extodomain shedding, a proteolytic cleavage process that regulates the cells surface density of various cell surface molecules on leukocytes upon NK cell activation. F176V (or F158V or V158) are exemplary CD16 polymorphic variants having high affinity. A CD16 variant having the cleavage site (position 195-198) in the membrane-proximal region (position 189-212) altered or eliminated is not subject to shedding. The cleavage site and the membrane-proximal region are described in detail in WO2015148926, the complete disclosures of which are incorporated herein by reference. The CD16 S197P or S197R variant is an engineered non-cleavable version of CD16. A CD16 variant comprising both F158V and S197P (or S197R) has high affinity and is non-cleavable. Another exemplary high affinity and non-cleavable CD16 (hnCD16) variant is an engineered CD 16 comprising an ectodomain originated from one or more of the 3 exons of the CD64 ectodomain. The CD16 SAR of the disclosure may comprise the wildtype CD16 sequence or its natural or non-natural variants, such a F158V and S197P (or S197R),

[0243] While immune cells and iPSC expressing CD16 or CD16 variants are known in the art, in one embodiment, the disclosure provides SARs comprising the extracellular Fc binding region of CD16 or CD16 variants. In an embodiment, a CD16-SAR retains the ability to bind Fc region of an antibody or antibody fragment but has the additional ability to bind to an antigen through its non-natural antigen binding domain (e.g., AABD, scFv, vHH, FHVH, Fv etc.). In an embodiment, the antigen binding domain of the CD16 SAR is operably linked to the N-terminal region or near the N-terminal region of the D1 domain (SEQ ID NO: 3836) of CD16 or the CD16 variants, i.e., at or near the N-terminal region of the extracellular domain of CD16 or CD16 variants. In an embodiment, an optional linker is present between the antigen binding domain of the SAR and the D1 domain of CD16 or CD16 variant. Exemplary linkers are provided in Table 11 of provisional application.

[0244] In an embodiment, a CD16-SAR lacks the ability to bind Fc region of an antibody or antibody fragment but possess the ability to bind to an antigen through its non-natural antigen binding domain (e.g., AABD, scFv, vHH, FHVH, Fv etc.). In an exemplary embodiment, a CD16-SAR comprises one or more non-natural antigen binding domains (e.g., AABD, scFv, vHH, FHVH, Fv etc.) that are operationally linked via an optional hinge domain to the transmembrane and optionally the cytosolic domain of CD16. In an embodiment, a CD16-SAR possesses the ability to recruit signaling adaptors, such as CD3z and/or FceRy1 upon binding to its target antigen. The binding domain of a SAR binds to a desired epitope or antigen. For example, the epitope recognized by a SAR is determined from the epitope recognized by the scFv used as the binding domain of the SAR. For example, since the antigen specific domain of the SAR CD8SP-CD19-hu-mROO5-1-vL-Xho-IgCL-DAP10-opt1-F-P2A-Spe-IgSP-Bst-CD19-hu-mROO5-1-vH-Mlu-IglCH1-DAP10-opt2-F-F2A-Xba-PAC (SEQ ID NO: 2275) targeting CD19 is comprised of vL (SEQ ID NO: 2543) and vH (SEQ ID NO: 2785) fragments derived from hu-mROO5-1 scFv (SEQ ID NO: 3027), it is expected that the SAR targets the same epitope as the scFv and/or the parental antibody from which the scFv is derived. The epitopes recognized by several scFv and/or their parental antibodies used in the construction of the SARs and backbones of this disclosure are known in the art. Alternatively, the epitope targeted by a SAR can be determined by generating a series of mutants of its target antigen and testing the ability of the mutants to bind to the SAR-expressing cells using techniques known in the art, for example, using the Topanga Assay (Gopalakrishnan, R, Sci Reports, 2019). As an example, the epitope recognized by the SAR CD8SP-CD19-hu-mROO5-1-vL-Xho-IgCL-DAP10-opt1-F-P2A-Spe-IgSP-Bst-CD19-hu-mROO5-1-vH-Mlu-Ig1CH1-DAP10-opt2-F-F2A-Xba-PAC (SEQ ID NO: 2275) targeting CD19 can be determined by generating a panel of deletion and point mutants of the CD19-ECD-GGSG-NLuc-4xFlag-2xStreptag-8xHis-T2A-Pac (DNA SEQ ID NO: 1282). The mutant constructs would be transfected into a suitable cell line (e.g., 293FT cells) and the supernatant containing the fusion protein collected and assayed for NLuc activity to assure that the different mutant CD19-ECD-GGSG-NLuc-4xFlag-2xStreptag-8xHis fusion proteins are being secreted in the supernatant. Subsequently, the fusion proteins would be tested for their ability to bind to cells (e.g., Jurkat cells or T cells) expressing the CD8SP-CD19-hu-mROO5-1-vL-Xho-IgCL-DAP10-opt1-F-P2A-Spe-IgSP-Bst-CD19-hu-mROO5-1-vH-Mlu-Ig1CH1-DAP10-opt2-F-F2A-Xba-PAC (SEQ ID NO: 2275) construct. The mutant that fails to bind to the SAR-expressing cells is a candidate for containing the epitope targeted by the CD19-specific SAR. An alternate approach to determine the epitope recognized by a particular SAR could include a functional competitive assay with different test antibodies. For example, T cells expressing the CD8SP-CD19-hu-mROO5-1-vL-Xho-IgCL-DAP10-opt1-F-P2A-Spe-IgSP-Bst-CD19-hu-mROO5-1-vH-Mlu-Ig1CHI-DAP10-opt2-F-F2A-Xba-PAC (SEQ ID NO: 2275) SAR could be co-cultured with a cell line expressing CD19 (e.g., RAJI cells) in the absence and presence of increasing concentrations of different test CD19 antibodies. In case the epitope recognized by a test CD19 antibody overlaps with the epitope recognized by the SAR CD8SP-CD19-hu-mROO5-1-vL-Xho-IgCL-DAP10-opt1-F-P2A-Spe-IgSP-Bst-CD19-hu-mROO5-1-vH-Mlu-Ig1CHI-DAP10-opt2-F-F2A-Xba-PAC (SEQ ID NO: 2275), then the test antibody would be expected to block target-cell killing and cytokine production induced by T cells expressing the CD8SP-CD19-hu-mROO5-1-vL-Xho-IgCL-DAP10-opt1-F-P2A-Spe-IgSP-Bst-CD19-hu-mROO5-1-vH-Mlu-Ig1CH1-DAP10-opt2-F-F2A-Xba-PAC (SEQ ID NO: 2275) SAR in a dose-dependent manner. A non-specific antibody of the same isotype as the test antibody would be included as a control and would be expected to have no effect on the target-cell killing and cytokine production induced by T cells expressing the SAR. Similarly, a specific SAR can be expressed in Jurkat-NFAT-EGFP cells and the ability of a test antibody to block EGFP induction by the SAR-expressing Jurkat-NFAT-GFP cells upon coculture with a target cell line can be used to determine whether the epitope recognized by the test antibody overlaps with the epitope recognized by the said SAR.

TABLE 3

| | | | | | scFV | |
|---|---|---|---|---|---|---|
| | vL | | vH | | scFv- | |
| | vL SEQ | vL SEQ | vH SEQ | vH-SEQ | DNA | scFv- |
| TARGET | ID NO | ID NO | ID NO | ID NO | SEQ ID | PRT |
| ANTIGEN | (DNA) | (PRT) | (DNA) | (PRT) | NO | SEQ ID |
| ALK | 46 | 2440 | 288 | 2682 | 530 | 2924 |
| ALK | 47 | 2441 | 289 | 2683 | 531 | 2925 |
| BCMA | 48 | 2442 | 290 | 2684 | 532 | 2926 |
| BCMA | 49 | 2443 | 291 | 2685 | 533 | 2927 |
| CD123 | 50 | 2444 | 292 | 2686 | 534 | 2928 |
| CD138 | 51 | 2445 | 293 | 2687 | 535 | 2929 |
| CD179b | 52 | 2446 | 294 | 2688 | 536 | 2930 |
| CD19 | 53 | 2447 | 295 | 2689 | 537 | 2931 |
| CD19 | 54 | 2448 | 296 | 2690 | 538 | 2932 |
| CD19 | 55 | 2449 | 297 | 2691 | 539 | 2933 |
| CD20 | 56 | 2450 | 298 | 2692 | 540 | 2934 |
| CD20 | 57 | 2451 | 299 | 2693 | 541 | 2935 |
| CD22 | 58 | 2452 | 300 | 2694 | 542 | 2936 |
| CD276 | 59 | 2453 | 301 | 2695 | 543 | 2937 |
| CD30 | 60 | 2454 | 302 | 2696 | 544 | 2938 |
| CD30 | 61 | 2455 | 303 | 2697 | 545 | 2939 |
| CD32 | 62 | 2456 | 304 | 2698 | 546 | 2940 |
| CD324 | 63 | 2457 | 305 | 2699 | 547 | 2941 |
| CD324 | 64 | 2458 | 306 | 2700 | 548 | 2942 |
| CD33b | 65 | 2459 | 307 | 2701 | 549 | 2943 |
| CD33 | 66 | 2460 | 308 | 2702 | 550 | 2944 |
| CD34 | 67 | 2461 | 309 | 2703 | 551 | 2945 |
| CD5 | 68 | 2462 | 310 | 2704 | 552 | 2946 |
| CD5 | 69 | 2463 | 311 | 2705 | 553 | 2947 |
| CD70 | 70 | 2464 | 312 | 2706 | 554 | 2948 |
| CD79b | 71 | 2465 | 313 | 2707 | 555 | 2949 |
| CD79b | 72 | 2466 | 314 | 2708 | 556 | 2950 |
| CDH17 | 73 | 2467 | 315 | 2709 | 557 | 2951 |
| CDH19 | 74 | 2468 | 316 | 2710 | 558 | 2952 |
| CDH6 | 75 | 2469 | 317 | 2711 | 559 | 2953 |
| CDH6 | 76 | 2470 | 318 | 2712 | 560 | 2954 |
| CLEC5A | 77 | 2471 | 319 | 2713 | 561 | 2955 |
| CLEC5A | 78 | 2472 | 320 | 2714 | 562 | 2956 |
| CLL1 | 79 | 2473 | 321 | 2715 | 563 | 2957 |
| CLL1 | 80 | 2474 | 322 | 2716 | 564 | 2958 |
| CS1/SLAMF7 | 81 | 2475 | 323 | 2717 | 565 | 2959 |
| CS1/SLAMF7 | 82 | 2476 | 324 | 2718 | 566 | 2960 |
| CSF2RA | 83 | 2477 | 325 | 2719 | 567 | 2961 |
| CSF2RA | 84 | 2478 | 326 | 2720 | 568 | 2962 |
| DLL3 | 85 | 2479 | 327 | 2721 | 569 | 2963 |
| DLL3 | 86 | 2480 | 328 | 2722 | 570 | 2964 |
| EGFR | 87 | 2481 | 329 | 2723 | 571 | 2965 |
| EGFRviii | 88 | 2482 | 330 | 2724 | 572 | 2966 |
| EpCAM | 89 | 2483 | 331 | 2725 | 573 | 2967 |
| EpCAM | 90 | 2484 | 332 | 2726 | 574 | 2968 |
| FLT3 | 91 | 2485 | 333 | 2727 | 575 | 2969 |
| HIV1-gp | 92 | 2486 | 334 | 2728 | 576 | 2970 |
| FR-1 | 93 | 2487 | 335 | 2729 | 577 | 2971 |
| GD2 | 94 | 2488 | 336 | 2730 | 578 | 2972 |
| GD2 | 95 | 2489 | 337 | 2731 | 579 | 2973 |
| GD3 | 96 | 2490 | 338 | 2732 | 580 | 2974 |
| GFR4 | 97 | 2491 | 339 | 2733 | 581 | 2975 |
| GM1 | 98 | 2492 | 340 | 2734 | 582 | 2976 |
| GPRC5D | 99 | 2493 | 341 | 2735 | 583 | 2977 |
| GPRC5D | 100 | 2494 | 342 | 2736 | 584 | 2978 |
| Her2 | 101 | 2495 | 343 | 2737 | 585 | 2979 |
| HIV1-gp100 | 102 | 2496 | 344 | 2738 | 586 | 2980 |
| HIV1-gp100 | 103 | 2497 | 345 | 2739 | 587 | 2981 |
| IL11Ra | 104 | 2498 | 346 | 2740 | 588 | 2982 |
| IL13Ra2 | 105 | 2499 | 347 | 2741 | 589 | 2983 |
| IL13Ra2 | 106 | 2500 | 348 | 2742 | 590 | 2984 |
| L1CAM | 107 | 2501 | 349 | 2743 | 591 | 2985 |
| LAMP1 | 108 | 2502 | 350 | 2744 | 592 | 2986 |
| LAMP1 | 109 | 2503 | 351 | 2745 | 593 | 2987 |
| Lym1 | 110 | 2504 | 352 | 2746 | 594 | 2988 |
| Lym2 | 111 | 2505 | 353 | 2747 | 595 | 2989 |
| MPL/TPO-R | 112 | 2506 | 354 | 2748 | 596 | 2990 |
| MPL/TPO-R | 113 | 2507 | 355 | 2749 | 597 | 2991 |
| MPL/TPO-R | 114 | 2508 | 356 | 2750 | 598 | 2992 |
| MPL/TPO-R | 115 | 2509 | 357 | 2751 | 599 | 2993 |
| TCRB1 | 116 | 2510 | 358 | 2752 | 600 | 2994 |
| TCRB1 | 117 | 2511 | 359 | 2753 | 601 | 2995 |
| TCRB2 | 118 | 2512 | 360 | 2754 | 602 | 2996 |
| TCRB2 | 119 | 2513 | 361 | 2755 | 603 | 2997 |
| TCRgd | 120 | 2514 | 362 | 2756 | 604 | 2998 |
| TnAg | 121 | 2515 | 363 | 2757 | 605 | 2999 |
| Tn-Muc1 | 122 | 2516 | 364 | 2758 | 606 | 3000 |
| TROP2 | 123 | 2517 | 365 | 2759 | 607 | 3001 |
| WT1/HLA-A2 | 124 | 2518 | 366 | 2760 | 608 | 3002 |
| WT1/HLA-A2 | 125 | 2519 | 367 | 2761 | 609 | 3003 |
| WT1/HLA-A2 | 126 | 2520 | 368 | 2762 | 610 | 3004 |
| CD123 | 127 | 2521 | 369 | 2763 | 611 | 3005 |
| CDH19 | 128 | 2522 | 370 | 2764 | 612 | 3006 |
| FRbeta | 129 | 2523 | 371 | 2765 | 613 | 3007 |
| B7J4 | 130 | 2524 | 372 | 2766 | 614 | 3008 |
| B7H4 | 131 | 2525 | 373 | 2767 | 615 | 3009 |
| CD23 | 132 | 2526 | 374 | 2768 | 616 | 3010 |
| GCC | 133 | 2527 | 375 | 2769 | 617 | 3011 |
| CD200R | 134 | 2528 | 376 | 2770 | 618 | 3012 |
| AFP/HLA-A2 | 135 | 2529 | 377 | 2771 | 619 | 3013 |
| AFP/HLA-A2 | 136 | 2530 | 378 | 2772 | 620 | 3014 |
| BCMA | 137 | 2531 | 379 | 2773 | 621 | 3015 |
| BCMA | 138 | 2532 | 380 | 2774 | 622 | 3016 |
| BCMA | 139 | 2533 | 381 | 2775 | 623 | 3017 |
| CD123 | 140 | 2534 | 382 | 2776 | 624 | 3018 |
| CD123 | 141 | 2535 | 383 | 2777 | 625 | 3019 |
| CD123 | 142 | 2536 | 384 | 2778 | 626 | 3020 |
| CD123 | 143 | 2537 | 385 | 2779 | 627 | 3021 |
| CD123 | 144 | 2538 | 386 | 2780 | 628 | 3022 |
| CD123 | 145 | 2539 | 387 | 2781 | 629 | 3023 |
| CD19 | 146 | 2540 | 388 | 2782 | 630 | 3024 |
| CD19 | 147 | 2541 | 389 | 2783 | 631 | 3025 |
| CD19 | 148 | 2542 | 390 | 2784 | 632 | 3026 |
| CD19 | 149 | 2543 | 391 | 2785 | 633 | 3027 |
| CD20 | 150 | 2544 | 392 | 2786 | 634 | 3028 |
| CD20 | 151 | 2545 | 393 | 2787 | 635 | 3029 |
| CD33 | 152 | 2546 | 394 | 2788 | 636 | 3030 |
| CD99 | 153 | 2547 | 395 | 2789 | 637 | 3031 |
| CLL1 | 154 | 2548 | 396 | 2790 | 638 | 3032 |
| CLL1 | 155 | 2549 | 397 | 2791 | 639 | 3033 |
| CLL1 | 156 | 2550 | 398 | 2792 | 640 | 3034 |
| CLL1 | 157 | 2551 | 399 | 2793 | 641 | 3035 |
| FITC | 158 | 2552 | 400 | 2794 | 642 | 3036 |
| FITC | 159 | 2553 | 401 | 2795 | 643 | 3037 |
| GPRC5D | 160 | 2554 | 402 | 2796 | 644 | 3038 |
| GPRC5D | 161 | 2555 | 403 | 2797 | 645 | 3039 |
| HLA-A2 | 162 | 2556 | 404 | 2798 | 646 | 3040 |
| Kappa-LC | 163 | 2557 | 405 | 2799 | 647 | 3041 |
| CD19 | 164 | 2558 | 406 | 2800 | 648 | 3042 |
| Streptag | 165 | 2559 | 407 | 2801 | 649 | 3043 |
| BCMA | 166 | 2560 | 408 | 2802 | 650 | 3044 |
| BCMA | 167 | 2561 | 409 | 2803 | 651 | 3045 |
| MPL/TPO-R | 168 | 2562 | 410 | 2804 | 652 | 3046 |
| CD22 | 169 | 2563 | 411 | 2805 | 653 | 3047 |
| CD22 | 170 | 2564 | 412 | 2806 | 654 | 3048 |
| CD22 | 171 | 2565 | 413 | 2807 | 655 | 3049 |
| CD22 | 172 | 2566 | 414 | 2808 | 656 | 3050 |
| CD22 | 173 | 2567 | 415 | 2809 | 657 | 3051 |
| MPL/TPO-R | 174 | 2568 | 416 | 2810 | 658 | 3052 |
| MPL/TPO-R | 175 | 2569 | 417 | 2811 | 659 | 3053 |
| CD179a | 176 | 2570 | 418 | 2812 | 660 | 3054 |
| CD179a | 177 | 2571 | 419 | 2813 | 661 | 3055 |
| CD22 | 178 | 2572 | 420 | 2814 | 662 | 3056 |
| STEAP1 | 179 | 2573 | 421 | 2815 | 663 | 3057 |
| Liv1 | 180 | 2574 | 422 | 2816 | 664 | 3058 |
| Nectin4 | 181 | 2575 | 423 | 2817 | 665 | 3059 |
| CRIPTO | 182 | 2576 | 424 | 2818 | 666 | 3060 |
| gpA33 | 183 | 2577 | 425 | 2819 | 667 | 3061 |
| ROR1 | 184 | 2578 | 426 | 2820 | 668 | 3062 |
| BCMA | 185 | 2579 | 427 | 2821 | 669 | 3063 |
| CLL1 | 186 | 2580 | 428 | 2822 | 670 | 3064 |
| CLL1 | 187 | 2581 | 429 | 2823 | 671 | 3065 |
| FLT3 | 188 | 2582 | 430 | 2824 | 672 | 3066 |
| FLT3 | 189 | 2583 | 431 | 2825 | 673 | 3067 |
| IL1RAP | 190 | 2584 | 432 | 2826 | 674 | 3068 |
| IL1RAP | 191 | 2585 | 433 | 2827 | 675 | 3069 |
| IL1RAP | 192 | 2586 | 434 | 2828 | 676 | 3070 |
| MSLN | 193 | 2587 | 435 | 2829 | 677 | 3071 |
| MSLN | 194 | 2588 | 436 | 2830 | 678 | 3072 |
| BST1 | 195 | 2589 | 437 | 2831 | 679 | 3073 |
| BST1 | 196 | 2590 | 438 | 2832 | 680 | 3074 |
| BST1 | 197 | 2591 | 439 | 2833 | 681 | 3075 |
| CD19 | 198 | 2592 | 440 | 2834 | 682 | 3076 |
| CD22 | 199 | 2593 | 441 | 2835 | 683 | 3077 |
| CD70 | 200 | 2594 | 442 | 2836 | 684 | 3078 |
| BCMA | 201 | 2595 | 443 | 2837 | 685 | 3079 |
| Her2 | 202 | 2596 | 444 | 2838 | 686 | 3080 |
| Her2 | 203 | 2597 | 445 | 2839 | 687 | 3081 |
| Her2 | 204 | 2598 | 446 | 2840 | 688 | 3082 |
| Her2 | 205 | 2599 | 447 | 2841 | 689 | 3083 |
| MSLN | 206 | 2600 | 448 | 2842 | 690 | 3084 |
| MSLN | 207 | 2601 | 449 | 2843 | 691 | 3085 |
| EGFRviii | 208 | 2602 | 450 | 2844 | 692 | 3086 |
| EGFRviii | 209 | 2603 | 451 | 2845 | 693 | 3087 |
| DLL3 | 210 | 2604 | 452 | 2846 | 694 | 3088 |
| DLL3 | 211 | 2605 | 453 | 2847 | 695 | 3089 |
| Nectin4 | 212 | 2606 | 454 | 2848 | 696 | 3090 |
| MSLN | 213 | 2607 | 455 | 2849 | 697 | 3091 |
| MSLN | 214 | 2608 | 456 | 2850 | 698 | 3092 |
| MSLN | 215 | 2609 | 457 | 2851 | 699 | 3093 |
| PRLR | 216 | 2610 | 458 | 2852 | 700 | 3094 |
| EMR2 | 217 | 2611 | 459 | 2853 | 701 | 3095 |
| CEA | 218 | 2612 | 460 | 2854 | 702 | 3096 |
| Her3 | 219 | 2613 | 461 | 2855 | 703 | 3097 |
| FOLR1 | 220 | 2614 | 462 | 2856 | 704 | 3098 |
| FOLR1 | 221 | 2615 | 463 | 2857 | 705 | 3099 |
| CLDN6 | 222 | 2616 | 464 | 2858 | 706 | 3100 |
| CLDN6 | 223 | 2617 | 465 | 2859 | 707 | 3101 |
| SLC34A2 | 224 | 2618 | 466 | 2860 | 708 | 3102 |
| CD22 | 225 | 2619 | 467 | 2861 | 709 | 3103 |
| CD22 | 226 | 2620 | 468 | 2862 | 710 | 3104 |
| BCMA | 227 | 2621 | 469 | 2863 | 711 | 3105 |
| CD22 | 228 | 2622 | 470 | 2864 | 712 | 3106 |
| CD19 | 229 | 2623 | 471 | 2865 | 713 | 3107 |
| BCMA | 230 | 2624 | 472 | 2866 | 714 | 3108 |
| MPL/TPO-R | 231 | 2625 | 473 | 2867 | 715 | 3109 |
| BAFFR | 232 | 2626 | 474 | 2868 | 716 | 3110 |
| BAFFR | 233 | 2627 | 475 | 2869 | 717 | 3111 |
| BAFFR | 234 | 2628 | 476 | 2870 | 718 | 3112 |
| BCMA | 235 | 2629 | 477 | 2871 | 719 | 3113 |
| BCMA | 236 | 2630 | 478 | 2872 | 720 | 3114 |
| BCMA | 237 | 2631 | 479 | 2873 | 721 | 3115 |
| BCMA | 238 | 2632 | 480 | 2874 | 722 | 3116 |
| BCMA | 239 | 2633 | 481 | 2875 | 723 | 3117 |
| BCMA | 240 | 2634 | 482 | 2876 | 724 | 3118 |
| BCMA | 241 | 2635 | 483 | 2877 | 725 | 3119 |
| BCMA | 242 | 2636 | 484 | 2878 | 726 | 3120 |
| BCMA | 243 | 2637 | 485 | 2879 | 727 | 3121 |
| BCMA | 244 | 2638 | 486 | 2880 | 728 | 3122 |
| BCMA | 245 | 2639 | 487 | 2881 | 729 | 3123 |
| BCMA | 246 | 2640 | 488 | 2882 | 730 | 3124 |
| BCMA | 247 | 2641 | 489 | 2883 | 731 | 3125 |
| BCMA | 248 | 2642 | 490 | 2884 | 732 | 3126 |
| ROR1 | 249 | 2643 | 491 | 2885 | 733 | 3127 |
| ROR1 | 250 | 2644 | 492 | 2886 | 734 | 3128 |
| ROR1 | 251 | 2645 | 493 | 2887 | 735 | 3129 |
| CD20 | 252 | 2646 | 494 | 2888 | 736 | 3130 |
| Her2 | 253 | 2647 | 495 | 2889 | 737 | 3131 |
| CD19 | 254 | 2648 | 496 | 2890 | 738 | 3132 |
| CEA | 255 | 2649 | 497 | 2891 | 739 | 3133 |
| Her2 | 256 | 2650 | 498 | 2892 | 740 | 3134 |
| Her2 | 257 | 2651 | 499 | 2893 | 741 | 3135 |
| TOSO | 258 | 2652 | 500 | 2894 | 742 | 3136 |
| CD30 | 259 | 2653 | 501 | 2895 | 743 | 3137 |
| CD229 | 260 | 2654 | 502 | 2896 | 744 | 3138 |
| CD229 | 261 | 2655 | 503 | 2897 | 745 | 3139 |
| CD229 | 262 | 2656 | 504 | 2898 | 746 | 3140 |
| CD229 | 263 | 2657 | 505 | 2899 | 747 | 3141 |
| EBV-gp350 | 264 | 2658 | 506 | 2900 | 748 | 3142 |
| EBV-gp350 | 265 | 2659 | 507 | 2901 | 749 | 3143 |
| INFL-NA | 266 | 2660 | 508 | 2902 | 750 | 3144 |
| EBV-LMP1 | 267 | 2661 | 509 | 2903 | 751 | 3145 |
| PSMA | 268 | 2662 | 510 | 2904 | 752 | 3146 |
| PSMA | 269 | 2663 | 511 | 2905 | 753 | 3147 |
| PSMA | 270 | 2664 | 512 | 2906 | 754 | 3148 |
| PSMA | 271 | 2665 | 513 | 2907 | 755 | 3149 |
| PSMA | 272 | 2666 | 514 | 2908 | 756 | 3150 |
| MUC1 | 273 | 2667 | 515 | 2909 | 757 | 3151 |
| MUC1 | 274 | 2668 | 516 | 2910 | 758 | 3152 |
| MUC1 | 275 | 2669 | 517 | 2911 | 759 | 3153 |
| gpA33 | 276 | 2670 | 518 | 2912 | 760 | 3154 |
| MSLN | 277 | 2671 | 519 | 2913 | 761 | 3155 |
| MSLN | 278 | 2672 | 520 | 2914 | 762 | 3156 |
| MSLN | 279 | 2673 | 521 | 2915 | 763 | 3157 |
| MSLN | 280 | 2674 | 522 | 2916 | 764 | 3158 |
| MSLN | 281 | 2675 | 523 | 2917 | 765 | 3159 |
| MSLN | 282 | 2676 | 524 | 2918 | 766 | 3160 |

TABLE 4

| | | SEQ | SEQ | | SEQ | SEQ |
|---|---|---|---|---|---|---|
| TARGET | Va/Vd | ID NO | ID NO | Vb/Vg | ID NO | ID NO |
| ANTIGEN | NAME | (DNA) | (PRT) | NAME | (DNA) | (PRT) |
| MR1 | MC7G5Va | 963 | 3357 | MC7G5Vb | 964 | 3358 |
| NY-ESO-1/ | NY-ESO- | 965 | 3359 | NY-ESO- | 966 | 3360 |
| HLA-A2 | 1-IG4-Va | | | 1-IG4-Vb | | |
| CMV-pp65/ | CMV- | 967 | 3361 | CMV- | 968 | 3362 |
| HLA-A2 | pp65-Va | | | pp65- | | |
| | | | | TCR1-Vb | | |
| | TCR-Vd2 | 969 | 3363 | TCR-Vg9 | 970 | 3364 |

TABLE 5

| Target Antigen | SEQ ID NO (DNA) | SEQ ID NO (PRT) |
|---|---|---|
| CEA | 816 | 3210 |
| CEA | 817 | 3211 |
| CD20 × CD22 | 818 | 3212 |
| CD20 | 819 | 3213 |
| PSMA | 820 | 3214 |
| PSMA | 821 | 3215 |
| PSMA | 822 | 3216 |
| PSMA | 823 | 3217 |
| CD38 | 824 | 3218 |
| CD38 | 825 | 3219 |
| CD38 | 826 | 3220 |
| BCMA | 827 | 3221 |
| BCMA | 828 | 3222 |
| CD22 × BCMA | 829 | 3223 |
| PSMA | 830 | 3224 |
| PSMA | 831 | 3225 |
| PSMA | 832 | 3226 |
| PSMA | 833 | 3227 |
| CD19 | 834 | 3228 |
| CD20 | 835 | 3229 |
| CD19 | 836 | 3230 |
| CD19 | 837 | 3231 |
| CD19 | 838 | 3232 |
| CD19 | 839 | 3233 |
| CD20 | 840 | 3234 |
| CD20 | 841 | 3235 |
| CD22 | 842 | 3236 |
| CD22 | 843 | 3237 |
| CD22 | 844 | 3238 |
| CD38 | 845 | 3239 |
| CD38 | 846 | 3240 |
| CD38 | 847 | 3241 |
| CD38 | 848 | 3242 |
| CD38 | 849 | 3243 |
| CEA | 850 | 3244 |
| CEA | 851 | 3245 |
| BCMA | 852 | 3246 |
| BCMA | 853 | 3247 |
| BCMA | 854 | 3248 |
| BCMA | 855 | 3249 |
| BCMA | 856 | 3250 |
| BCMA | 857 | 3251 |
| BCMA | 858 | 3252 |
| Muc16 | 859 | 3253 |
| Muc16 | 860 | 3254 |
| Muc16 | 861 | 3255 |
| IL13Ra2 | 862 | 3256 |
| IL13Ra2 | 863 | 3257 |
| Her2 | 864 | 3258 |
| Her2 | 865 | 3259 |
| Her2 | 866 | 3260 |
| Her3 | 867 | 3261 |
| Her3 | 868 | 3262 |
| CEA | 869 | 3263 |
| CEA | 870 | 3264 |
| EGFR | 871 | 3265 |
| EGFR | 872 | 3266 |
| cMet | 873 | 3267 |
| CXCR4 | 874 | 3268 |
| CXCR4 | 875 | 3269 |
| MSLN | 876 | 3270 |
| MSLN | 877 | 3271 |
| Albumin | 878 | 3272 |
| CD123 | 879 | 3273 |
| CD123 | 880 | 3274 |
| IL6R | 881 | 3275 |
| EGFR and CEA | 882 | 3276 |
| EGFR and CEA | 883 | 3277 |
| Her2 and Her2 | 884 | 3278 |
| Her2 and Her2 | 885 | 3279 |
| Her3 and Her2 | 886 | 3280 |
| cMET and Her3 | 887 | 3281 |
| MSLN | 888 | 3282 |
| BCMA | 889 | 3283 |
| BCMA | 890 | 3284 |
| BCMA | 891 | 3285 |
| CD38 | 892 | 3286 |
| BCMA | 893 | 3287 |
| CD38 and BCMA | 894 | 3288 |
| BCMA | 895 | 3289 |
| CD38 | 896 | 3290 |
| BCMA and CD38 | 897 | 3291 |
| CD19 | 898 | 3292 |
| CD20 | 899 | 3293 |
| CD19 and CD20 | 900 | 3294 |
| BCMA | 901 | 3295 |
| BCMA | 902 | 3296 |

TABLE 13
Ig like Linker domain

| | SEQ ID | SEQ ID |
|---|---|---|
| Name of fragment | NO (DNA) | NO (PRT) |
| IgCL | 1142 | 3536 |
| IgG1-CH1 | 1143 | 3537 |
| IgG1-CH1-DeltaC | 1144 | 3538 |
| IgG1-CH1-Hinge | 1145 | 3539 |
| IgG1-CH1-v2 | 1146 | 3540 |
| IgG1-CH1-DeltaC-v2 | 1147 | 3541 |
| IgG1-CH1-Hinge-v2 | 1148 | 3542 |
| IgG2-0C-CH1 | 1149 | 3543 |
| IgG2-IC-CHI1 | 1150 | 3544 |
| IgG3-CHI1 | 1151 | 3545 |
| IgG4-CHI1 | 1152 | 3546 |
| IgAI-CHI1 | 1153 | 3547 |
| IgA2-CHI1 | 1154 | 3548 |
| IgD-CHI1 | 1155 | 3549 |
| IgE-CHI1 | 1156 | 3550 |
| IgM-CHI1 | 1157 | 3551 |
| TCRa-wt-opt-6ECD (TCRa-Ig1) | 1158 | 3552 |
| TCRa-wt-opt-7ECD (TCRa-Ig2) | 1159 | 3553 |
| TCRb-wt-opt-6ECD (TCRb-Ig1) | 1160 | 3554 |
| TCRb-wt-opt-ECD-7ECD (TCRb-Ig2) | 1161 | 3555 |
| TCRg-opt-6ECD (TCRg-Ig1) | 1162 | 3556 |
| TCRg-opt-7ECD (TCRg-Ig2) | 1163 | 3557 |
| TCRd-opt-6ECD (TCRd-Ig1) | 1164 | 3558 |
| TCRd-opt-ECD-7ECD (TCRd-Ig2) | 1165 | 3559 |
| TCRb-wt-opt-8ECD (TCRb-Ig3) | 1166 | 3560 |
| TCRa-wt-opt-8ECD (TCRa-Ig4) | 1167 | 3561 |
| TCRa-Ig-Like-C1-Domain-6MD (TCRa-Ig3) | 1168 | 3562 |
| TCRa-Ig-Like-C1-Domain (TCRa-Ig5) | 1169 | 3563 |
| TCRb-Ig-Like-C1-Domain-6MD (TCRb-Ig4) | 1170 | 3564 |
| TCRb-Ig-Like-C1-Domain (TCRb-Ig5) | 1171 | 3565 |
| TCRg-Ig-Like-C1-Domain-6MD (TCRg-Ig3) | 1172 | 3566 |
| TCRg-Ig-Like-C1-Domain (TCRg-Ig4) | 1173 | 3567 |
| TCRd-Ig-Like-C1-Domain (TCRd-Ig3) | 1174 | 3568 |
| TCRd-Ig-Like-C1-Domain-6MD (TCRd-Ig4) | 1175 | 3569 |

TABLE 18
Miscellaneous Domains

| | SEQ ID | SEQ ID |
|---|---|---|
| Name of fragment | NO (DNA) | NO (PRT) |
| CD3z-cytosolic-domain | 1206 | 3600 |
| CD3z-cytosolic-domain | 1207 | 3601 |
| 4-1BB-cytosolic-domain | 1208 | 3602 |
| hCD8-Hinge-TM | 1209 | 3603 |
| hCD8-Hinge-TM-BBz | 1210 | 3604 |
| hCD8TM-Hinge-BB | 1211 | 3605 |
| CD28-Hinge-TM-cytosolic-domain | 1212 | 3606 |
| CD3d-ECDTMCP-opt2 | 1213 | 3607 |
| CD3eECDTMCP-opt2 | 1214 | 3608 |
| CD3g-ECDTMCP-opt2 | 1215 | 3609 |
| CD3zECDTMCP-opt2 | 1216 | 3610 |
| CD3zECDTMCP-opt | 1090 | 3484 |
| CD28-CP-opt | 1091 | 3485 |
| 41BB-CP-opt | 1092 | 3486 |
| CD3e-CP-opt | 1093 | 3487 |
| CD3zECDTM-opt2 | 1094 | 3488 |
| CD3zCP-opt2 | 1095 | 3489 |
| CD3zECDTMCP-opt2 | 1096 | 3490 |
| CD28-CP-opt2 | 1097 | 3491 |
| 41BB-CP-opt2 | 1098 | 3492 |

TABLE 25
Novel SAR fragments

| | SEQ ID | SEQ ID |
|---|---|---|
| Name of fragment | NO (DNA) | NO (PRT) |
| DAP10-opt1 | 1349 | 3743 |
| DAP10-opt2 | 1350 | 3744 |
| CD3z-ECDTM-opt1 | 1351 | 3745 |
| CD3z-ECDTM-opt2 | 1352 | 3746 |
| mutCD3z-ECDTM-opt1 | 1353 | 3747 |
| mutCD3z-ECDTM-opt2 | 1354 | 3748 |
| OX40-CP-opt1 | 1355 | 3749 |
| OX40-CP-opt2 | 1356 | 3750 |
| CD3z-ECDTM-OX40-opt1 | 1357 | 3751 |
| CD3z-ECDTM-OX40-opt2 | 1358 | 3752 |
| mutCD3z-ECDTM-OX40-opt1 | 1359 | 3753 |
| mutCD3z-ECDTM-OX40-opt2 | 1360 | 3754 |
| DAP12-SP-Bam-DAP12-ECDTMCP-opt1 | 1361 | 3755 |
| DAP12-ECDTMCP-opt1 | 1362 | 3756 |
| DAP12-SP-Kpn-DAP12-ECDTMCP-opt2 | 1363 | 3757 |
| DAP12-ECDTMCP-opt2 | 1364 | 3758 |
| DAP12-SP-Bam-DAP12-C35S-ECDTMCP-opt1 | 1365 | 3759 |
| DAP12-C35S-ECDTMCP-opt1 | 1366 | 3760 |
| DAP12-SP-Kpn-DAP12-C35S-ECDTMCP-opt2 | 1367 | 3761 |
| DAP12-C35S-ECDTMCP-opt2 | 1368 | 3762 |
| NKp30-ECDTMCP-opt1 | 1369 | 3763 |
| NKp30-Hinge-TMCP-opt1 | 1370 | 3764 |
| NKp30-D1-opt1 | 1371 | 3765 |
| NKp30-Hinge-opt1 | 1372 | 3766 |
| NKp30-TM-opt1 | 1373 | 3767 |
| NKp30-CP-opt1 | 1374 | 3768 |
| NKp30-ECDTMCP-opt2 | 1375 | 3769 |
| NKp30-Hinge-TM-CP-opt2 | 1376 | 3770 |
| NKp30-D1-opt2 | 1377 | 3771 |
| NKp30-Hinge-opt2 | 1378 | 3772 |
| NKp30-TM-opt2 | 1379 | 3773 |
| NKp30-CP-opt2 | 1380 | 3774 |
| NKp44SP-Kpn-EcoR1-Xho-NKp44-ECDTMCP-opt1 | 1381 | 3775 |
| NKp44-ECDTMCP-opt1 | 1382 | 3776 |
| NKp44-Hinge-TM-CP-opt1 | 1383 | 3777 |
| Nkp44-Ig-opt1 | 1384 | 3778 |
| NKp44-Hinge-opt1 | 1385 | 3779 |
| NKp44-TM-opt1 | 1386 | 3780 |
| NKp44-CP-opt1 | 1387 | 3781 |
| NKp44SP2-Bam-Bst-Mlu-NKp44-ECDTMCP-opt2 | 1388 | 3782 |
| NKp44-ECDTMCP-opt2 | 1389 | 3783 |
| NKp44-Hinge-TM-CP-opt2 | 1390 | 3784 |
| Nkp44-Ig-opt2 | 1391 | 3785 |
| NKp44-Hinge-opt2 | 1392 | 3786 |
| NKp44-TM-opt2 | 1393 | 3787 |
| NKp44-CP-opt2 | 1394 | 3788 |
| NKp46-ECDTMCP-opt1 | 1395 | 3789 |
| NKp46-Linker-Ig1-Hinge-TM-CP-opt1 | 1396 | 3790 |
| NKp46-Ig1-Hinge-TM-CP-opt1 | 1397 | 3791 |
| NKp46-Hinge-TM-CP-opt1 | 1398 | 3792 |
| NKp46-Ig1-opt1 | 1399 | 3793 |
| NKp46-Linker-opt1 | 1400 | 3794 |
| NKp46-Ig2-opt1 | 1401 | 3795 |
| NKp46-Hinge-opt1 | 1402 | 3796 |
| NKp46-TM-opt1 | 1403 | 3797 |
| NKp46-CP-opt1 | 1404 | 3798 |
| NKp46-ECDTMCP-opt2 | 1405 | 3799 |
| NKp46-Linker-Ig1-Hinge-TM-CP-opt2 | 1406 | 3800 |
| NKp46-Ig1-Hinge-TM-CP-opt2 | 1407 | 3801 |
| NKp46-Hinge-TM-CP-opt2 | 1408 | 3802 |
| NKp46-Ig1-opt2 | 1409 | 3803 |
| NKp46-Linker-opt2 | 1410 | 3804 |
| NKp46-Ig2-opt2 | 1411 | 3805 |
| NKp46-Hinge-opt2 | 1412 | 3806 |
| NKp46-TM-opt2 | 1413 | 3807 |
| NKp46-CP-opt2 | 1414 | 3808 |
| CD16A-F158V-FL-v1 | 1415 | 3809 |
| CD16A-F158V-FL-v2 | 1416 | 3810 |
| CD16A-F158V-S197P-FL-v3 | 1417 | 3811 |
| FcRy-SP1-Bam-FcRy-ECDTMCP-opt1 | 1418 | 3812 |
| FcRy-ECDTMCP-opt1 | 1419 | 3813 |
| FcRy-SP2-Kpn-FcRy-ECDTMCP-opt2 | 1420 | 3814 |
| FcRy-ECDTMCP-opt2 | 1421 | 3815 |
| FcRy-SP1-Bam-FcRy-C24S-ECDTMCP-opt1 | 1422 | 3816 |
| FcRy-C24S-ECDTMCP-opt1 | 1423 | 3817 |
| FcRy-SP2-Kpn-FcRy-C24S-ECDTMCP-opt2 | 1424 | 3818 |
| FcRy-C24S-ECDTMCP-opt2 | 1425 | 3819 |
| mutCD3z-ECDTM-2B4CP-opt1 | 1426 | 3820 |
| 2B4CP-opt1 | 1427 | 3821 |
| mutCD3z-ECDTM-2B4CP-opt2 | 1428 | 3822 |
| 2B4CP-opt2 | 1429 | 3823 |
| CD8-hinge-NKG2D-TM-2B4CP-opt1 | 1430 | 3824 |
| CD8-Hinge-opt1 | 1431 | 3825 |
| NKG2D-TM-opt1 | 1432 | 3826 |
| 2B4CP-opt1 | 1433 | 3827 |
| CD8-hinge-NKG2D-TM-2B4CP-opt-2 | 1434 | 3828 |
| CD8-Hinge-opt2 | 1435 | 3829 |
| NKG2D-TM-opt2 | 1436 | 3830 |
| 2B4CP-opt2 | 1437 | 3831 |
| mutCD8-hinge-NKG2D-TM-2B4CP-opt-1 | 1438 | 3832 |
| mutCD8-hinge-opt-1 | 1439 | 3833 |
| mutCD8-hinge-NKG2D-TM-2B4CP-opt-2 | 1440 | 3834 |
| mutCD8-hinge-opt-2 | 1441 | 3835 |
| CD16A-F158V-D1-v1 | 1442 | 3836 |
| CD16A-F158V-D2-v1 | 1443 | 3837 |
| CD16A-F158V-D1-D2-linker-v1 | 1444 | 3838 |
| CD16A-F158V-D2-Minus-Linker-v1 | 1445 | 3839 |
| CD16A-F158V-Hinge-v1 | 1446 | 3840 |
| CD16A-F158V-TM-v1 | 1447 | 3841 |
| CD16A-F158V-cP-v1 | 1448 | 3842 |
| CD16-F158V-FL-TMCP-v1 | 1449 | 3843 |
| CD16-F158V-D2TMCP-v1 | 1450 | 3844 |
| CD16-F158V-Hinge-TM-CP-v1 | 1451 | 3845 |
| CD16A-F158V-D1-v3 | 1452 | 3846 |
| CD16A-F158V-D2-v3 | 1453 | 3847 |
| CD16A-F158V-D1-D2-linker-v3 | 1454 | 3848 |
| CD16A-F158V-D2-Minus-Linker-v3 | 1455 | 3849 |
| CD16A-F158V-Hinge-v3 | 1456 | 3850 |
| CD16A-F158V-TM-v3 | 1457 | 3851 |
| CD16A-F158V-cP-v3 | 1458 | 3852 |
| CD16-F158V-S197P-FL-TMCP-v3 | 1459 | 3853 |
| CD16-F158V-S197P-D2TMCP-v3 | 1460 | 3854 |
| CD16-F158V-S197P-Hinge-TM-CP-v3 | 1461 | 3855 |
| CD16A-F158V-D1-v2 | 1462 | 3856 |
| CD16A-F158V-D2-v2 | 1463 | 3857 |
| CD16A-F158V-D1-D2-linker-v2 | 1464 | 3858 |
| CD16A-F158V-D2-Minus-Linker-v2 | 1465 | 3859 |
| CD16A-F158V-Hinge-v2 | 1466 | 3860 |
| CD16A-F158V-TM-v2 | 1467 | 3861 |
| CD16A-F158V-CP-v2 | 1468 | 3862 |
| CD16-F158V-FL-TMCP-v2 | 1469 | 3863 |
| CD16-F158V-D2TMCP-v2 | 1470 | 3864 |
| CD16-F158V-Hinge-TM-CP-v2 | 1471 | 3865 |
| DNAM1-Hinge-TMCP-opt1 | 1472 | 3866 |
| DNAM1-Hinge-opt1 | 1473 | 3867 |
| DNAM1-TM-opt1 | 1474 | 3868 |
| DNAM1-CP-opt1 | 1475 | 3869 |
| DNAM1-Hinge-TMCP-opt2 | 1476 | 3870 |
| DNAM1-Hinge-opt2 | 1477 | 3871 |
| DNAM1-TM-opt2 | 1478 | 3872 |
| DNAM1-CP-opt2 | 1479 | 3873 |
| DNAM1-opt1 | 1480 | 3874 |
| DNAM1-Ig-Hinge-TM-CP-opt1 | 1481 | 3875 |
| DNAM1-opt2 | 1482 | 3876 |
| DNAM1-Ig-Hinge-TM-CP-opt2 | 1483 | 3877 |
| IL2Rb-hinge-TMCP | 1484 | 3878 |
| IL2Ry-Hinge-TMCP | 1485 | 3879 |
| 41BB-ECDTMCP-opt1 | 1573 | 3967 |
| 41BB-ECDTMCP-opt2 | 1574 | 3968 |
| CD28-ECDTMCP-opt1 | 1575 | 3969 |
| CD28-ECDTMCP-opt2 | 1576 | 3970 |
| OX40-ECDTMCP-opt1 | 1577 | 3971 |
| OX40-ECDTMCP-opt2 | 1578 | 3972 |
| 2B4-ECDTMCP-opt1 | 1579 | 3973 |
| 2B4-ECDTMCP-opt2 | 1580 | 3974 |
| CD32-ECDTMCP-opt1 | 1581 | 3975 |
| CD32-ECDTMCP-opt2 | 1582 | 3976 |
| CD64-ECDTMCP-opt1 | 1583 | 3977 |
| CD64-ECDTMCP-opt2 | 1584 | 3978 |

TABLE 34
SARs

| | SEQ ID | SEQ ID |
|---|---|---|
| Name of fragment | NO (DNA) | NO (PRT) |
| CD8SP-CD19-hu-mROO5-1-vL-Xho-IgCL-DAP10-opt1-F-P2A- | 2275 | 4669 |
| Spe-IgSP-Bst-CD19-hu-mROO5-1-vH-Mlu-Ig1CH1-DAP10-opt2- | | |
| F-F2A-Xba-PAC | | |
| CD8SP-hCD19-EUK-5-13-vL-IgCL-Bam-CD3zECDTMCP-opt-F- | 2276 | 4670 |
| P2A-Spe-SP-Bst-hCD19-EUK-5-13-vH-IgG1-CH1-Kpn-CD16A- | | |
| Hinge-TM-CP-F158V-F-P2A-Xba-PAC | | |
| CD8SP-hCD19-EUK-5-13-vL-IgCL-Bam-CD3zECDTMCP-opt-F- | 2277 | 4671 |
| P2A-Spe-SP-Bst-hCD19-EUK-5-13-vH-IgG1-CH1-KPN- | | |
| CD3zECDTMCP-opt2-F-F2A-Xba-PAC | | |
| CD8SP-CD19-hu-mROO5-1-vL-xho-IgCL-KPN-NC-D2GKN- | 2278 | 4672 |
| ECD-TM-CP-opt1-F-P2A-Spe-Bst-CD19-hu-mROO5-1-vH-Mlu- | | |
| Ig1CH1-Bam-NC-D2GKN-ECD-TM-CP-opt2-F-F2A-Xba-PAC | | |
| CD8SP-CD19-hu-mROO5-1-Mlu-CD8-hing-NKG2D-TM-2B4z-F- | 2279 | 4673 |
| P2A-CD3z-Xba-P2A-Bam-SynthK13-xho-Flag-Spe-F-P3A-Nde- | | |
| PAC | | |
| CD8SP-CD19-hu-mROO5-1-vL-xho-IgCL-KPN-NC-D2GKN- | 2280 | 4674 |
| ECD-TM-CP-opt1-F-P2A-Spe-Bst-CD19-hu-mROO5-1-vH-Mlu- | | |
| Hinge-TM-CP-NKp46-opt2-F-F2A-Xba-PAC | | |
| CD8SP-CD19-hu-mROO5-1-vL-Xho-NKp46-Hinge-TM-CP-opt1- | 2281 | 4675 |
| F-P2A-Spe-IgSP-Bst-CD19-hu-mROO5-1-vH-Mlu-NKp46-Hinge- | | |
| TM-CP-opt2-F-F2A-Xba-PAC | | |
| CD8SP-CD19-hu-mROO5-1-vL-Xho-CD16A-Hinge-TM-CP- | 2282 | 4676 |
| F158V-F-P2A-Spe-Bst-CD19-hu-mROO5-1-vH-Mlu-CD16A- | | |
| F158V-Hinge-TM-CP-v2-F-F2A-Xba-PAC | | |
| CD8SP-Sph-BCMA-FHVH93-Kpn-G4S-EcoR1-CD16A-F158V- | 2283 | 4677 |
| FL-F-P2A-Spe-IgHSP-Apa-CD20-VHH-USC1-2HC2D6-Bam- | | |
| G4S-Bst-CD16A-F158V-FL-v2-F2A-Xba-PAC | | |
| CD8SP-hu-mROO5-1-vL-xho-hTCRbECD-Bam- | 2287 | 4681 |
| CD3zECDTMCP-opt-F-P2A-SP-hu-mROO5-1-vH-Mlu- | | |
| hTCRaECD-Kpn-CD3zECDTMCP-opt2-F-F2A-PAC | | |
| CD8SP-hu-mROO5-1-vL-Xho-CD3zECDTMCP-opt-F-P2A-Spe- | 2288 | 4682 |
| SP-Bst-hu-mROO5-1-vH-Mlu-CD3zECDTMCP-opt2-F-F2A-PAC | | |
| CD8SP-hu-mROO5-1-vL-xho-IgCL-Bam-CD3zECDTMCP-opt-F- | 2289 | 4683 |
| P2A-SP-hu-mROO5-1-vH-Mlu-IgG1-CH1-Kpn-CD3zECDTMCP- | | |
| opt2-F-F2A-PAC | | |
| CD8-hCD19-EUK5-13-vL-IgCL-Bam-CD3zECDTMCP-opt-F- | 2290 | 4684 |
| P2A-Spe-SP-Bst-hCD19-EUK5-13-vH-IgG1-CH1-KPN- | | |
| CD3zECDTMCP-opt2-F-F2A-Xba-PAC | | |
| CD8-hCD19-EUK5-13-vL-IgCL-Xho-CD3zECDTMCP-opt-F- | 2291 | 4685 |
| P2A-Spe-SP-Bst-hCD19-EUK5-13-vH-IgG1-CH1-Mlu- | | |
| CD3zECDTMCP-opt2-F-F2A-PAC | | |
| CD8SP-hCD19-EUK-5-13-vL-IgCL-Xho-NKp30-ECDTMCP- | 2292 | 4686 |
| opt1-F-P2A-Spe-SP-Bst-hCD19-EUK-5-13-vH-IgG1-CH1-Mlu- | | |
| NKp30-ECDTMCP-opt2-F-F2A-Xba-PAC | | |
| CD8SP-CD19-hu-mROO5-1-vL-Xho-NKp30-ECDTMCP-opt1-F- | 2293 | 4687 |
| P2A-Spe-SP-Bst-CD19-hu-mROO5-1-vH-Mlu-NKp30- | | |
| ECDTMCP-opt2-F-F2A-Xba-PAC | | |
| CD8SP-Sph-BCMA-FHVH93-Kpn-G4S-EcoR1-NKp44-Hinge- | 2296 | 4690 |
| ECDTMCP-opt1-F-P2A-Spe-IgHSP-Apa-CD20-VHH-USC1- | | |
| 2HC2D6-Bam-G4S-Bst-NKp44-Hinge-ECDTMCP-opt2-F2A- | | |
| Xba-PAC | | |
| CD8SP-Sph-BCMA-FHVH93-Kpn-G4S-EcoR1-Xho-NKp30- | 2297 | 4691 |
| ECDTMCP-opt1-F-P2A-Spe-IgHSP-Apa-CD20-VHH-USC1- | | |
| 2HC2D6-Bam-G4S-Bst-Mlu-NKp30-ECDTMCP-opt2-F-F2A- | | |
| Xba-PAC | | |
| CD8-hCD19-EUK-5-13-vL-IgCL-Xho-NKp44-ECDTMCP-opt1- | 2298 | 4692 |
| F-P2A-Spe-SP-Bst-hCD19-EUK-5-13-vH-IgG1-CH1-Mlu-NKp44- | | |
| ECDTMCP-opt2-F-F2A-Xba-PAC | | |
| CD8SP-CD19-hu-mROO5-1-vL-Xho-NKp44-ECDTMCP-opt1-F- | 2299 | 4693 |
| P2A-Spe-IgSP-Bst-CD19-hu-mROO5-1-vH-Mlu-NKp44- | | |
| ECDTMCP-opt2-F-F2A-Xba-PAC | | |
| CD8SP-CD19-hu-mROO5-1-vL-Xho-NKp44-Hinge-TMCP-opt1- | 2300 | 4694 |
| F-P2A-Spe-IgSP-Bst-CD19-hu-mROO5-1-vH-Mlu-NKp44-Hinge- | | |
| TMCP-opt2-F-F2A-Xba-PAC | | |
| CD8SP-hu-mROO5-1-vL-xho-IgCL-Bam-NKp30-ECDTMCP- | 2301 | 4695 |
| opt1-F-P2A-SP-hu-mROO5-1-vH-Mlu-IgG1-CH1-Kpn- | | |
| CD3zECDTMCP-opt2-F-F2A-PAC | | |
| CD8SP-hu-mROO5-1-vL-xho-IgCL-Bam-NKp30-ECDTMCP- | 2302 | 4696 |
| opt1-F-P2A-SP-hu-mROO5-1-vH-Mlu-IgG1-CH1-Kpn-NKp30- | | |
| ECDTMCP-opt2-F-F2A-PAC | | |
| CD8SP-hu-mROO5-1-scFv-Myc-CD8TM-28z | 2303 | 4697 |
| CD8SP-hu-mROO5-1-scFv-Myc-CD8TM-BBz | 2304 | 4698 |
| CD8SP-hu-mROO5-1-vL-[hTCRb-S57C]-F-P2A-SP-hu-mROO5- | 2305 | 4699 |
| 1-vH-[hTCRa-T48C] | | |
| CD8SP-hu-mROO5-1-vL-IgCL-Bam-CD3zECDTMCP-opt-F- | 2306 | 4700 |
| P2A-Spe-SP-Bst-hu-mROO5-1-vH-IgG1-CH1-KPN- | | |
| CD3zECDTMCP | | |
| CD8SP-hu-mROO5-1-vL-CD3zECDTMCP-opt-F-P2A-Spe-SP- | 2307 | 4701 |
| Bst-hu-mROO5-1-vH-Mlu-CD3zECDTMCP-opt2 | | |
| CD8SP-hu-mROO5-1-vL-[hTCRbECD-Bam-CD3zECDTMCP- | 2308 | 4702 |
| opt]-F-P2A-SP-hu-mROO5-1-vH-[hTCRaECD-Kpn- | | |
| CD3zECDTMCP-opt2] | | |
| CD8SP-hu-mROO5-1-vL-[IgCL-TCRg-6MD]-F-P2A-SP-hu- | 2309 | 4703 |
| mROO5-1-vH-[IgG1-CH1-TCRd-6MD] | | |
| CD8SP-hu-mROO5-1-vL-[IgCL-TCRb-wt-opt2-6MD]-F-P2A-SP- | 2310 | 4704 |
| hu-mROO5-1-vH-[IgG1-CH1-TCRa-wt-op2-6MD] | | |
| CD8SP-hu-mROO5-1-scFv-CD3e-ECDTMCP-opt2 | 2311 | 4705 |
| CD8SP-hCD19-EUK-5-13-vL-IgCL-Bam-NKp46-Hinge-TM-CP- | 2312 | 4706 |
| opt2-F-F2A-Spe-SP-Bst-hCD19-EUK-5-13-vH-IgG1-CH1-Kpn- | | |
| NKp46-Hinge-TM-CP-opt1-F-P2A-Xba-PAC | | |
| CD8SP-hCD19-EUK-5-13-vL-IgCL-Bam-DAP10-opt1-Spe- | 2313 | 4707 |
| CD3zCP-opt1-F-P2A-dSPE-IgSP-Bst-hCD19-EUK-5-13-vH-IgG1- | | |
| CH1-Kpn-DAP10-opt2-Xba-CD3zCP-opt2-F-F2A-dXba-Nde-PAC | | |
| CD8SP-Sph-BCMA-FHVH93-Kpn-G4S-EcoR1-CD16A-F158A- | 2314 | 4708 |
| FL-F-P2A-Spe-IgHSP-Apa-CD20-VHH-USC1-2HC2D6-Bam- | | |
| G4S-Bst-CD19-hu-mROO5-1-vH-Mlu-[hTCRa-T48C-opt]-F-F2A- | | |
| Xba-PAC | | |
| CD8SP-Sph-BCMA-FHVH93-Kpn-G4S-EcoR1-CD16A-F158A- | 2315 | 4709 |
| D2TMCP-v1-F-P2A-Spe-IgHSP-Apa-CD20-VHH-USC1- | | |
| 2HC2D6-Bam-G4S-Bst-CD19-hu-mROO5-1-vH-Mlu-[hTCRa- | | |
| T48C-opt]-F-F2A-Xba-PAC | | |
| CD8SP-Sph-BCMA-FHVH93-Kpn-CD16-V158A-D2TMCP-v1-F- | 2316 | 4710 |
| P2A-Spe-IgHSP-Apa-CD20-VHH-USC1-2HC2D6-Bam-G4S-Bst- | | |
| CD19-hu-mROO5-1-vH-Mlu-[hTCRa-T48C-opt]-F-F2A-Xba-PAC | | |
| CD8SP-Sph-BCMA-FHVH93-Kpn-G4S-EcoR1-CD16-V158A- | 2317 | 4711 |
| D2TMCP-v1-F-P2A-SpeXba-PAC | | |
| IgHSP-Apa-CD20-VHH-USC1-2HC2D6-Bam-G4S-Bst-CD16A- | 2318 | 4712 |
| F158V-FL-v2-F2A-Xba-PAC | | |
| CD8SP-CD19-hu-mROO5-1-vL-Xho-NKp30-ECDTMCP-opt1-F- | 2319 | 4713 |
| P2A-Spe-IgSP-Bst-CD19-hu-mROO5-1-vH-Mlu-NKp46-Hinge- | | |
| TM-CP-opt2-F-F2A-Xba-PAC | | |
| CD8SP-Sph-BCMA-FHVH93-Kpn-G4S-EcoR1-NKp44-Hinge- | 2320 | 4714 |
| ECDTMCP-opt1-F-P2A-Spe-IgHSP-Apa-CD20-VHH-USC1- | | |
| 2HC2D6-Bam-G4S-Bst-CD16A-v158-FL-v2-F2A-Xba-PAC | | |
| CD8-hCD19-EUK-5-13-vL-IgCL-Xho-NKp44-ECDTMCP-opt1- | 2321 | 4715 |
| F-P2A-Spe-SP-Bst-hCD19-EUK-5-13-vH-IgG1-CH1-Mlu- | | |
| CD3zECDTMCP-opt2-F-F2A-PAC | | |
| CD8SP-Sph-BCMA-FHVH93-Kpn-CD16-V158A-D2TMCP-v1-F- | 2322 | 4716 |
| P2A-Spe-IgHSP-Apa-CD20-VHH-USC1-2HC2D6-Bam-CD16- | | |
| F158V-S197P-D2TMCP-v3-F-F2A-Xba-PAC | | |
| CD8-hCD19-EUK-5-13-vL-IgCL-Xho-NKp30-Hinge-TMCP-opt1- | 2323 | 4717 |
| F-P2A-Spe-SP-Bst-hCD19-EUK-5-13-vH-IgG1-CH1-Mlu- | | |
| CD3zECDTMCP-opt2-F-F2A-PAC | | |
| CD8-hCD19-EUK-5-13-vL-IgCL-Xho-NKp44-Hinge-TMCP-opt1- | 2324 | 4718 |
| F-P2A-Spe-SP-Bst-hCD19-EUK-5-13-vH-IgG1-CH1-Mlu- | | |
| CD3zECDTMCP-opt2-F-F2A-PAC | | |
| CD8SP-Sph-NKp30-Ig-Hinge-opt1-Xho-[hTCRb-S57C]-F-P2A- | 2325 | 4719 |
| Spe-IgHSP-Apa-CD20-VHH-USC1-2HC2D6-Bam-G4S-Bst- | | |
| CD19-hu-mROO5-1-vH-Mlu-[hTCRa-T48C-opt]-F-F2A-Xba-PAC | | |
| hCD19-EUK-5-13-vL-IgCL-Bam-CD8-hinge-NKG2D-TM-2B4- | 2326 | 4720 |
| CP-opt-1-Spe-CD3zCP-opt1-F-P2A-dSPE-IgSP-Bst-hCD19-EUK- | | |
| 5-13-vH-IgG1-CH1-Kpn-DAP10-opt2-Xba-CD3zCP-opt2-F-F2A- | | |
| dXba-Nde-PAC | | |
| CD8SP-CD19-hu-mROO5-1-vL-Xho-NKp44-ECDTMCP-opt1-F- | 2327 | 4721 |
| P2A-Spe-IgSP-Bst-CD19-hu-mROO5-1-vH-Mlu-NKp46-Hinge- | | |
| TM-CP-opt2-F-F2A-Xba-PAC | | |
| CD8SP-CD20-VHH-USC1-CD64-ECD-opt1-CD16A-TMCP-v3 | 2328 | 4722 |

TABLE 40
Miscellaneous Constructs

| | SEQ ID | SEQ ID |
|---|---|---|
| Name of fragment | NO (DNA) | NO (PRT) |
| CD8SP-BCMA-FHVH93-GS-ULBP2R | 5131 | 5431 |
| CD8SP-BCMA-FHVH93-GS-ULBP2-S3 | 5132 | 5432 |
| | 5133 | 5433 |
| CD8SP-FMC63-vL-[hTCRbECD-Bam-CD3zECDTMCP-opt]-F- | 5134 | 5434 |
| P2A-SP-FMC63-vH-[hTCRaECD-Kpn-CD3zECDTMCP-opt2]-F- | | |
| F2A-PAC | | |
| CD8SP-FMC63-vL-[hTCRb-KAC-ECD-Bam-CD3zECDTMCP- | 5135 | 5435 |
| opt]-F-P2A-SP-FMC63-vH-[hTCRa-CSDVP-ECD-Kpn- | | |
| CD3zECDTMCP-opt2]-F-F2A-PAC | | |
| CD8SP-FMC63-vL-V5-[hTCRbECD-Bam-CD3zECDTMCP-opt]- | 5136 | 5436 |
| F-P2A-SP-FMC63-vH-Myc-[hTCRaECD-Kpn-CD3zECDTM-28z- | | |
| opt2]-F-F2A-PAC | | |
| CD8SP-FMC63-vL-V5-[hTCRbECD-Bam-CD3zECDTM-BBz- | 5137 | 5437 |
| opt]-F-P2A-SP-FMC63-vH-Myc4-[hTCRaECD-Kpn- | | |
| CD3zECDTM-BBz-opt2]-F-F2A-PAC | | |
| CD8SP-FMC63-vL-V5-[hTCRbECD-Bam-CD3zECDTM-28z- | 5138 | 5438 |
| opt]-F-P2A-SP-FMC63-vH-Myc-[hTCRaECD-Kpn- | | |
| CD3zECDTM-28z-opt2]-F-F2A-PAC | | |
| CD8SP-CD19-hu-mROO5-vL-[hTCRb-KAC-ECD-Bam- | 5139 | 5439 |
| CD3zECDTMCP-opt]-F-F2A-SP-CD19-hu-mROO5-vH-[hTCRa- | | |
| CSDVP-ECD-Kpn-CD3zECDTMCP-opt2]-F-F2A-PAC | | |
| CD8SP-CD19-hu-mROO5-1-scFv-Myc-BBz-T2A-PAC | 5140 | 5440 |
| CD8SP-FMC63-scFv-Myc-BBz-T2A-PAC | 5141 | 5441 |

TABLE 43

| | SEQ ID | SEQ ID |
|---|---|---|
| Name of fragment | NO (DNA) | NO (PRT) |
| Synth-IL2-Nde-tBCMA-L244 | 7117 | 7810 |
| IgH-SP1-tBCMA-L244 | 7118 | 7811 |
| HSV1-Tk | 7119 | 7812 |
| Turkey-HSV2-Tk | 7120 | 7813 |
| MYR-FRB-FKBP-Nde-FADD-DED | 7121 | 7814 |
| MYR | 7122 | 7815 |
| FADD-DED | 7124 | 7816 |
| NKG2A-opt1 | 7125 | 7817 |
| CD94 | 7126 | 7818 |
| NKG2C | 7127 | 7819 |
| NKG2E | 7128 | 7820 |
| NKG2H | 7129 | 7821 |
| NKG2F | 7130 | 7822 |
| CD28-Hinge-TM | 7131 | 7823 |
| CD28-Hinge | 7132 | 7824 |
| hIL2-Mlu-SynthCD8TM | 7133 | 7825 |
| Synth-IL2m10-1-R38A-F42K-Q126A-Syth-CD28TM | 7134 | 7826 |
| Synth-IL2m4-R38E-F42A-SythCD28TM | 7135 | 7827 |
| Synth-IL2m4-1-R38E-F42A-I92A-SythCD28TM | 7136 | 7828 |
| Synth-IL2v-Roche-T3A-F42A-Y45A-L72G-C125A- | 7137 | 7829 |
| SythCD28TM | | |
| Synth-hIL15-E64K-SythCD28TM | 7138 | 7830 |
| Synth-hIL15-D8S-SythCD28TM | 7139 | 7831 |
| Synth-hIL15-L69R-SythCD28TM | 7140 | 7832 |
| Synth-IL2 | 7141 | 7833 |
| Synth-IL2m10-1-R38A-F42K-Q126A | 7142 | 7834 |
| Synth-IL2m4-R38E-F42A | 7143 | 7835 |
| Synth-IL2m4-1-R38E-F42A-I92A | 7144 | 7836 |
| Synth-IL2v-Roche-T3A-F42A-Y45A-L72G-C125A | 7145 | 7837 |
| hIL15 | 7146 | 7838 |
| hIL15-E64K | 7147 | 7839 |
| hIL15-D8S | 7148 | 7840 |
| hIL15-L69R | 7149 | 7841 |
| CD8SP-IL18 | 7150 | 7842 |
| Synth-IL2-Nde-tBCMA-L244ter | 7151 | 7843 |
| Synth-IL2m10-1-R38A-F42K-Q126A-Nde-tBCMA- | 7152 | 7844 |
| L244ter | | |
| Synth-IL2m4-R38E-F42A-Nde-tBCMA-L244ter | 7153 | 7845 |
| Synth-IL2m4-1-R38E-F42A-I92A-Nde-tBCMA-L244ter | 7154 | 7846 |
| Synth-IL2v-Roche-T3A-F42A-Y45A-L72G-C125A-Nde- | 7155 | 7847 |
| tBCMA-L244ter | | |
| Synth-IL15-Nde-tBCMA-L244ter | 7156 | 7848 |
| hIL15-E64K-Nde-tBCMA-L244ter | 7157 | 7849 |
| IL2-CD30-ECDTM | 7158 | 7850 |
| Nkp80 | 7159 | 7851 |

TABLE 44

| | SEQ ID | SEQ ID |
|---|---|---|
| Name of fragment | NO (DNA) | NO (PRT) |
| IgSP-Apa-CD20-USC1-vHH-2HCD26-G4Sx3v2-hu- | 7160 | 7852 |
| mROO5-1-scFv-CD16-F158V-S197P-FL-TMCP-v3 | | |
| IgSP-Apa-CD20-USC1-vHH-2HCD26-G4Sx3v2-hu- | 7161 | 7853 |
| mROO5-1-scFv-NKp30-ECDTMCP-opt1 | | |
| IgSP-Apa-CD20-USC1-vHH-2HCD26-G4Sx3v2-hu- | 7162 | 7854 |
| mROO5-1-scFv-NKp44-ECDTMCP-opt1 | | |
| IgSP-Apa-CD20-USC1-vHH-2HCD26-G4Sx3v2-hu- | 7163 | 7855 |
| mROO5-1-scFv-NKp46-ECDTMCP-opt1 | | |
| IgSP-Apa-CD20-USC1-vHH-2HCD26-G4Sx3v2-hu- | 7164 | 7856 |
| mROO5-1-scFv-CD28-Hinge-CD16-F158V-S197P-Hinge- | | |
| TM-CP-v3 | | |
| IgSP-Apa-CD20-USC1-vHH-2HCD26-G4Sx3v2-hu- | 7165 | 7857 |
| mROO5-1-scFv-CD28-Hinge-NKp30-Hinge-TMCP-opt1 | | |
| IgSP-Apa-CD20-USC1-vHH-2HCD26-G4Sx3v2-hu- | 7166 | 7858 |
| mROO5-1-scFv-CD28-Hinge-NKp44Hinge-TMCP-opt1 | | |
| IgSP-Apa-CD20-USC1-vHH-2HCD26-G4Sx3v2-hu- | 7167 | 7859 |
| mROO5-1-scFv-CD28-Hinge-NKp46-Hinge-TMCP-opt1 | | |
| IgSP-Apa-CD20-USC1-vHH-2HCD26-G4Sx3v2-hu- | 7168 | 7860 |
| mROO5-1-scFv-CD28-Hinge-DAP10-Hinge-TM-CP | | |
| IgSP-Apa-CD20-USC1-vHH-2HCD26-G4Sx3v2-hu- | 7169 | 7861 |
| mROO5-1-scFv-CD28-Hinge-CD3z-ECDTMCP | | |
| IgSP-Apa-CD20-USC1-vHH-2HCD26-G4Sx3v2-hu- | 7170 | 7862 |
| mROO5-1-scFv-CD28-Hinge-DNAM1-Hinge-TMCP | | |

TABLE 46

| | SEQ ID | SEQ ID |
|---|---|---|
| Name of fragment | NO (DNA) | NO (PRT) |
| CD8SP-BCMA-FHVH93-G4S-CD16A-V158-FL-F-P2A- | 7601 | 8293 |
| PAC | | |
| CD20-Ubli-NKp44-ECDTMCP-opt2-F-F2A-PAC | 7602 | 8294 |
| BCMA-J6M0-NKp44-ECDTMCP-opt2-F-F2A-PAC | 7603 | 8295 |
| CD22-h10F4v2-NKp44-ECDTMCP-opt2-F-F2A-PAC | 7604 | 8296 |
| CD8SP-BCMA917-vHH-E59D-NKp44-ECDTMCP-opt2- | 7605 | 8297 |
| F-F2A-PAC | | |
| CD8SP-PSMA-USC76-chVH-NKp44-ECDTMCP-opt2-F- | 7606 | 8298 |
| F2A-PAC | | |
| CD8SP-CD19-hu-mROO5-1-scFv-NKp30-ECDTMCP- | 7607 | 8299 |
| opt2-F-F2A-PAC | | |
| FMC64-NKp30-ECDTMCP-opt2-F-F2A-PAC | 7608 | 8300 |
| CD20-2F2-NKp30-ECDTMCP-opt2-F-F2A-PAC | 7609 | 8301 |
| CD8SP-Hul61-2-NKp30-ECDTMCP-opt2-F-F2A-PAC | 7610 | 8302 |
| BCMA-J6M0-NKp30-ECDTMCP-opt2-F-F2A-PAC | 7611 | 8303 |
| CD22-h10F4v2-NKp30-ECDTMCP-opt2-F-F2A-PA | 7612 | 8304 |
| CD8SP-hu-HA22-1-NKp30-ECDTMCP-opt2-F-F2A-PAC | 7613 | 8305 |
| CD8SP-CD20-VHH-USC1-2HC2D6-NKp30-ECDTMCP- | 7614 | 8306 |
| opt2-F-F2A-PAC | | |
| CD8SP-CD38-331-vHH-D64E-NKp30-ECDTMCP-opt2- | 7615 | 8307 |
| F-F2A-PAC | | |
| CD8SP-BCMA917-vHH-E59D-NKp30-ECDTMCP-opt2- | 7616 | 8308 |
| F-F2A-PAC | | |
| CD8SP-PSMA-USC76-chVH-NKp30-ECDTMCP-opt2-F- | 7617 | 8309 |
| F2A-PAC | | |
| CD8SP-BCMA-FHVH93-G4S-NKp46-opt1-F-P2A::Xba- | 7618 | 8310 |
| PAC | | |
| CD19-hu-mROO5-1-vL-huTCRg-F-P2A-SP-CD19-hu- | 7619 | 8311 |
| mROO5-1-vH-huTCRd-d2-F-F2A-PAC | | |
| CD19-hu-mROO5-1-vL-huTCRg-d1-F-P2A-SP-CD19-hu- | 7620 | 8312 |
| mROO5-1-vH-huTCRd-d2-F-F2A-PAC | | |
| CD19-hu-mROO5-1-vL-huTCRg-d2-F-P2A-SP-CD19-hu- | 7621 | 8313 |
| mROO5-1-vH-huTCRd-d2-F-F2A-PAC | | |
| CD19-hu-mROO5-1-vL-huTCRg-d8-F-P2A-SP-CD19-hu- | 7622 | 8314 |
| mROO5-1-vH-huTCRd-d2-F-F2A-PAC | | |
| CD19-hu-mROO5-1-vL-huTCRg-d11-F-P2A-CD19-hu- | 7623 | 8315 |
| mROO5-1-vH-huTCRd-d2-F-F2A-PAC | | |
| CD19-hu-mROO5-1-vL-huTCRg-d16-F-P2A-CD19-hu- | 7624 | 8316 |
| mROO5-1-vH-huTCRd-d2-F-F2A-PAC | | |
| CD19-hu-mROO5-1-vL-huTCRg-d21-F-P2A-CD19-hu- | 7625 | 8317 |
| mROO5-1-vH-huTCRd-d2-F-F2A-PAC | | |
| CD8SP-BCMA-FHVH93-G4S-CD16A-V158-FL-F-P2A- | 7626 | 8318 |
| IgHSP-CD20-VHH-USC1-2HCD26-GS4-KIR2DL1- | | |
| ECDTMCP-opt2-F-F2A-PAC | | |
| CD8SP-BCMA-FHVH93-G4S-CD16A-V158-FL-F-P2A- | 7627 | 8319 |
| IgHSP-CD20-VHH-USC1-2HCD26-GS4-OX40- | | |
| ECDTMCP-opt2-F-F2A-PAC | | |
| CD19-hu-mROO5-1-vL-huTCRg-d3-F-P2A-SP-CD19-hu- | 7628 | 8320 |
| mROO5-1-vH-huTCRd-d2-F-F2A-PAC | | |
| CD19-hu-mROO5-1-vL-huTCRg-d4-F-P2A-SP-CD19-hu- | 7629 | 8321 |
| mROO5-1-vH-huTCRd-d2-F-F2A-PAC | | |
| CD19-hu-mROO5-1-vL-huTCRg-d31-F-P2A-SP-CD19- | 7630 | 8322 |
| hu-mROO5-1-vH-huTCRd-d2-F-F2A-PAC | | |
| CD19-hu-mROO5-1-vL-huTCRg-d9-F-P2A-SP-CD19-hu- | 7631 | 8323 |
| mROO5-1-vH-huTCRd-d2-F-F2A-PAC | | |
| CD19-hu-mROO5-1-vL-huTCRg-d26-F-P2A-SP-CD19- | 7632 | 8324 |
| hu-mROO5-1-vH-huTCRd-d2-F-F2A-PAC | | |
| CD8SP-BCMA-FHVH93-G4S-CD16A-V158-FL-F-P2A- | 7633 | 8325 |
| IgHSP-CD20-VHH-USC1-2HCD26-GS4-CD32- | | |
| ECDTMCP-opt2-F-F2A-PAC | | |
| pCCLc-MNDU3-DEco-Nhe-CD19-hu-mROO5-1-vL- | 7634 | 8326 |
| huTCRg-d5-F-P2A-SP-CD19-hu-mROO5-1-vH-huTCRd- | | |
| d4-F-F2A-PAC | | |
| pCCLc-MNDU3-DEco-Nhe-CD19-hu-mROO5-1-vL- | 7635 | 8327 |
| huTCRg-F-P2A-SP-CD19-hu-mROO5-1-vH-huTCRd-F- | | |
| F2A-PAC | | |
| CD8SP-CD19-hu-mROO5-1-scFv-G3S-NKp46- | 7636 | 8328 |
| ECDTMCP-opt2-F-F2A-PAC | | |
| CD8SP-CD19-hu-mROO5-1-scFv-G3S-CD3e-ECDTMCP- | 7637 | 8329 |
| d9-opt2-F-F2A-PAC | | |
| CD8SP-CD19-hu-mROO5-1-scFv-G3S-CD3e-ECDTMCP- | 7638 | 8330 |
| d18-opt2-F-F2A-PAC | | |
| CD8SP-hCD19-EUK-5-13-vL-IgCL-NKp30-Hinge-TMCP- | 7639 | 8331 |
| opt1-F-P2A-SP-hCD19-EUK-5-13-vH-IgG1-CH1- | | |
| CD3zECDTMCP-opt2-F-F2A-PAC | | |
| CD8SP-NKp30-Ig-Hinge-opt1-[hTCRb-S57C]-F-P2A- | 7640 | 8332 |
| IgHSP-CD20-VHH-USC1-2HC2D6-G4S-CD19-hu- | | |
| mROO5-1-vH-[hTCRa-T48C-opt]-F-F2A-PAC | | |
| CD8SP-hCD19-EUK-5-13-vL-IgCL-NKp44-Hinge-TMCP- | 7641 | 8333 |
| opt1-F-P2A-SP-hCD19-EUK-5-13-vH-IgG1-CH1- | | |
| CD3zECDTMCP-opt2-F-F2A-PAC | | |
| CD8-hCD19-EUK-5-13-vL-IgCL-CD3zECDTMCP-opt-F- | 7642 | 8334 |
| P2A-SP-hCD19-EUK-5-13-vH-IgG1-CH1-CD16A-v158- | | |
| S197P-FL-v3-F-F2A-PAC | | |
| CD8SP-CD19-hu-mROO5-vL-IgCL-CD3zECDTMCP-opt- | 7643 | 8335 |
| F-P2A-SP-CD19-hu-mROO5-vH-IgGA1-CHI- | | |
| CD3zECDTMCP-opt2-F-F2A-PAC | | |
| CD8SP-CD19-hu-mROO5-vL-IgCL-CD3zECDTMCP-opt- | 7644 | 8336 |
| F-P2A-SP-CD19-hu-mROO5-vH-IgG2-1C-CHI- | | |
| CD3zECDTMCP-opt2-F-F2A-PAC | | |
| CD8SP-CD19-hu-mROO5-vL-IgCL-CD3zECDTMCP-opt- | 7645 | 8337 |
| F-P2A-SP-CD19-hu-mROO5-vH-IgD-CHI- | | |
| CD3zECDTMCP-opt2-F-F2A-PAC | | |
| CD8SP-CD19-hu-mROO5-vL-IgCL-CD3zECDTMCP-opt- | 7646 | 8338 |
| F-P2A-SP-CD19-hu-mROO5-vH-IgG2-0C- | | |
| CD3zECDTMCP-opt2-F-F2A-PAC | | |
| CD8SP-CD19-hu-mROO5-vL-IgCL-CD3zECDTMCP-opt- | 7647 | 8339 |
| F-P2A-SP-CD19-hu-mROO5-vH-IgGA2-CHI- | | |
| CD3zECDTMCP-opt2-F-F2A-PAC | | |
| CD8SP-CD19-hu-mROO5-vL-IgCL-CD3zECDTMCP-opt- | 7648 | 8340 |
| F-P2A-SP-CD19-hu-mROO5-vH-IgE-CHI- | | |
| CD3zECDTMCP-opt2-F-F2A-PAC | | |
| CD8SP-CD19-hu-mROO5-vL-IgCL-CD3zECDTMCP-opt- | 7649 | 8341 |
| F-P2A-SP-CD19-hu-mROO5-vH-IgG4-CHI- | | |
| CD3zECDTMCP-opt2-F-F2A-PAC | | |
| CD8SP-CD19-hu-mROO5-vL-IgCL-CD3zECDTMCP-opt- | 7650 | 8342 |
| F-P2A-SP-CD19-hu-mROO5-vH-IgG3-CHI- | | |
| CD3zECDTMCP-opt2-F-F2A-PAC | | |
| pLENTI-CD8-hCD19-EUK-5-13-vL-IgCL-CD8-hinge- | 7651 | 8343 |
| NKG2D-TM-2B4-CP-opt-1-CD3zCP-opt1-F-P2A-IgSP- | | |
| hCD19-EUK-5-13-vH-IgG1-CH1-DAP10-opt2-CD3zCP- | | |
| opt2-F-F2A-PAC | | |
| CD8SP-CD19-hu-mROO5-vL-IgCL-CD3zECDTMCP-opt- | 7652 | 8344 |
| F-P2A-SP-CD19-hu-mROO5-vH-IgM-CHI- | | |
| CD3zECDTMCP-opt2-F-F2A-PAC | | |
| CD19-hu-mROO5-1-vL-NKp30-ECDTMCP-opt1-F-P2A- | 7653 | 8345 |
| IgSP-CD19-hu-mROO5-1-vH-NKp30-ECDTMCP-opt2-F- | | |
| F2A-PAC | | |
| CD8SP-NKp30-Ig-Hinge-opt1-G4S-humROO5-vL- | 7654 | 8346 |
| [hTCRb-S57C]-F-P2A-IgHSP-NKp30-Ig-Hinge-opt2-G4S- | | |
| CD19-hu-mROO5-1-vH-[hTCRa-T48C-opt]-F-F2A-PAC | | |
| CD8SP-NKp44-Ig-opt1-[hTCRb-S57C]-F-P2A-IgHSP- | 7655 | 8347 |
| NKp30-Ig-Hinge-opt2-[hTCRa-T48C-opt]-F-F2A-PAC | | |
| CD8SP-BCMA-FHVH93-G4S-NKp44-Hinge-ECDTMCP- | 7656 | 8348 |
| opt1-F-P2A-IgHSP-CD20-VHH-USC1-2HCD26-G4S- | | |
| NKp44-Hinge-ECDTMCP-opt2-F2A-PAC | | |
| CD8SP-BCMA-FHVH93-G4S-NKp30-ECDTMCP-opt1- | 7657 | 8349 |
| F-P2A-IgHSP-CD20-VHH-USC1-2HC2D6-G4S-NKp30- | | |
| ECDTMCP-opt2-F-F2A-PAC | | |
| CD19-hu-mROO5-1-vL-NKp44-Hinge-TMCP-opt1-F- | 7658 | 8350 |
| P2A-IgSP-CD19-hu-mROO5-1-vH-NKp44-Hinge-TMCP- | | |
| opt2-F-F2A-PAC | | |
| CD19-hu-mROO5-1-vL-NKp44-ECDTMCP-opt1-F-P2A- | 7659 | 8351 |
| IgSP-CD19-hu-mROO5-1-vH-NKp44-ECDTMCP-opt2-F- | | |
| F2A-PAC | | |
| FMC64-CD16A-v158-S197P-FL-v3-F-F2A-PAC | 7660 | 8352 |
| CD20-2F2-CD16A-v158-S197P-FL-v3-F-F2A-PAC | 7661 | 8353 |
| CD20-Ubli-CD16A-v158-S197P-FL-v3-F-F2A-PAC | 7662 | 8354 |
| CD8SP-Hu161-2-CD16A-v158-S197P-FL-v3-F-F2A-PAC | 7663 | 8355 |
| BCMA-J6M0-CD16A-v158-S197P-FL-v3-F-F2A-PAC | 7664 | 8356 |
| CD8SP-SC22-HA22-CD16A-v158-S197P-FL-v3-F-F2A- | 7665 | 8357 |
| PAC | | |
| CD22-h10F4v2-CD16A-v158-S197P-FL-v3-F-F2A-PAC | 7666 | 8358 |
| CD8SP-hu-HA22-1-CD16A-v158-S197P-FL-v3-F-F2A- | 7667 | 8359 |
| PAC | | |
| hCD19-Bu12-CD16A-v158-S197P-FL-v3-F-F2A-PAC | 7668 | 8360 |
| CD8SP-CD20-VHH-USC1-2HC2D6-CD16A-v158-S197P- | 7669 | 8361 |
| FL-v3-F-F2A-PAC | | |
| CD8SP-CD38-331-vHH-D64E-CD16A-v158-S197P-FL- | 7670 | 8362 |
| v3-F-F2A-PAC | | |
| CD8SP-CD38-331-vHH-S53E-CD16A-v158-S197P-FL- | 7671 | 8363 |
| v3-F-F2A-PAC | | |
| CD8SP-BCMA917-vHH-E59D-CD16A-v158-S197P-FL- | 7672 | 8364 |
| v3-F-F2A-PAC | | |
| CD8SP-SARScov2-CR3022-CD16A-v158-S197P-FL-v3- | 7673 | 8365 |
| F-F2A-PAC | | |
| CD8SP-CD19-hu-mROO5-vL-IgCL-Hinge-CD16A-v158- | 7674 | 8366 |
| S197P-FL-v3-F-F2A-SP-CD19-hu-mROO5-vH-IgG1- | | |
| CH1-CD3zECDTMCP-opt2-F-F2A-PAC | | |
| CD8-hCD19-EUK-5-13-vL-IgCL-mutCD3z-ECDTM- | 7675 | 8367 |
| 2B4CP-opt1-CD3zCP-opt1-F-P2A-IgSP-hCD19-EUK-5- | | |
| 13-vH-IgG1-CH1-mutCD3z-ECDTM-2B4CP-opt2- | | |
| CD3zCP-opt2-F-F2A-PAC | | |
| CD8SP-CD19-hu-mROO5-1-CD16A-v158-S197P-FL-v3- | 7676 | 8368 |
| F-F2A-PAC | | |
| IgHSP-CD20-VHH-USC1-2HCD26-G4S-CD16A-v158- | 7677 | 8369 |
| FL-v2-F2A-PAC | | |
| CD8SP-BCMA-FHVH93-G4S-CD16A-V158-FL-F- | 7678 | 8370 |
| P2A::Xba-PAC | | |
| CD8SP-CD19-hu-mROO5-1-scFv-CD16A-v158-S197P- | 7679 | 8371 |
| FL-v3 | | |
| CD8SP-CD19-hu-mROO5-1-scFv-CD28-Ig-113-137- | 7680 | 8372 |
| NKp46-Hinge-TM-CP-opt2-F-F2A-PAC | | |
| CD8SP-CD19-hu-mROO5-1-scFv-CD28-Ig-113-137- | 7681 | 8373 |
| DNAM-1-Hinge-TMCP-opt2-F-F2A-PAC | | |
| CD8SP-CD19-hu-mROO5-1-scFv-CD28-Ig-113-137- | 7682 | 8374 |
| NKp46-Hinge-TM-CP-opt2-F-F2A-Synth-IL2m4-R38E- | | |
| F42A-SynthCD28TM | | |
| CD8SP-CD19-hu-mROO5-1-scFv-CD28-Ig-113-137- | 7683 | 8375 |
| CD16A-v158-Hinge-TM-CP-v2-F-F2A-PAC | | |
| CD8SP-CD19-hu-mROO5-1-scFv-CD28-Ig-113-137- | 7684 | 8376 |
| CD3eECDTMCP-opt2-F-F2A-PAC | | |
| CD8SP-CD19-hu-mROO5-1-scFv-CD28-Ig-113-137- | 7685 | 8377 |
| NKp44-Hinge-TMCP-opt2-F-F2A-Synth-IL2m4-R38E- | | |
| F42A-SynthCD28TM | | |
| NKG2D-opt2-G4Sx3-BCMA917-vHH-F-F2A-Synth- | 7686 | 8378 |
| IL2m4-R38E-F42A-SynthCD28TM | | |
| NKG2D-opt2-G4Sx3-BCMA917-vHH-F-F2A-Synth-IL2- | 7687 | 8379 |
| tBCMA-L244 | | |
| CD8SP-CD19-hu-mROO5-1-scFv-G3S-NKp46- | 7688 | 8380 |
| ECDTMCP-opt2-F-F2A-PAC | | |
| CD8SP-CD19-hu-mROO5-1-scFv-G3S-CD3e-ECDTMCP- | 7689 | 8381 |
| d9-opt2-F-F2A-PAC | | |
| CD8SP-CD19-hu-mROO5-1-scFv-G3S-CD3e-ECDTMCP- | 7690 | 8382 |
| d18-opt2-F-F2A-PAC | | |
| CD8SP-CD19-hu-mROO5-1-scFv-CD8-hinge-DNAM-1- | 7691 | 8383 |
| Hinge-TMCP-opt2-F-F2A-PAC | | |
| CD8SP-CD19-hu-mROO5-1-scFv-CD8-hinge-NKp44- | 7692 | 8384 |
| Hinge-TMCP-opt2-F-F2A-PAC | | |
| CD8SP-CD19-hu-mROO5-1-scFv-CD8-hinge-CD16A- | 7693 | 8385 |
| Hinge-TM-CP-V158-F-P2A-PAC | | |
| CD8SP-CD19-hu-mROO5-1-scFv-CD8-hinge-DAP10- | 7694 | 8386 |
| opt2-CD3zCP-opt2-F-F2A-PAC | | |
| CD8SP-CD19-hu-mROO5-1-scFv-CD8-hinge-NKp46- | 7695 | 8387 |
| Hinge-TM-CP-opt2-F-F2A-PAC | | |
| NKG2D-opt2-G4Sx3-Her2-47D5-vHH-F-F2A-PAC | 7696 | 8388 |
| NKG2D-opt2-G4Sx3-Her3-21F06-vHH-F-F2A-PAC | 7697 | 8389 |
| NKG2D-opt2-G4Sx3-BCMA917-vHH-F-F2A-PAC | 7698 | 8390 |
| Nkp80-G4Sx3-opt1-Her3-21F06-vHH-F-F2A-PAC | 7699 | 8391 |
| CD8SP-CD19-hu-mROO5-1-scFv-NKp44-ECDTMCP- | 7700 | 8392 |
| opt2-F-F2A-hIL2-CD28TM | | |
| CD8-hCD19-EUK-5-13-vL-IgCL-CD3zECDTMCP-opt-F- | 7701 | 8393 |
| P2A-SP-hCD19-EUK-5-13-vH-IgG1-CHI- | | |
| CD3zECDTMCP-opt2-F-F2A-hIL2-CD28TMter | | |
| CD8SP-CD19-hu-mROO5-1-scFv-G3S-NKp46- | 7702 | 8394 |
| ECDTMCP-opt2-F-F2A-PAC | | |
| TCRgd-G5-4-G2SG-Synth-IL2m10-1-R38A-F42K- | 7703 | 8395 |
| Q126A-U60 | | |
| TCRgd-G5-4-G2SG-Synth-IL2m4-1-R38E-F42A-I92A- | 7704 | 8396 |
| U60 | | |
| TCRgd-G5-4-G2SG-Synth-IL2v-Roche-F42A-Y45A- | 7705 | 8397 |
| L72G-C125A-U60 | | |
| TCRgd-G5-4-G2SG-Synth-hIL2-U60 | 7706 | 8398 |
| CD8-hCD19-EUK-5-13-vL-IgCL-CD3zECDTMCP-opt-F- | 7707 | 8399 |
| P2A-SP-hCD19-EUK-5-13-vH-IgG1-CH1- | | |
| CD3zECDTMCP-opt2-F-F2A-hIL2-CD28TMter | | |
| CD8SP-MSLN-7D9-HL-scFv-Acc65I-G4S-humROO5-1- | 7708 | 8400 |
| vL-[hTCRb-KACIAH]-F-P2A-IgHSP-hu-PSMA-J591- | | |
| scFv-G4S-CD19-hu-mROO5-1-vH-[hTCRa-CSDVP]-F- | | |
| F2A-PAC | | |
| CD19-hu-mROO5-1-vL-huTCRg2-F-P2A-SP-CD19-hu- | 7709 | 8401 |
| mROO5-1-vH-huTCRd-d2-F-F2A-PAC | | |
| CD8SP-CD19-hu-mROO5-1-scFv-NKp30-ECDTMCP- | 7710 | 8402 |
| opt2-F-F2A-Synth-IL2m4-R38E-F42A-SythCD28TM | | |
| CD8SP-CD19-hu-mROO5-1-scFv-NKp30-ECDTMCP- | 7711 | 8403 |
| opt2-F-F2A-Synth-IL2m10-1-R38A-F42K-Q126A-Syth- | | |
| CD28TM | | |
| CD8SP-CD19-hu-mROO5-1-scFv-NKp30-ECDTMCP- | 7712 | 8404 |
| opt2-F-F2A-Synth-IL2v-Roche-T3A-F42A-Y45A-L72G- | | |
| C125A-SythCD28TM | | |
| CD8SP-CD19-hu-mROO5-1-scFv-NKp30-ECDTMCP- | 7713 | 8405 |
| opt2-F-F2A-Synth-IL2m4-1-R38E-F42A-I92A- | | |
| SythCD28TM | | |
| CD8SP-CD19-hu-mROO5-1-scFv-NKp30-ECDTMCP- | 7714 | 8406 |
| opt2-F-F2A-Synth-hIL15-E64K-SythCD28TM | | |
| CD8SP-CD19-hu-mROO5-1-scFv-NKp30-ECDTMCP- | 7715 | 8407 |
| opt2-F-F2A-Synth-hIL15-L69R-SythCD28TM | | |
| CD8SP-CD19-hu-mROO5-1-scFv-NKp30-ECDTMCP- | 7716 | 8408 |
| opt2-F-F2A-Synth-hIL15-D8S-SythCD28TM | | |
| CD19-hu-mROO5-1-vL-huTCRg-d5-F-P2A-SP-CD19-hu- | 7717 | 8409 |
| mROO5-1-vH-huTCRd-d2-F-F2A-Synth-IL2m4-A11D- | | |
| R38E-F42A-SythCD28TM | | |
| CD19-hu-mROO5-1-vL-huTCRg-d5-F-P2A-SP-CD19-hu- | 7718 | 8410 |
| mROO5-1-vH-huTCRd-d2-F-F2A-Synth-IL2m10-1-R38A- | | |
| F42K-Q126A-Syth-CD28TM | | |
| CD19-hu-mROO5-1-vL-huTCRg-d5-F-P2A-SP-CD19-hu- | 7719 | 8411 |
| mROO5-1-vH-huTCRd-d2-F-F2A-Synth-IL2v-Roche- | | |
| T3A-F42A-Y45A-L72G-C125A-SythCD28TM | | |
| CD19-hu-mROO5-1-vL-huTCRg-d5-F-P2A-SP-CD19-hu- | 7720 | 8412 |
| mROO5-1-vH-huTCRd-d2-F-F2A-Synth-IL2m4-1-R38E- | | |
| F42A-I92A-SythCD28TM | | |
| CD19-hu-mROO5-1-vL-huTCRg-d5-F-P2A-SP-CD19-hu- | 7721 | 8413 |
| mROO5-1-vH-huTCRd-d2-F-F2A-Synth-hIL15-E64K- | | |
| SythCD28TM | | |
| CD19-hu-mROO5-1-vL-huTCRg-d5-F-P2A-SP-CD19-hu- | 7722 | 8414 |
| mROO5-1-vH-huTCRd-d2-F-F2A-Synth-hIL15-D8S- | | |
| SythCD28TM | | |
| CD19-hu-mROO5-1-vL-huTCRg-d5-F-P2A-SP-CD19-hu- | 7723 | 8415 |
| mROO5-1-vH-huTCRd-d2-F-F2A-Synth-hIL15-L69R- | | |
| SythCD28TM | | |
| CD8SP-CD19-hu-mROO5-1-G4Sx3-CD16A-v158-S197P- | 7724 | 8416 |
| FL-v3-F-F2A-Synth-IL2m10-1-R38A-F42K-Q126A-Syth- | | |
| CD28TM | | |
| CD8SP-CD19-hu-mROO5-1-G4Sx3-CD16A-v158-S197P- | 7725 | 8417 |
| FL-v3-F-F2A-Synth-IL2v-Roche-T3A-F42A-Y45A-L72G- | | |
| C125A-SythCD28TM | | |
| CD8SP-CD19-hu-mROO5-1-G4Sx3-CD16A-v158-S197P- | 7726 | 8418 |
| FL-v3-F-F2A-Synth-IL2m4-1-R38E-F42A-I92A- | | |
| SythCD28TM | | |
| CD8SP-CD19-hu-mROO5-1-G4Sx3-CD16A-v158-S197P- | 7727 | 8419 |
| FL-v3-F-F2A-Synth-hIL15-L69R-SythCD28TM | | |
| CD8SP-CD19-hu-mROO5-1-G4Sx3-CD16A-v158-S197P- | 7728 | 8420 |
| FL-v3-F-F2A-Synth-IL2m4-R38E-F42A-SythCD28TM | | |
| CD8SP-CD19-hu-mROO5-1-G4Sx3-CD16A-v158-S197P- | 7729 | 8421 |
| FL-v3-F-F2A-Synth-hIL15-E64K-SythCD28TM | | |
| CD8SP-CD19-hu-mROO5-1-G4Sx3-CD16A-v158-S197P- | 7730 | 8422 |
| FL-v3-F-F2A-Synth-hIL15-D8S-SythCD28TM | | |
| CD19-hu-mROO5-1-vL-huTCRg-d5-F-P2A-SP-CD19-hu- | 7731 | 8423 |
| mROO5-1-vH-huTCRd-d2-F-F2A-Synth-IL2m4-R38E- | | |
| F42A-SythCD28TM | | |
| CD8SP-CD19-hu-mROO5-1-vL-TCRbECD- | 7732 | 8424 |
| CD3zECDTMCP-opt-F-P2A-SP-CD19-hu-mROO5-1-vH- | | |
| hTCRaECD-CD3zECDTMCP-opt2-F-F2A-Synth-IL2m4- | | |
| R38E-F42A-SythCD28TM | | |
| CD8SP-CD19-hu-mROO5-1-vL-TCRbECD- | 7733 | 8425 |
| CD3zECDTMCP-opt-F-P2A-SP-CD19-hu-mROO5-1-vH- | | |
| hTCRaECD-CD3zECDTMCP-opt2-F-F2A-Synth-IL2m10- | | |
| 1-R38A-F42K-Q126A-Syth-CD28TM | | |
| CD8SP-CD19-hu-mROO5-1-vL-TCRbECD- | 7734 | 8426 |
| CD3zECDTMCP-opt-F-P2A-SP-CD19-hu-mROO5-1-vH- | | |
| hTCRaECD-CD3zECDTMCP-opt2-F-F2A-Synth-hIL15- | | |
| D8S-SythCD28TM | | |
| CD8SP-CD19-hu-mROO5-1-vL-TCRbECD- | 7735 | 8427 |
| CD3zECDTMCP-opt-F-P2A-SP-CD19-hu-mROO5-1-vH- | | |
| hTCRaECD-CD3zECDTMCP-opt2-F-F2A-Synth-hIL15- | | |
| L69R-SythCD28TM | | |
| CD8SP-CD19-hu-mROO5-1-vL-TCRbECD- | 7736 | 8428 |
| CD3zECDTMCP-opt-F-P2A-SP-CD19-hu-mROO5-1-vH- | | |
| hTCRaECD-CD3zECDTMCP-opt2-F-F2A-Synth-hIL2- | | |
| CD28TM | | |
| CD8SP-CD19-hu-mROO5-1-vL-TCRbECD- | 7737 | 8429 |
| CD3zECDTMCP-opt-F-P2A-SP-CD19-hu-mROO5-1-vH- | | |
| hTCRaECD-CD3zECDTMCP-opt2-F-F2A-IgH-SP1- | | |
| tBCMA-L244 | | |
| CD8SP-CD19-hu-mROO5-1-vL-TCRbECD- | 7738 | 8430 |
| CD3zECDTMCP-opt-F-P2A-SP-CD19-hu-mROO5-1-vH- | | |
| hTCRaECD-CD3zECDTMCP-opt2-F-F2A-Synth-IL2- | | |
| tBCMA-L244 | | |
| CD8SP-CD19-hu-mROO5-1-CD28-Ig-113-137-NKp44- | 7739 | 8431 |
| Hinge-TMCP-opt2-F-F2A-Synth-IL2-tBCMA-L244 | | |
| CD8SP-CD19-hu-mROO5-1-CD28-Ig-113-137-NKp46- | 7740 | 8432 |
| Hinge-TM-CP-opt2-F-F2A-Synth-IL2-tBCMA-L244 | | |
| NKG2D-opt2-G4Sx3-BCMA917-vHH-F-F2A-Synth- | 7741 | 8433 |
| IL2m4-R38E-F42A-SynthCD28TM | | |
| NKG2D-opt1-G4Sx3-hu-mROO5-1-vL-F-P2A-NKG2D- | 7742 | 8434 |
| opt2-G4Sx3-CD19-hu-mROO5-1-vH-F-F2A-PAC | | |
| G4Sx3v2-hu-mROO5-1-vL-F-P2A-CD94-G4Sx3-CD19- | 7743 | 8435 |
| hu-mROO5-1-vH-F-F2A-PAC | | |
| NKG2H-opt1-G4Sx3v2-hu-mROO5-1-vL-F-P2A-CD94- | 7744 | 8436 |
| G4Sx3-CD19-hu-mROO5-1-vH-F-F2A-PAC | | |
| NKG2A-opt1-G4Sx3v2-hu-mROO5-1-vL-F-P2A-CD94- | 7745 | 8437 |
| G4Sx3-CD19-hu-mROO5-1-vH-F-F2A-PAC | | |
| CD8SP-hu-Hsp70-USC1-hCD8TM-BBZ-XS-T2A-PAC | 7746 | 8438 |
| CD8SP-cmHsp701-hCD8TM-BBZ-XS-T2A-PAC | 7747 | 8439 |

TABLE 49
Exemplary diseases targeted by SARs.

| SAR “X” | EXEMPLARY DISEASE TARGETED BY SARs (e.g., CD16 SAR, |
|---|---|
| TARGET | NKp30 SAR, NKp44 SAR, NKp46 SAR and DAP10 SAR etc.) |
| CD19 | ALL, CLL, lymphoma, lymphoid blast crisis of CML, multiple |
| | myeloma, immune disorders |
| ALK | Non-small Cell Lung Cancer (NSCLC), ALCL (anaplastic large cell |
| | lymphoma), IMT (inflammatory myofibroblastic tumor), or |
| | neuroblastoma |
| CD45 | Blood cancers |
| BCMA | Myeloma, PEL, plasma cell leukemia, Waldenstrom's |
| | macroglobinemia |
| CD5 | Blood cancer, T cell leukemia, T cell lymphoma |
| CD20 | Blood cancers, Leukemia, ALL, CLL, lymphoma, immune disorders |
| CD22 | Blood cancers, Leukemia, ALL, CLL, lymphoma, lymphoid blast crisis |
| | of CML, immune disorders |
| CD23 | Blood cancers, Leukemia, ALL, CLL, lymphoma, autoimmune |
| | disorders |
| CD30 | Hodgkins's lymphoma, Cutaneous T cell lymphoma |
| CD32 | Solid tumors |
| CD33 | Blood cancers, AML, MDS |
| CD34 | Blood cancers, AML, MDS |
| CD44v6 | Blood cancers, AML, MDS |
| CD70 | Blood cancers, lymphoma, myeloma, Waldenstrom's |
| | macroglobulinemia, Kidney cancer |
| CD79b | Blood cancers, ALL, Lymphoma |
| CD123 | Blood cancers, AML, MDS |
| CD138 | Blood cancers, Myeloma, PEL, plasma cell leukemia, waldenstrom's |
| | macroglobulinemia |
| CD179b | Blood cancers, ALL, Lymphoma |
| CD276/B7-H3 | Ewing's sarcoma, neuroblastoma, rhabdomyosarcoma, ovarian, |
| | colorectal and lung cancers |
| CD324 | Solid tumors, esophageal, prostate, colorectal, breast, lung cancers |
| CDH6 | Solid tumors, renal, ovarian, thyroid cancers |
| CDH17 | Adenocarciniomas, gastrointestinal, lung, ovarian, endometrial cancers |
| CDH19 | Solid tumor, Melanoma |
| EGFR | Colon cancer, lung cancer |
| CLEC5A | Blood cancers, Leukemia, AML |
| GR/LHR | Prostate cancer, ovarian cancer or breast cancer |
| CLL1 | Blood cancer, Leukemia |
| CMVpp65 | CMV infection, CMV colitis, CMV pneumonitis |
| CS1 | Blood cancers, myeloma, PEL, plasma cell leukemia |
| CSF2RA | AML, CML, MDS |
| CD123 | Blood cancers, AML, MDS |
| DLL3 | Melanoma, lung cancer or ovarian cancer |
| EBNA3c/MHC I | Epstein Barr virus infection and related diseases including cancers |
| EBV-gp350 | Epstein Barr virus infection and related diseases |
| EGFR | Solid tumors, Colon cancer, lung cancer |
| EGFRvIII | Solid tumors, glioblastoma |
| EpCam1 | Gastrointestinal cancer |
| FLT3 | Blood cancers, AML, MDS, ALL |
| Folate Receptor | Ovarian cancer, NSCLC, endometrial cancer, renal cancer, or other |
| alpha(FR1 or | solid tumors |
| FOLR1) | |
| FSHR | Prostate cancer, ovarian cancer or breast cancer |
| GD2 | Neuroblastoma |
| GD3 | Melanoma |
| GFRa4 | Cancer, thyroid medullary cancer |
| Fucosyl- | Small cell lung cancer |
| GM1(GM1) | |
| GPRC5D | Myeloma, PEL, plasma cell leukemia, waldenstrom's |
| | macroglobulinemia |
| gp100 | Melanoma |
| GPC3 | Solid tumors, Lung cancer |
| gpNMB | Melanoma, brain tumors, gastric cancers |
| GRP78 | Myeloma |
| Her2 | Solid tumors, breast cancer, stomach cancer |
| Her3 | Colorectal, breast cancer |
| HMW-MAA | Melanoma |
| HTLV1- | HTLV1 infection associated diseases, Adult T cell leukemia-lymphoma |
| TAX/MHC I | |
| IL11Ra | Blood cancers, AML, ALL, CML, MDS, sarcomas |
| IL6Ra | Solid tumors, Liver cancer |
| IL13Ra2 | Glioblastomas |
| KSHV-K8.1 | Kaposi's sarcoma, PEL, Multicentric Castleman's disease |
| LAMP1 | Blood cancers, AML, ALL, MDS, CLL, CML |
| LewisY | Cancers |
| L1CAM | Solid tumors, ovarian, breast, endometrial cancers, melanoma |
| LHR | Prostate cancer, ovarian cancer or breast cancer |
| Lym1 | Blood cancer, Leukemia, Lymphoma |
| Lym2 | Blood cancer, Leukemia, Lymphoma |
| CD79b | Blood cancers, lymphoma |
| MART1/MHC I | Melanoma |
| Mesothelin | Mesothelioma, ovarian cancer, pancreatic cancer |
| Muc1/MHC I | Breast cancer, gastric cancer, colorectal cancer, lung cancer, or other |
| | solid tumors |
| Muc16 | Ovarian cancer |
| NKG2D | Leukemia, lymphoma or myeloma |
| NYBR1 | Breast cancer |
| PSCA | Prostate cancer |
| PR1/MHC I | Blood cancer, Leukemia |
| Prolactin | Breast cancer, chromophobe renal cell cancer |
| Receptor | |
| PSMA | Prostate cancer |
| PTK7 | Melanoma, lung cancer or ovarian cancer |
| ROR1 | Blood cancer, B cell malignancy, lymphoma, CLL |
| SLea | Pancreatic cancer, colon cancer |
| SSEA4 | Pancreatic cancer |
| Tyrosinase/MHC | Melanoma |
| I | |
| TCRB1 | T cell leukemias and lymphomas, autoimmune disorders |
| TCRB2 | T cell leukemias and lymphomas, autoimmune disorders |
| TCRgd | T cell leukemias and lymphomas, autoimmune disorders |
| hTERT | Solid tumors, blood cancers |
| TGFBR2 | Solid tumors, keloid |
| TIM1/HAVCR1 | Kidney cancer, liver cancer |
| TROP2 | Solid tumors, Breast cancer, prostate cancer |
| TSHR | Thyroid cancer, T cell leukemia, T cell Lymphoma |
| TSLPR | Blood cancers, Leukemias, AML, MDS |
| Tyrosinase/MHC | Melanoma |
| I | |
| VEGFR3 | Solid tumors |
| WT1/MHC I | Blood cancers, AML |
| Folate Receptorβ | AML, Myeloma |
| B7H4 | Breast cancer or ovarian cancer |
| CD23 | Blood cancers, Leukemias, CLL |
| GCC | Gastrointestinal cancer |
| CD200R | Blood cancers, AML, MDS |
| AFP/MHC I | Solid tumors, Liver cancer |
| CD99 | Liver cancer |
| GPRC5D | Myeloma, waldenstrom's macroglobinemia |
| HPV16- | HPV16 associated cancers, cervical cancer, head and neck cancers |
| E7/MHC I | |
| Tissue Factor 1 | Solid tumors |
| (TF1) | |
| Tn-Muc1 | Solid tumors and blood cancers |
| Igk-Light Chain | Myeloma, plasma cell leukemia |
| Ras G12V/ | Solid tumors and blood cancers |
| MHC I | |
| CLD18A2 | Gastric, pancreatic, esophageal, ovarian, or lung cancer |
| (Claudin 18.2) | |
| CD43 | Blood cancers, AML |
| NY-ESO- | Myeloma |
| 1/MHC I | |
| MPL/TPO-R | Blood cancer, AML, MDS, CML, ALL, Myeloproliferative disorders, |
| | Polycythemia vera, Myelofibrosis, Essential Polycythemia |
| P-glycoprotein | Renal cancer, liver cancer, Myeloma |
| (MDR1) | |
| CD179a | Blood cancers, Acute Leukemia, CLL, ALL, Lymphoma |
| STEAP1 | Gastric or prostate cancer, or lymphoma |
| Livl (SLC39A6) | Breast or prostate cancer |
| Nectin4 | Bladder, renal, cervical, lung, head and neck or breast cancer |
| (PVRL4) | |
| Cripto (TDGF1) | Colorectal or endometrial or ovarian cancer |
| gpA33 | Colorectal or endometrial or ovarian cancer |
| FLT3 | Blood cancers, AML, ALL, MDS |
| BST1/CD157 | Blood cancers, AML, MDS |
| IL1RAP | Liver, colorectal, cervical, lung or ovarian cancer |
| Chloride channel | Glioma |
| IgE | Allergy |
| HLA-A2 | Graft vs host disease, tissue rejection (SIR Expressed in regulatory T |
| | cells) |
| Amyloid | Amyloidoses, alzheimer's disease |
| HIV1-env | HIVI/AIDS and related conditions |
| HIV1-gag | HIV1/AIDS and related conditions |
| Influenza A HA | Influenza A infection |

[0245] In one embodiment, the disclosure provides a SAR (such as an isolated SAR) comprising one or more heterologous antigen binding domains that are operationally linked via optional linkers to a naturally occurring (i.e., native or endogenous) receptor or a variant thereof. In an embodiment, the SAR retains the binding capability and functions of the native receptor but also acquires the binding capabilities and functions conferred by the one or more heterologous antigen binding domains. In an embodiment, the SAR retains partially or completely the binding capabilities and functions of the native receptor. In an embodiment, the SAR acquires the binding capabilities and functions conferred by the one or more heterologous antigen binding domains.

[0246] In one embodiment, the naturally occurring receptor is any receptor expressed on the surface of a cell (e.g., an immune cell, e.g., an immune effector cells). In an exemplary embodiment, the immune cell is selected from but not limited to a T cell, an NK cell, a monocyte/macrophage, a granulocyte and a B cell. In an embodiment, the naturally occurring signaling receptor is expressed on the surface of an immune cell (e.g., T cell, NK cell, NKT cell, macrophage, dendritic cell etc.).

[0247] In an embodiment, a naturally occurring receptor induces cell signaling, i.e., it is a naturally occurring signaling receptor. The naturally occurring signaling receptor may be an activating receptor (i.e., it induces cellular activation) or an inhibitory receptor (i.e., it blocks cell activation). In an embodiment, the naturally occurring receptor is an NK cell receptor, e.g., an NK activating or an NK inhibitory receptor. In an embodiment, the naturally occurring signaling receptor may be a receptor that induces cytotoxicity. In another embodiment, the naturally occurring signaling receptor may be a receptor that provides co-stimulation.

[0248] In an embodiment, the naturally occurring receptor that can be used in the construction of a SAR of the disclosure possesses a transmembrane domain. In an embodiment, a naturally occurring receptor is capable of recruiting a transmembrane adaptor protein. In an embodiment, a naturally occurring receptor is capable of recruiting a transmembrane adaptor protein selected from the group of but not limited to CD3ƒ, FcRy, DAP10, DAP12 or variants or fragments thereof. Exemplary such receptors include CD16A, NKp30, NKp44, NKp46 and NKG2D. In an embodiment, a naturally occurring receptor is capable of recruiting a transmembrane adaptor protein comprising a negatively charged residue (e.g., aspartate) within its transmembrane region. In an embodiment, a naturally occurring receptor possesses a transmembrane domain comprising a positively charged residue (lysine or arginine) that interacts with a negatively charged residue (e.g., aspartate) within the transmembrane region of a signaling adaptor protein. In an embodiment, the naturally occurring receptor possesses a transmembrane domain and a cytosolic domain. In an embodiment, the naturally occurring receptor possesses a hinge (spacer) domain and a transmembrane domain. In an embodiment, the naturally occurring receptor possesses a hinge (space) domain, a transmembrane domain and a cytosolic domain. An exemplary such receptor is CD16A. In an embodiment, the naturally occurring receptor possesses a hinge (space) domain, a membrane anchoring domain (e.g., GPI linked domain) but lacks a cytosolic domain. An exemplary such receptor is CD16B.

[0249] In exemplary embodiments, naturally occurring receptors that can be used in the construction of SAR of the disclosure include but are not limited to CD16A, CD16B, CD64, CD32, NKp30, NKp44, NKp46, KIR2DL1, KIR2DL2, KIR2DL3, KIR2DL5A, KIR2DL5B, KIR3DL1, KIR3DL2, KIR3DL4, KIR2DL4, KIR2DS1, KIR2DS2, KIR2DS3, KIR2DS4, KIR2DS5, KIR3DS1, NKG2D, NKG2C, NKG2A, NKG2E, NKG2F, DNAM-1, 2B4, OX40, CD28, 4-1BB, CD27, CD81, CD2, CD5, TNFR-I, TNFR-II, Fas, CD30, CD40, CRTAM, TIGIT, CD96, SLAMF6, SLAMF7, CD100, CD160, CEACAM, ILT2, KLRG1, LAIR1, CD161, Siglec3, Siglec-7, Siglec-9, TCRαβ and TCRγδ etc. and variants and fragments thereof.

[0250] In an embodiment, a naturally occurring receptor that can be used in the construction of a SAR of the disclosure is not a T cell receptor. In an embodiment, a naturally occurring receptor that can be used in the construction of a SAR of the disclosure is not TCRα, TCRβ, TCRγ, TCRδ or pre-TCRα. In an embodiment, a SAR does not comprise the constant chain of TCRα, TCRβ, TCRγ, TCRδ or pre-TCRα. In an embodiment, a SAR does not comprise the transmembrane domain of TCRα, TCRβ, TCRγ, TCRδ or pre-TCRα. In an embodiment, a SAR does not comprise the entire extracellular domain of TCRα, TCRβ, TCRγ, TCRδ or pre-TCRα. In an embodiment, the naturally occurring non-T cell receptor that can be used in the construction of a SAR of the disclosure comprises an intracellular activation domain. In an embodiment, the activation domain comprises one or more ITAMs. In an embodiment, the activation domain comprises one or more ITIMs. In an embodiment, the naturally occurring non-T cell receptor that can be used in the construction of a SAR of the disclosure comprises a costimulatory domain.

[0251] In exemplary embodiments, a SAR comprises intracellular activation domains derived from CD3ƒ, FcRγ, DAP10 or DAP12.

[0252] In an embodiment, the disclosure provides SAR comprising one or more heterologous antigen binding domains that are operationally linked to the entire extracellular domain of a non-TCR naturally occurring receptor, i.e., the receptor that is not TCRα, TCRβ, TCRγ, TCRδ or pre-TCRα. In an embodiment, the disclosure provides SAR comprising one or more heterologous antigen binding domains that are operationally linked to the partial extracellular domain of a non-TCR naturally occurring receptor. In an embodiment, the disclosure provides SAR comprising one or more heterologous antigen binding domains that are operationally linked to the partial extracellular domain of a non-TCR naturally occurring receptor. In an embodiment, the disclosure provides SAR comprising one or more heterologous antigen binding domains that are operationally linked to the entire or partial extracellular domain of a NTCRM (non-T cell receptor module). In an embodiment, the naturally occurring signaling receptor that can be used in the construction of a SAR of the disclosure is not CD4, CD8, CD28, CD27, CD16A or NKG2D.

[0253] In an embodiment, the disclosure provides SAR comprising one or more heterologous antigen binding domains that are operationally linked to the entire or partial extracellular domain of a naturally occurring receptor via optional linkers wherein the receptor is not part of TCR/CD3 receptor complex. In an embodiment, the disclosure provides SAR comprising one or more heterologous antigen binding domains that are operationally linked to the entire or partial extracellular domain of a naturally occurring receptor polypeptide chain via optional linkers wherein the receptor polypeptide chain is not part of TCR/CD3 receptor complex. In an embodiment, the disclosure provides SAR comprising one or more heterologous antigen binding domains that are operationally linked via optional linkers to the entire or partial extracellular domain of a naturally occurring receptor or a variant or a fragment thereof wherein the receptor does not associate with the TCR/CD3 receptor complex.

[0254] In an embodiment, the disclosure provides SAR comprising one or more heterologous antigen binding domains that are operationally linked to the entire or partial antigen (or ligand)-binding domain of a naturally occurring receptor or a variant or fragment thereof.

[0255] In an embodiment, the disclosure provides a SAR comprising one or more heterologous antigen binding domains that are operationally linked to the entire or partial antigen (or ligand)-binding domain of a non-TCR naturally occurring signaling receptor or an NTCRM or a variant or fragment thereof. In an embodiment, the disclosure provides a SAR comprising one or more heterologous antigen binding domains that are operationally linked to the entire or partial antigen (or ligand)-binding domain of a non-TCR signaling receptor or an NTCRM or a variant or a fragment thereof. In an embodiment, the disclosure provides a SAR comprising one or more heterologous antigen binding domains that are operationally linked to the entire or partial antigen (or ligand)-binding domain of a naturally occurring signaling receptor or a variant or fragment thereof wherein the naturally occurring signaling receptor is not TCRα, TCRβ, TCRγ, TCRδ or preTCRα. In an embodiment, the SAR of the disclosure retains at least some of the antigen binding properties of the non-TCR naturally occurring signaling receptor. In an embodiment, a SAR of the disclosure acquires novel antigen binding properties conferred by one or more of the heterologous antigen binding domains. In an embodiment, a SAR of the disclosure retains at least some of the antigen binding properties of the non-TCR naturally occurring signaling receptor and acquires novel antigen binding properties conferred by one or more of the heterologous antigen binding domains.

[0256] In an embodiment, the disclosure provides a double chain SAR comprising heterologous antigen binding domains derived from variable domains of a TCR (i.e., Vα, Vβ, Vδ or Vγ) that are operationally linked via optional linkers to the entire or partial extracellular domain of a naturally occurring signaling receptor. In an embodiment, the naturally occurring signaling receptor is an NTCRM (non-T cell receptor module).

[0257] In an embodiment, the disclosure provides a double chain SAR comprising heterologous antigen binding domains derived from variable domains of a TCR (i.e., Vα, Vβ, Vδ or Vγ) that are operationally linked via optional linkers to the hinge domain of an NTCRM (non-T cell receptor module) and/or a signaling adaptor (e.g., CD3ƒ, FcRγ, DAP10, DAP10 etc.) or variants or fragments thereof.

[0258] In an embodiment, the SAR does not comprise the entire extracellular domain of TCRα, TCRβ, TCRγ, TCRδ or pre-TCRα. In an embodiment, the SAR does not comprise the transmembrane domain of TCRα, TCRβ, TCRγ, TCRδ or pre-TCRα.

[0259] The schematic representations of the SARs of the disclosure are provided in FIGS. 1-5 and Tables A1-1 to A1-19.

[0260] In an embodiment, a naturally occurring receptor that can be used in the construction of a SAR of the disclosure may comprise a single polypeptide chain or multiple polypeptide chains. A naturally occurring receptor may be a component of a multi-chain receptor complex (e.g., T cell receptor complex).

[0261] In an embodiment, the SAR comprises more than one antigen binding domain. In an embodiment, the SAR comprise one or more heterologous (or non-naturally occurring) antigen binding domains. The exemplary heterologous antigen binding domains that can be used in the construction of the SAR of the disclosure include an autonomous antigen binding domain (e.g., fully human vH domain, vHH domain, single chain TCR, recombinant TCR or svd-TCR etc.), scFv, antibody, antibody fragment (vL, vH, Fab etc.), non-immunoglobulin antigen binding domain (e.g., Centyrin, affibody, DARPIN, ZIP domain, an adaptor, etc.), ligand, extracellular domain of a receptor (e.g., CD16A extracellular domain, NKp30 extracellular domain etc.), an autoantigen, a TCR, a TCR variable fragment (e.g., Va, Vb, Vg, Vd etc.) and variants and fragments thereof etc. In an exemplary embodiment, the one or more heterologous antigen binding domains comprise scTCR, svd-TCR or a TCR mimic scFv or a fragment thereof. In some embodiments, the SAR acquires TCR-like binding capabilities, e.g., ability to bind to a peptide/MHC complex.

[0262] The second-generation chimeric antigen receptor constructs in current clinical use (e.g., Axicabtagene Ciloleucel, Lisocabtagene Maraleucel etc.) comprise a heterologous antigen binding domain (e.g., scFv) operationally linked to the stalk (hinge), transmembrane, co-stimulatory and cytosolic domains derived from multiple different native receptors. In another aspect, the disclosure provides that a SAR (e.g., a next generation CAR) that comprises the native configuration of the transmembrane and cytosolic domains of a naturally occurring signaling receptor (e.g., CD16, NKp30, NKp44, NKp46, NKG2D, KIR2DS4 etc.) or a signaling adaptor (e.g., CD3ƒ, FcRγ, DAP10, DAP12 etc.) shows superior physiological cell signaling and regulation as compared to a SAR comprising non-native configuration of the transmembrane and cytosolic domains of a naturally occurring signaling receptor or a signaling adaptor. In another aspect, the disclosure provides that a SAR that comprises the native configuration of the transmembrane and cytosolic domains of a naturally occurring signaling receptor or a signaling adaptor shows superior in vitro and in vivo efficacy as compared to a SAR comprising non-native configuration of the transmembrane and cytosolic domains of a naturally occurring signaling receptor or a signaling adaptor.

[0263] In an embodiment, the SAR comprises one or more heterologous antigen binding domains that are operationally linked via optional linkers to the entire extracellular-, transmembrane- and cytosolic-domains of a naturally occurring signaling receptor or a signaling adaptor or a variant or a fragment thereof. In an embodiment, the SAR comprises one or more heterologous antigen binding domains that are operationally linked via optional linkers to the entire extracellular antigen binding domain, transmembrane- and cytosolic-domains of a naturally occurring signaling receptor or a variant or a fragment thereof. In an embodiment, the SAR comprises one or more heterologous antigen binding domains that are operationally linked via optional linkers to the partial or entire extracellular antigen binding domain of one naturally occurring receptor and the transmembrane- and cytosolic-domains of a different naturally occurring signaling receptor or a variant or a fragment thereof. In an embodiment, the SAR comprises one or more heterologous antigen binding domains that are operationally linked via optional linkers to the partial extracellular domain but the entire transmembrane- and cytosolic-domains of a naturally occurring signaling receptor or a signaling adaptor or a variant or a fragment thereof. In an embodiment, the SAR comprises one or more heterologous antigen binding domains that are operationally linked via optional linkers and/or spacers (e.g., hinge domains) to the transmembrane domain and optionally the cytosolic domain of a naturally occurring signaling receptor or a signaling adaptor or a variant or a fragment thereof. In an embodiment, the SAR comprises one or more heterologous antigen binding domains that are operationally linked via optional linkers to the hinge domain, transmembrane domain and optionally the cytosolic domain of a naturally occurring signaling receptor or a signaling adaptor or a variant or a fragment thereof.

[0264] In an embodiment, the different domains of a SAR are operationally linked via peptide bonds, i.e., they are part of a polypeptide chain.

[0265] In an embodiment, the SAR comprises an intracellular activation domain. In an exemplary embodiment, the SAR comprises an intracellular activation domain derived from a signaling adaptor. In exemplary embodiments, a SAR comprises intracellular activation domains derived from CD3ƒ, FcRγ, DAP10 or DAP12. In an embodiment, the activation domain of SAR comprises one or more ITAM motifs. In an embodiment, the SAR comprises an activation domain that possesses one or more ITAM motifs. In an embodiment, the SAR comprises an activation domain that possesses two or more ITAM motifs. In an embodiment, the SAR comprises an activation domain that possesses a single ITAM motif. In an embodiment, the SAR comprises an activation domain that lacks an ITAM motifs. In an embodiment, the SAR comprises an activation domain that comprises a tyrosine-based motif (YINM). In an embodiment, the SAR comprises an activation domain that recruits the p85 subunit of PI3K and/or Grb2. In an embodiment, the SAR comprises an activation domain that activates one or more of NFAT, PI3K, NF-κB and ERK signaling pathways.

[0266] In an embodiment, the SAR comprises an intracellular inhibitory domain. In an exemplary embodiment, the SAR comprises an intracellular inhibitory domain derived from PD1. In an embodiment, the inhibitory domain of SAR comprises one or more ITIM motifs.

[0267] In an embodiment, the SAR is capable of recruiting signaling adaptors. In an exemplary embodiment, the SAR is capable of recruiting one or more signaling adaptors selected from the group of, but not limited to, CD3ƒ, FcRγ, DAP10 and DAP12. In an embodiment, the SAR is capable of recruiting signaling adaptors via interactions with its hinge, transmembrane or cytosolic domains. In an embodiment, the SAR is capable of recruiting signaling adaptors via interactions with one of more of the hinge, transmembrane domain and cytosolic domains. In an embodiment, the immune cells (e.g., T cell, NK cells, macrophages, granulocytes, dendritic cells etc.) expressing the SAR of the disclosure recruit signaling adaptors when their one or more heterologous antigen binding domains bind to the target antigens. In an embodiment, the immune cells (e.g., T cell, NK cells, macrophages, granulocytes, dendritic cells etc.) expressing the SAR of the disclosure activate, proliferate, secrete cytokines and/or modulate (induce or suppress) killing of the target cells and have MHC-restricted and/or MHC-non-restricted antibody-type specificity

[0268] In an embodiment, the SAR lacks a cytosolic domain. In an embodiment, the SAR comprise a cytosolic domain that is less than 100 amino acids in length (i.e., less than 90, 80, 70, 60, 50, 50, 40, 30, 25, 20, 15, 10, 5 or 2 amino acids in length. In an embodiment, the SAR comprise a cytosolic domain that is less than 50 amino acids in length. In an embodiment, the SAR comprise a cytosolic domain that is less than 25 amino acids in length. In an embodiment, the SAR comprise a cytosolic domain that is less than 10 amino acids in length. In an embodiment, the SAR comprise a cytosolic domain that is less than 5 amino acids in length. In an embodiment, the SAR lacks an intracellular activation domain. In an embodiment, the SAR lacks an intracellular domain containing ITAM motifs. In an embodiment, the SAR lacks an intracellular signaling domain. In an embodiment, the SAR lacks an intracellular costimulating domain. In an embodiment, the SAR lacks an intracellular domain derived from one or more of CD3z, 2B4, 4-1BB, CD28, ICOS, CD2, CD40, DAP10 and DAP12. In an embodiment, the SAR lacks an intracellular signaling domain that is capable of directly recruiting a protein kinase or a protein phosphatase.

[0269] In an embodiment, a SAR lacks a co-stimulatory domain inserted between the transmembrane and the cytosolic domain of a naturally occurring signaling receptor or a signaling adaptor or a variant or a fragment thereof. In contrast to a second-generation CAR, in one embodiment, the transmembrane and cytosolic domains of a SAR of the current disclosure are derived from a single naturally occurring signaling receptor or a signaling adaptor or a variant or a fragment thereof. In another embodiment, the transmembrane and cytosolic domains of a SAR of the current disclosure are derived from a single naturally occurring signaling receptor or a signaling adaptor or a variant or a fragment thereof and are not interrupted by a heterologous co-stimulatory domain derived from a co-stimulatory receptor. In another embodiment, the transmembrane and cytosolic domains of a SAR of the current disclosure are derived from a single naturally occurring signaling receptor or a signaling adaptor and abut each other. In another embodiment, hinge, transmembrane and cytosolic domains of a SAR of the current disclosure are derived from a single naturally occurring signaling receptor or a signaling adaptor or a variant thereof and abut each, i.e., they are present in one continuous chain without interruption.

[0270] In an embodiment, the SAR further comprises one or more co-stimulatory domains. In an exemplary embodiment, the SAR comprises one or more co-stimulatory domains derived from CD28, 4-1BB, CD27, OX40, CD2, CD40, CD81 or 2B4 or variants thereof. Other costimulatory domains are known in the art and can be used in alternate embodiments of the disclosure. In an embodiment, the one or more co-stimulatory domains are located in the juxtamembrane region of the SAR. In an embodiment, the one or more co-stimulatory domains are located C-terminus to the transmembrane region of the Type I transmembrane SAR. In an embodiment, the one or more co-stimulatory domains are present N-terminus to the transmembrane region of a type II transmembrane SAR. In another embodiment, the SAR lacks a co-stimulatory domain.

[0271] In an embodiment, the disclosure provides a SAR comprising one or more co-stimulatory domains that are inserted between the transmembrane and cytosolic domains derived from a naturally occurring signaling receptor (e.g., CD16A or NKp30 etc.) or a signaling adaptor (e.g., CD3ƒ, FcRγ etc.) or a variant or a fragment thereof. In an exemplary embodiment, the disclosure provides a SAR comprising one or more heterologous antigen binding domains that are operationally linked to the extracellular domain derived from a naturally occurring signaling receptor (e.g., CD16A, CD16B, CD64, NKp30 etc.), which in turn is linked to a hinge domain (e.g., CD8 hinge or CD28 hinge), a transmembrane domain (e.g., CD8 or CD28 transmembrane domain), a costimulatory domain (e.g., 4-1BB or CD28 co-stimulatory domain) and an activation domain (e.g., CD3ƒ or FcRγ activation domain). An exemplary such SAR is represented by SEQ ID NO:10818 and 10821. In another exemplary embodiment, the disclosure provides a SAR comprising one or more heterologous antigen binding domains that are operationally linked to the extracellular hinge domain derived from a signaling adaptor (e.g., CD3ƒ, FcRγ etc.), which in turn is linked to a transmembrane domain (e.g., CD3ƒ or FcRγ transmembrane domain), a costimulatory domain (e.g., 4-1BB, CD28, 2B4 or OX40 co-stimulatory domain) and an activation domain (e.g., CD3ƒ or FcRy activation domain etc.).

[0272] In an embodiment, SAR comprises one or more heterologous antigen binding domains (e.g., scFv, vHH, FHVH, centyrin, scTCR, svd-TCR etc.) that are operationally linked via optional linkers to the amino-terminus or near the amino-terminus of the extracellular domain of a naturally occurring (or native) signaling receptor or a signaling adaptor or a variant or a fragment thereof. In an embodiment, SAR comprises one or more heterologous antigen binding domains that are operationally linked via optional linkers to the amino-terminus or near the amino-terminus of the hinge (or spacer) domain of a naturally occurring signaling receptor or a signaling adaptor or a variant or a fragment thereof. In an embodiment, SAR comprises one or more heterologous antigen binding domains that are operationally linked via optional linkers to the amino-terminus or near the amino-terminus of the transmembrane domain of a naturally occurring signaling receptor or a signaling adaptor or a variant or a fragment thereof. In an embodiment, SAR comprises one or more heterologous antigen binding domains that are operationally linked via optional linkers to the hinge (spacer) domain, the transmembrane domain and cytosolic domain of a naturally occurring signaling receptor or a signaling adaptor or a variant or a fragment thereof. In an embodiment, SAR comprises one or more heterologous antigen binding domains that are operationally linked via optional linkers to the transmembrane domain and the cytosolic domain of a naturally occurring signaling receptor or a signaling adaptor or a variant or a fragment thereof.

[0273] In an exemplary embodiment, the naturally occurring (or endogenous) signaling receptor comprising a SAR is a type I (or group 1) transmembrane protein with its N-terminus on the extracellular side and C-terminus on cytosolic side. Exemplary such type I (or group 1) endogenous receptors include CD16A, NKp30, NKp44, NKp46, KIR2DL1, KIR2DL2, KIR2DL3, KIR2DL5A, KIR2DL5B, KIR3DL1, KIR3DL2, KIR3DL4, KIR2DL4, KIR2DS1, KIR2DS2, KIR2DS3, KIR2DS4, KIR2DS5, KIR3DS1, CRTAM, TIGIT, CD96, 2B4, SLAMF6, SLAMF7, CD27, CD100, CD160, ILT2/LILRB1, CD33, SIGLEC-7, SIGLEC-9, CD32 and CD64 etc.

[0274] In one embodiment, the disclosure provides a synthetic antigen receptor (SAR) comprising one or more heterologous antigen binding domains that are operationally linked to the amino-terminus or near the amino-terminus of a type I transmembrane naturally occurring (or native) signaling receptor via an optional linker. In an embodiment, the SAR retains the binding capability and function of the naturally occurring signaling receptor but in addition acquires the binding capability conferred by the one or more heterologous antigen binding domains. In an embodiment, the one or more heterologous antigen binding domains comprise scTCR, svd-TCR or a TCR-mimic antibody or fragment thereof. In some embodiments, the SAR acquires TCR like binding capabilities. In an embodiment, SAR comprises one or more heterologous antigen binding domains that are operationally linked to the amino-terminus or near the amino-terminus of an endogenous receptor that is a type I transmembrane protein. In an embodiment, the SAR comprises a heterologous (non-natural) antigen binding domain that is operationally linked via an optional linker to the N-terminus or near the N-terminus of CD16A, CD16B, NKp30, NKp44, NKp46, KIR2DL1, KIR2DL2, KIR2DL3, KIR2DL5A, KIR2DL5B, KIR3DL1, KIR3DL2, KIR3DL4, KIR2DL4, KIR2DS1, KIR2DS2, KIR2DS3, KIR2DS4, KIR2DS5, KIR3DS1, CRTAM, TIGIT, CD96, 2B4, SLAMF6, SLAMF7, CD27, CD100, CD160, ILT2/LILRB1, CD33, SIGLEC-7, SIGLEC-9, CD32 or CD64. In an embodiment, the SAR also comprises an N-terminal signal peptide. In an embodiment, the SAR comprises one or more antigen binding domains that are located C-terminus to a signal peptide.

[0275] In an embodiment, a SAR comprises one or more heterologous antigen binding domains that are operationally linked via one or more optional linkers to a polypeptide comprising the hinge (spacer), transmembrane and cytosolic domains of CD16A, CD16B, NKp30, NKp44, NKp46, KIR2DL1, KIR2DL2, KIR2DL3, KIR2DL5A, KIR2DL5B, KIR3DL1, KIR3DL2, KIR3DL4, KIR2DL4, KIR2DS1, KIR2DS2, KIR2DS3, KIR2DS4, KIR2DS5, KIR3DS1, CRTAM, TIGIT, CD96, 2B4, SLAMF6, SLAMF7, CD27, CD100, CD160, ILT2/LILRB1, CD33, SIGLEC-7, SIGLEC-9, CD32 or CD64.

[0276] In an exemplary embodiment, the naturally occurring (or endogenous) signaling receptor is a type II (or group 2) transmembrane protein with its C-terminus on the extracellular side and N-terminus on cytosolic side. The disclosure provides a general method for generating a fusion protein between a Type I membrane protein and a Type II membrane protein to generate a fusion in which one or more modules of a Type I membrane protein are functionally linked to the entire or partial region of a type II membrane protein. In an exemplary embodiment, N-terminus of the antigen binding domain of a type I protein lacking the signal peptide sequence is operationally linked via an optional linked to the C-terminus of a type II membrane protein. In an embodiment, a SAR comprises one or more heterologous antigen binding domains that are operationally linked via one or more optional linker to the carboxy-terminus or near the carboxy-terminus of a naturally occurring (or endogenous) signaling receptor. Exemplary such type II (or group 2) endogenous receptors include, but are not limited to, NKG2D, NKG2A, NKG2C, NKG2F, NKG2E, NKG2H, KLRG1, CD161 and CD94 etc. In an embodiment, the one or more heterologous antigen binding domains (e.g., vHH, FHVH, centyrin, scTCR, svd-TCR) are operationally linked in frame via one or more optional linkers to the C-terminus or near the C-terminus of an endogenous receptor that is a type II (group 2) transmembrane protein. In an embodiment, a SAR comprises one or more heterologous antigen binding domains that are operationally linked via optional linkers to the C-terminus or near the C-terminus of NKG2D, NKG2A, NKG2C, NKG2F, NKG2E, NKG2H, KLRG1, CD161 or CD94. Exemplary such SARs comprising a Her2 and Her3 vHH domains attached to the C-terminus of NKG2D are represented by SEQ ID NO (DNA):7696-7697 and SEQ ID NO (PRT):8388-8389, respectively. In an embodiment, the one or more heterologous antigen binding domains are operationally linked via optional linkers to the hinge domain of an endogenous receptor that is a type II (group 2) transmembrane protein. In an embodiment, the one or more heterologous antigen binding domains are operationally linked via optional linkers to the hinge domain of NKG2D, NKG2A, NKG2B, NKG2C, NKG2F, NKG2E, NKG2H, KLRG1, CD161 or CD94.

[0277] Efficient expression of NKG2D on the cell surface requires the presence of DAP10. Provided herein is a strategy to obtain effector cells stably overexpress an NKG2D-SAR (i.e., a SAR comprising the transmembrane domain and/or cytosolic domain of NKG2D) alone or along with DAP10 by genetically engineering a cell (e.g., iPSC) to introduce NKG2D-SAR, and optionally DAP10 to the cell (e.g., iPSC), and then derive effector cells including NK and T cells from directed iPSC differentiation. The disclosure also provides a strategy for efficient expression of an NKG2D-SAR in a cell that lacks DAP10 or expresses low levels of DAP10 by ectopic expression of DAP10 as an accessory module along with a SAR comprising NKG2D transmembrane domain.

[0278] CD94/NKG2C is a heterodimeric receptor that binds to HLA-E and associates with DAP12, a protein containing an immunoreceptor tyrosine-based activating motif. Efficient expression of CD94/NKG2C on the cell surface requires the presence of DAP 12 and charged amino acids in the transmembrane domains of DAP 12 and NKG2C mediate this interaction. Provided herein is a strategy to obtain effector cells stably overexpress an NKG2C-SAR (i.e., a SAR comprising the transmembrane domain of NKG2C) alone or along with DAP12 by genetically engineering a cell (e.g., iPSC) to introduce NKG2C-SAR, and optionally DAP12 to the cell (e.g., iPSC), and then derive effector cells including NK and T cells from directed iPSC differentiation. In some embodiments, NKG2C-SAR is further co-expressed with CD94 or a CD94-SAR.

[0279] In an iPSCs or an effector cell derived therefrom comprising an overexpressed NKG2C-SAR, the cell further comprises overexpressed CD94 or CD94-SAR and/or DAP12. In one embodiment, NKG2C-SAR and CD94 (or a CD94-SAR) and/or DAP12 are expressed in separate constructs. In another embodiment, NKG2C-SAR and CD94 (or a CD94-SAR) and/or DAP12 are co-expressed in a bi-cistronic or tri-cistronic construct and are linked by a self-cleaving 2A coding sequence. In another embodiment, NKG2C-SAR, CD94 (or CD94-SAR) and DAP 12 are expressed in separate constructs.

[0280] The disclosure provides that a SAR comprising the transmembrane domain of NKG2A, NKG2B, NKG2C, NKG2E, NKG2F, NKG2H can be similarly efficiently expressed by co-expression of CD94 and/or signaling adaptors (e.g., DAP10, DAP12 etc.) that are known to associate with them.

[0281] In one embodiment, the disclosure provides a SAR comprising one or more heterologous antigen binding domains that are operationally linked via optional linkers to the carboxy-terminus, or near the carboxy-terminus of a type II transmembrane naturally occurring signaling receptor. In an embodiment, the SAR retains the binding capability and function of the natural occurring signaling receptor but in addition acquires the binding capability conferred by the heterologous antigen binding domain. In one embodiment, the disclosure provides one or more heterologous antigen binding domains that are operationally linked in frame via optional linkers to the hinge domain or transmembrane domain of a type II transmembrane naturally occurring signaling receptor to generate a synthetic antigen receptor. In an embodiment, the resulting SAR retains the binding capability and function of the native signaling receptor but in addition acquires the binding capability conferred by the heterologous antigen binding domain. In an embodiment, a SAR of the disclosure retains the binding properties and physiological regulation of a naturally occurring receptor while acquiring additional antigen binding capabilities that allows it to respond to target antigens in addition to those to which the naturally occurring receptor can respond.

[0282] The disclosure also provides single-chain SARs comprising one or more heterologous antigen binding domains that are operationally linked via optional linkers to the extracellular domain of a naturally occurring signaling chain or a signaling adaptor or a variant thereof. The disclosure also provides single-chain SARs comprising one or more heterologous antigen binding domains that are operationally linked via optional linkers to the hinge (spacer) domain of a naturally occurring signaling chain or a signaling adaptor or a variant thereof. The disclosure also provides single-chain SARs comprising one or more heterologous antigen binding domains that are operationally linked via optional linkers to the transmembrane domain of a naturally occurring signaling chain or a signaling adaptor or a variant thereof. Exemplary signaling chains or signaling adaptors include but are not limited to CD3ƒ, FcRγ, DAP10 or DAP12 or variants thereof. In an embodiment, the signaling chain/adaptor further comprises a co-stimulatory domain.

[0283] In an embodiment, the disclosure provides a SAR comprising one or more heterologous antigen binding domains that are operationally linked via optional linkers to the entire or partial extracellular domain, hinge domain or transmembrane domain of a NCAM (non CD3 adaptor module).

[0284] In an embodiment, the disclosure provides a SAR comprising one or more heterologous antigen binding domains that are operationally linked to the entire or partial extracellular domain, hinge domain or transmembrane domain of a signaling adaptor via optional linkers wherein the signaling adaptor (or a signaling chain) is not CD3R, CD3γ, CD36, CD3ƒ. In an embodiment, the signaling adaptor is not FcRγ.

[0285] In an embodiment, the one or more heterologous antigen binding domains of a single chain SAR comprise an autonomous antigen binding domains (AABD), e.g., a single domain antibody, single vH domain, FHVH, vHH domain, svd-TCR, non-immunoglobulin antigen binding scaffold (e.g., DARPIN, an affibody, an affilin, an adnectin, an affitin, an obodies, a repebody, a fynomer, an alphabody, an avimer, an atrimer, a centyrin, a pronectin, an anticalin, a kunitz domain, an Armadillo repeat protein or a fragment thereof). In an embodiment, the one or more heterologous antigen binding domains of a single chain SAR comprise an antibody or antibody fragment (e.g., vL, vH, Fab, Fab′2, scFv and scTCR etc.).

[0286] As SARs are modular in format, their different domains can be replaced by other domains to generate new SARs with diverse biological activities and properties. Thus, the extracellular domain, hinge domain, transmembrane domain and/or cytosolic domain of one SAR can be substituted by the extracellular domain, hinge domain, transmembrane domain and/or cytosolic domain of another SAR as long as the resulting SAR possesses at least one of the biological activities (e.g., antigen binding, cell signaling etc.) of the original SARs. In an embodiment, the disclosure provides that new modules (co-stimulatory domains) can be inserted in a SAR. In an embodiment, the disclosure provides a SAR comprising one more heterologous antigen binding domains that are operationally linked via optional linkers to the entire or partial extracellular domain of one naturally occurring signaling receptor, which in turn, is operationally linked to the transmembrane and cytosolic domain of a different naturally occurring receptor or a variant thereof. In an exemplary embodiment, the extracellular domain of a SAR comprising the CD16A extracellular, transmembrane and cytosolic domains is replaced by the extracellular domain of CD64 to generate a new SAR (SEQ ID NO: 4722) comprising a CD20 vHH domain, a CD64 extracellular domain, CD16A transmembrane domain and CD16A cytosolic domain.

[0287] In an embodiment, the different domains of a SAR are derived from a single naturally occurring receptor or signaling adaptor. In an embodiment, the different domains of a SAR are derived from more than one naturally occurring receptor or signaling adaptor. In an embodiment, the SAR comprises one or more heterologous antigen binding domains that are operationally linked via optional linkers to the partial or entire antigen binding domain of one naturally occurring receptor and the hinge, transmembrane- and cytosolic-domains derived from one or more different receptors or variants or fragments thereof. In an exemplary embodiment, a SAR comprises from N to C terminus a CD19 scFv, a CD16 antigen binding domain (D1 and D2), a CD8 hinge domain, a CD8 transmembrane domain, a 4-1BB co-stimulatory domain and a CD3z activation domain. The amino acid sequence of such a SAR is presented in SEQ ID NO: 10836. In another exemplary embodiment, a SAR comprises from N to C terminus a CD19 scFv, a CD16A antigen binding domain (D1 and D2), a CD16A hinge domain, a CD28 transmembrane domain, a CD28 co-stimulatory domain and a CD3z activation domain. In another exemplary embodiment, a SAR comprises from N to C terminus a CD19 scFv, a CD64 antigen binding domain, a CD16A hinge domain, a CD16A transmembrane domain, a CD16A cytosolic domain. The amino acid sequence of such a SAR is presented in SEQ ID NO: 10832.

[0288] In an embodiment, SAR comprises one or more heterologous antigen binding domains that are operationally linked via optional linkers to the hinge domain, the transmembrane domain and the cytosolic domain of a naturally occurring signaling receptor or a variant thereof where the hinge, the transmembrane domain and the cytosolic domains are all derived from a single naturally occurring signaling receptor or a signaling adaptor or a variant or a fragment thereof. In an embodiment, the hinge domain, the transmembrane domain and the cytosolic domains comprising the SIR are derived from a single naturally occurring signaling receptor (e.g., CD16A) or a signaling adaptor (e.g., CD3ƒ) or a variant or a fragment thereof. In an alternate embodiment, the hinge domain, the transmembrane domain and the cytosolic domains comprising the SIR are derived from more than one naturally occurring signaling receptors (e.g., hinge and transmembrane domains of CD16A are operationally linked to the cytosolic domain of NKp30 etc.) or signaling adaptors (e.g., hinge and transmembrane domains of CD16A are operationally linked to the cytosolic domain of FcRγ etc.). In an embodiment, SAR comprises one or more heterologous antigen binding domains that are operationally linked via optional linkers to the hinge domain, the transmembrane domain and the cytosolic domain of a naturally occurring signaling receptor where the hinge, the transmembrane domain and the cytosolic domains are derived from more than one naturally occurring signaling receptor or a signaling adaptor or a variant or a fragment thereof.

[0289] In an embodiment, the disclosure provides a method for generating a non-native protein (i.e., a synthetic protein) comprising two or more chains with the following general formula from amino (N) to carboxy (C) termini:
[0290] Chain 1: SP1-A1-L1-H1-M1-(C1)n
[0291] Chain 2: SP2-A2-L2-H2-M2-(C2)n

[0292] Where SP1 and SP2 are optional signal peptides that are cleaved from the mature polypeptide chains; A1 and A2 are two protein domains that can interact with each other, L1 and L2 are optional linkers, H1 and H2 are optional hinge or spacer domains, M1 and M2 are membrane-anchoring or transmembrane domains and C1 and C2 are optional cytosolic domains. In an embodiment, the A1 and A2 domains are not derived from antibodies. In an embodiment, the A1 and A2 domains are not antibody fragments. In an embodiment, A1 and A2 domains are heterologous to M1 and M2 domains, i.e., A1 and M1 domains are derived from different proteins and similarly A2 and M2 domains are derived from different proteins. In an exemplary embodiment, A1 and A2 domains are derived from a TCR (e.g., Vα and VP domains of a TCR) and M1 and M2 domains are derived from CD3ƒ. In an embodiment, A1 and A2 domains are not autonomous domains. In an embodiment, A1 and A2 domains have affinity for each other that is greater than their affinity for an irrelevant protein. In an embodiment, A1 and A2 domains may associate with each other to generate an antigen binding domain. In an embodiment, the non-native protein is a synthetic antigen receptor. In an embodiment, L1 and L2 linkers are long linkers. In an embodiment, L1 and L2 linkers are Ig like linkers. In an embodiment, L1 and L2 linkers are joined by one or more disulfide bonds. In an embodiment, M1 and M2 domains are transmembrane domains. In an embodiment, M1 and M2 domains are derived from the same protein (e.g., CD3ƒ). In an embodiment, M1 and M2 domains are derived from different proteins (e.g., CD3ƒ and FcRy). In an embodiment, M1 and M2 domains are identical in sequence and/or possess greater than 70%, (e.g., 75%, 80%, 85%, 90%, 95%, 98%, 99%, 99.9% etc.) amino acid sequence homology. In an embodiment, M1 and M2 domains associate with each other. In an embodiment, M1 and M2 domains are joined by a disulfide bond. In an embodiment, M1 and/or M2 domains can recruit one or more signaling adaptors. In an embodiment, C1, C2 domains are cell signaling domains (e.g., activation domain or co-stimulatory domain etc.). In an embodiment, each chain may possess more than one cytosolic domain. In an embodiment, both chains are expressed on the cell surface where the A1-L1-H1 and A2-L2-H2 segments are located on the extracellular side. The disclosure provides nucleic acid, amino acid sequence encoding the synthetic protein, one or more vectors encoding the synthetic protein and cells expressing the synthetic protein.

[0293] The disclosure also provides a double chain SAR (such as an isolated double chain SAR). In one embodiment, the disclosure provides a double chain SAR comprising one or more heterologous antigen binding domains that are operationally linked via optional linkers to at least one module comprising the entire or partial extracellular domain, transmembrane domain and optionally the cytosolic domain of a signaling receptor, or a signaling adaptor or a variant or a fragment thereof. In an embodiment, the signaling receptor is a non-TCR signaling receptor. In an embodiment, the signaling adaptor is a non-CD3 adaptor. In an embodiment, the signaling adaptor is not CD3ƒ.

[0294] In one embodiment, the disclosure provides a double chain SAR comprising two chains each of which comprises at least one antigen binding domain (e.g., vL, vβ, Vα, Vβ, Vγ or Vδ etc.) that is operationally linked via an optional peptide linker (e.g., IgCL, IgCH1 etc.) to a membrane associated module (MAM) comprising the transmembrane domain or membrane associated domain of a signaling receptor (e.g., CD16A, CD16B, NKp30 etc.), or a signaling adaptor (e.g., CD3ƒ, FcRy) or a variant or a fragment thereof. In some embodiments, the MAM further comprises the entire or partial extracellular antigen binding domain, the hinge domain and/or the cytosolic domain of a signaling receptor and/or the hinge and/or cytosolic domain of a signaling adaptor. In an embodiment, the signaling receptor is a non-TCR signaling receptor. In an embodiment, the module is an NTCRM. In an embodiment, the signaling adaptor is a non-CD3 adaptor (i.e., NCAM). In an embodiment, the signaling adaptor is not CD3ƒ. In an embodiment, the MAM does not comprise the transmembrane domain of TCRα, β, γ, δ, preTCRα, CD3ƒ, CD3ε, CD3γ or CD3δ. In some embodiments, at least one antigen binding domain (e.g., vL, Vα, or Vγ) of the first chain associates with at least one complementary antigen binding domain (e.g., vH, Vβ or Vδ) of the second chain to form an antigen binding module (e.g., Fv or Fc-TCR) that specifically binds to a target antigen. In some embodiments, the first polypeptide chain and the second polypeptide chain are linked via one or more disulfide bonds. In some embodiments, the first peptide linker and the second peptide linker are linked via one or more disulfide bonds. In some embodiments, the first peptide linker and/or the second peptide linker are, individually, from about 5 to about 500 amino acids in length. In an embodiment, the first and the second antigen binding domains comprise complementary chains (e.g., vL and vH, Vα and Vβ or Vγ and Vδ). In some embodiments, the first and the second polypeptide chains further comprise one or more autonomous antigen binding domains (AABD) that are attached to the N-terminus or near the N-terminus of the first (e.g., vL, Vα or Vγ) and/or the second (e.g., vH, Vβ or Vδ) antigen binding domains. In some embodiments, the target antigen is a cell surface antigen. In some embodiments, the cell surface antigen is selected from the group consisting of protein, carbohydrate, and lipid. In an exemplary embodiment, the target antigen is one or more of the antigens listed in Table B. In exemplary embodiments, the cell surface antigen is selected from the group of but not limited to one or more of: CD2, CD5, CD19, CD20, CD22, CD33, CD70, CD123, CD138, CD179b, CLL-1, FLT3, Claudin 18.2, BCMA, GCC, MPL, SLAMF7, ROR1, ROR2, GPRC5D, FCRL5, MSLN, EGFR, EGFRviii, PSMA, PSCA, KLK2, IL13Ra2, TROP2, PTK7, DLL3, Mucd, Mucl6 or Her2. In some embodiments, the target antigen is a complex comprising a peptide and a major histocompatibility complex (MHC) protein. In an exemplary embodiment, the peptide antigen is one or more of the antigens listed in Table B. In exemplary embodiments, the peptide/MHC complex comprises a peptide derived from one or more of NY-ESO-1, MAGE-A2, MAGE-A3, MAGE4, WT1, AFP, TERT, MART-1, pp66-CMV, HPV16-E7, PRAME, EBV-LMP2A, HIV-1, PSA or gp100.

[0295] In one embodiment, the disclosure provides a double chain SAR comprising two chains each of which comprises one or more heterologous antigen binding domains that are operationally linked via optional linkers to a module comprising the hinge, transmembrane and optionally the cytosolic domain of a signaling receptor, or a signaling adaptors or a variant or a fragment thereof. In one embodiment, the disclosure provides a double chain SAR comprising two chains each of which comprises one or more heterologous antigen binding domains that are operationally linked via optional linkers to a module comprising the transmembrane and optionally the cytosolic domain of a signaling receptor, a signaling adaptor or a variant or a fragment thereof. In one embodiment, the disclosure provides a double chain SAR comprising two chains each of which comprises one or more heterologous antigen binding domains that are operationally linked via optional linkers to a module comprising the transmembrane domain of a signaling receptor, or a signaling adaptor or a variant or a fragment thereof. In one embodiment, the disclosure provides a double chain SAR comprising two chains each of which comprises one or more heterologous antigen binding domains that are operationally linked via optional linkers to a module comprising the cytosolic domain of a signaling receptor, a signaling adaptors or variant or a fragment thereof. In an embodiment, the signaling receptor is a non-TCR signaling receptor. In an embodiment, the module is an NTCRM. In an embodiment, the signaling adaptor is a non-CD3 adaptor (i.e., NCAM). In an embodiment, the signaling adaptor is not CD3ƒ.

[0296] In one embodiment, the disclosure provides a double chain SAR comprising one or more heterologous antigen binding domains where each chain is operationally linked via optional linkers to a module (e.g., NTCRM) comprising the extracellular, transmembrane or the cytosolic domain of a signaling receptor (e.g., native receptors), a signaling adaptor (e.g., NCAM) or a variant or a fragment thereof. In an embodiment, the signaling receptor and signaling adaptors comprising a double chain SAR are naturally occurring. In an embodiment, the signaling receptor and signaling adaptors comprising a double chain SAR are non-naturally occurring. In an embodiment, the signaling receptor and signaling adaptors comprising a double chain SAR are non-T cell receptors and non-CD3 adaptors. In an embodiment, the signaling receptor and signaling adaptors comprising a double chain SAR are non-T cell receptors and non-CD3 adaptors that are naturally occurring.

[0297] In one embodiment, the disclosure provides a double chain SAR comprising one or more heterologous antigen binding domains that are operationally linked via optional linkers to at least one module (e.g., NTCRM) comprising the extracellular, transmembrane or the cytosolic domain of a naturally occurring signaling receptor (e.g., CD16A), a signaling adaptor (e.g., FcRy) or a variant or a fragment thereof.

[0298] The present application in one aspect provides a construct (such as an isolated construct) comprising one or more heterologous antigen binding domains fused to a non-T cell receptor module (NTCRM). In an exemplary embodiment, a NTCRM is derived from but not limited to one or more of the following non-TCR receptors: CD16A, CD16B, CD64, CD32, NKp30, NKp44, NKp46, KIR2DL1, KIR2DL2, KIR2DL3, KIR2DL5A, KIR2DL5B, KIR3DL1, KIR3DL2, KIR3DL4, KIR2DL4, KIR2DS1, KIR2DS2, KIR2DS3, KIR2DS4, KIR2DS5, KIR3DS1, DNAM-1, 2B4, OX40, CD28, 4-1BB, CD27, CD81, CD2, CD5, TNFR-I, TNFR-II, Fas, CD30, CD40, CRTAM, TIGIT, CD96, SLAMF6, SLAMF7, CD100, CD160, and ILT2.

[0299] In some embodiments, the SAR comprises one or more heterologous antigen-binding domains that specifically bind to a target antigen and a non-T cell receptor module (NTCRM) capable of recruiting at least one signaling adaptor. In an embodiment, the signaling adaptor is a non-CD3 adaptor (i.e., NCAM). In some embodiments, the target antigen is a complex comprising a peptide and an MHC protein (such as an MHC class I protein or an MHC class II protein). In some embodiments, the target antigen is a cell-surface antigen.

[0300] In some embodiments, there is provided a SAR (such as an isolated SAR) that specifically binds to a target antigen, wherein the SAR comprises: a) a first polypeptide chain comprising a first antigen-binding domain comprising a vL, a Vα or a Vγ domain and a first Membrane associated module (MAM); and b) a second polypeptide chain comprising a second antigen-binding domain comprising a vH, a Vβ or a Vδ domains and a second Membrane associated module (MAM), wherein the vL, Vα or Vγ domain of the first antigen-binding domain and the complementary vH, Vβ or Vδ domain of the second antigen-binding domain form a Fv or TCR-Fv like antigen-binding module that specifically binds to the target antigen, and wherein the first MAM and the second MAM form a non-T cell receptor module (NTCRM), and wherein the NTCRM is capable of activating at least one signaling pathway and/or recruiting at least one signaling adaptor. In an embodiment, the first MAM and the second MAM do not comprise the transmembrane domain of a TCR chain selected from TCRα, TCRβ, TCRγ, TCRδ or preTCRα. In an embodiment, the first MAM or the second MAM do not comprise the transmembrane domain of a TCR chain selected from TCRα, TCRβ, TCRγ, TCRδ or preTCRα. In an embodiment, the NTCRM does not comprise the transmembrane domain of two TCR chain selected from i) TCRα and TCRβ, ii) TCRγ and TCRδ, or iii) preTCRα and TCRβ. In an embodiment, the first MAM and the second MAM do not comprise the transmembrane domain of a CD3 chain selected from CD3R, CD3γ, CD3δ or CD3ƒ. In an embodiment, the first MAM and the second MAM do not comprise the transmembrane domain of a TCR chain and a CD3 chain. In an embodiment, the first MAM and the second MAM do not comprise the transmembrane domain of CD3ƒ. In an exemplary embodiment, a NTCRM is derived from but not limited to one or more of the following non-TCR receptors: CD16A, CD16B, CD64, CD32, NKp30, NKp44, NKp46, KIR2DL1, KIR2DL2, KIR2DL3, KIR2DL5A, KIR2DL5B, KIR3DL1, KIR3DL2, KIR3DL4, KIR2DL4, KIR2DS1, KIR2DS2, KIR2DS3, KIR2DS4, KIR2DS5, KIR3DS1, DNAM-1, 2B4, OX40, CD28, 4-TBB, CD27, CD81, CD2, CD5, TNFR-I, TNFR-II, Fas, CD30, CD40, CRTAM, TIGIT, CD96, SLAMF6, SLAMF7, CD100, CD160, and ILT2. In some embodiments, the signaling adaptor is selected from but not limited to one or more of CD3ƒ, FcRγ, DAP10 and/or DAP12 or variants or fragments thereof. In some embodiments, the signaling adaptor is a non-CD3 adaptor (NCAM). In some embodiments, the signaling adaptor is not CD3ƒ. In some embodiments, the first polypeptide chain and the second polypeptide chain are linked via one or more disulfide bonds. In some embodiments, the first polypeptide chain further comprises a first peptide linker between the first antigen-binding domain and the first MAM. In some embodiments, the second polypeptide chain further comprises a second peptide linker between the second antigen-binding domain and the second MAM. In some embodiments, the first polypeptide chain and the second polypeptide chain are linked via one or more disulfide bonds. In some embodiments, the first peptide linker and/or the second peptide linker are, individually, from about 5 to about 500 amino acids in length. In some embodiments, the first and/or second peptide linkers comprise, individually, a constant domain or fragment thereof from an immunoglobulin or T cell receptor subunit. In some embodiments, the first and/or second peptide linkers comprise, individually, a CH1, CH2, CH3, CH4 or CL antibody domain, or a fragment thereof. In some embodiments, the first and/or second peptide linkers comprise, individually, a Cα, Cβ, Cγ, or Cδ TCR domain, or a variant or a fragment thereof. In exemplary embodiments, the first and/or second linkers comprise, individually, an Ig like linker (e.g., IgCL, IgCH1 etc.) derived from an immunoglobulin (e.g., SEQ ID NO: 3536-3551) or a TCR-Ig like linker (e.g., TCRb-Ig3, SEQ ID NO: 3560; TCRa-Ig3, SEQ ID NO:3562; TCRg-Ig3, SEQ ID NO: 3566; or TCRd-Ig3, SEQ ID NO: 3568 etc.) or a variant or a fragment thereof. In some embodiments, a vL domain is attached to an IgCL linker and a vH domain is attached to an IgCHT linker. In some embodiments, a vL domain is attached to an IgCHT linker and a vH domain is attached to a IgCL linker. In some embodiments, a Vα domain is attached to a Cu-derived linker (e.g., TCRa-Ig3) and Vβ domain is attached to a Cβ derived linker (e.g., TCRb-Ig3). In some embodiments, a Vβ domain is attached to a Cu-derived linker (e.g., TCRa-Ig3) and Vα domain is attached to a Cβ derived linker (e.g., TCRb-Ig3). In some embodiments, a Vγ domain is attached to a Cγ-derived linker (e.g., TCRg-Ig3) and Vδ domain is attached to a Cδ derived linker (e.g., TCRd-Ig3). In some embodiments, a Vγ domain is attached to a Cδ-derived linker (e.g., TCRd-Ig3) and Vδ domain is attached to a Cy derived linker (e.g., TCRg-Ig3). In some embodiments, other configurations of variable domains and linkers are envisioned. In some embodiments, first and/or second peptide linkers comprise mutations that increase the expression, affinity and the pairing of the two polypeptide chains. In an embodiment, the first and the second antigen binding domains comprise complementary chains (e.g., vL and vH, Vα and Vβ or Vγ and Vδ). In some embodiments, the first and the second polypeptide chains further comprise one or more autonomous antigen binding domains (AABD) that are attached to the N-terminus or near the N-terminus of the first (e.g., vL, Vα or Vγ) and/or the second (e.g., vH, Vβ or Vδ) antigen binding domains. In some embodiments, the AABD is selected from one or more of, but not limited to, a single vH domain (SVH), a single vL domain (SVL), a vHH domain, a single domain antibody, a single variable domain of a TCR (svd-TCR), a non-immunoglobulin antigen binding scaffold, a ligand-binding domain of a receptor, a receptor-binding domain of a ligand, an autoantigen, an adaptor binding domain, an Fc binding domain, or a fragment or a variant thereof.

[0301] In some embodiments, the SAR binds to the target antigen with an equilibrium dissociation constant (Kd) from about 0.1 pM to about 500 nM. In some embodiments, the target antigen is a cell surface antigen. In an exemplary embodiment, the target antigen is one or more of the antigens listed in Table B. In some embodiments, the cell surface antigen is selected from the group consisting of protein, carbohydrate, and lipid. In some embodiments, the cell surface antigen is one or more of CD2, CD5, CD19, CD20, CD22, CD33, CD70, CD123, CD138, CD179b, CLL-1, FLT3, Claudin 18.2, BCMA, GCC, MPL, SLAMF7, ROR1, ROR2, GPRC5D, FCRL5, MSLN, EGFR, EGFRviii, PSMA, PSCA, KLK2, IL13Ra2, TROP2, PTK7, DLL3, Mucd, Muc16 or Her2. In some embodiments, the target antigen is a complex comprising a peptide and a major histocompatibility complex (MHC) protein. In exemplary embodiments, the peptide/MHC complex comprises a peptide derived from one or more of NY-ESO-1, MAGE-A2, MAGE-A3, MAGE4, WT1, AFP, TERT, MART-1, pp66-CMV, HPV16-E7, PRAME, EBV-LMP2A, HIV-1, PSA or gp100.

[0302] In an embodiment, the vL and vH domains of a SAR are derived from a TCR mimic antibody that can recognize intracellular peptides in an MHC-dependent manner. In an embodiment, the Vα and Vβ domains of a SAR are derived from an HLA-independent TCR that can recognize cell surface proteins. In an embodiment, a SAR is bispecific or multispecific. In an embodiment, the disclosure provides a SAR that can bind to two or more antigens that are MHC restricted. In an embodiment, a SAR can bind to two or more antigens that are MHC restricted and/or MHC-non-restricted. In an embodiment, a SAR can bind to a peptide/MHC complex via its Fv or TCR-Fv domain and bind to one or more peptide/MHC complexes via one or more svd-TCR that are attached to the N-terminus or near the N-terminus of its vL and vH, Vα and Vβ or Vγ and Vδ domains. In an embodiment, a SAR can bind to one or more peptide/MHC complex via its Fv, TCR-Fv domain and/or svd-TCR domain and bind to one or more surface antigens via one or more AABD (e.g., vHH, FHVH, centyrin etc.) that are attached to the N-terminus or near the N-terminus of its Vα and Vβ or Vγ and Vδ domains.

[0303] In some embodiments, according to any of the SARs (such as isolated SARs) described above, the first polypeptide further comprises a first hinge domain (or connecting peptide) or fragment thereof N-terminal to the first MAM (e.g., transmembrane domain), and/or the second MAM further comprises a second hinge domain (or connecting peptide) or fragment thereof N-terminal to the second MAM (e.g., transmembrane domain). In some embodiments, the SAR comprises a disulfide bond between a residue in the first MAM and the second MAM and/or a disulfide bond between a residue in the first hinge domain and a residue in the second hinge domain. In some embodiments, according to any of the SARs (such as isolated SARs) described above, the first MAM further comprises a first homologous antigen binding domain or fragment thereof N-terminal to the first hinge domain and/or the second polypeptide further comprises a second homologous antigen binding domain or fragment thereof N-terminal to the second hinge domain. In an embodiment, the two homologous antigen binding domains are derived from the same non-T cell receptor as the two hinge domains. In some embodiments, the first MAM further comprises a first cytosolic domain C-terminal to the first transmembrane domain. In some embodiments, the second MAM further comprises a second cytosolic domain C-terminal to the second transmembrane domain. In an embodiment, the first and/or second cytosolic domains are activation domains comprising one or more ITAMs. In some embodiments, the SAR binds to the target antigen with an equilibrium dissociation constant (Kd) from about 0.1 pM to about 500 nM.

[0304] In some embodiments, according to any of the SARs (such as isolated SARs) described above, the first polypeptide chain further comprises a first co-stimulatory domain C-terminal to the first transmembrane domain. In some embodiments, the second polypeptide chain further comprises a second co-stimulatory domain C-terminal to the second transmembrane domain. In some embodiment, according to any of the SARs (such as isolated SARs) described above, the first polypeptide chain comprises more than one co-stimulatory domains C-terminal to the first transmembrane domain and/or the second polypeptide chain comprises more than one co-stimulatory domains C-terminal to the second transmembrane domain. In some embodiments, the first polypeptide chain further comprises a first signaling peptide N-terminal to the first antigen-binding domain. In some embodiments, the second polypeptide chain further comprises a second signaling peptide N-terminal to the second antigen-binding domain.

[0305] In some embodiments, the first and/or the second MAM and the NTCRM are comprised of the transmembrane/membrane anchored domain, optional cytosolic domain, optional co-stimulatory domain, optional hinge domain and/or optional extracellular domain of a non-T cell receptor and/or a signaling adaptor.

[0306] In some embodiments, the first and/or the second MAM and the NTCRM are comprised of the transmembrane/membrane anchored domain, optional cytosolic domain, optional co-stimulatory domain, optional hinge domain and/or optional extracellular domain that are all derived from a single non-T cell receptor and/or a single signaling adaptor or variants thereof. In an exemplary embodiment, the first polypeptide chain comprises the hinge domain, transmembrane domain and cytosolic domain all derived from CD3 and the second polypeptide chain comprises the hinge domain, transmembrane domain and cytosolic domain all derived from FcRγ or CD16A.

[0307] In some embodiments, the first and/or the second MAM and the NTCRM are comprised of the transmembrane/membrane anchored domain, optional cytosolic domain, optional hinge domain and/or optional extracellular domain derived are derived from one or more different non-T cell receptor and/or a signaling adaptor or variants thereof. In an exemplary embodiment, the first polypeptide chain comprises a CD3 hinge domain, a CD3ƒ transmembrane domain and an FcRγ cytosolic domain and the second polypeptide chain comprises the DAP10 hinge domain, DAP 10 transmembrane domain attached to a cytosolic domain comprising a 41-BB costimulatory domain and a CD3ƒ activation domain.

[0308] In some embodiments, the two transmembrane/membrane anchored domains, optional cytosolic domains, optional co-stimulatory domain, optional hinge domains and/or optional extracellular domains are identical in sequence and are derived from the same protein. In some embodiments, the two transmembrane/membrane anchored domains, optional cytosolic domains, optional co-stimulatory domain, optional hinge domains and/or optional extracellular domains differ in sequence and/or are derived from different proteins.

[0309] In some embodiments, the two transmembrane/membrane anchored domains, optional cytosolic domains, optional co-stimulatory domain, optional hinge domains and/or optional extracellular domains are different in sequence and/or are derived from different proteins.

[0310] In one embodiment, the disclosure provides a double chain SAR that specifically bind to a target antigen comprising a) a first chain comprising one or more heterologous antigen binding domains that are operationally linked via one or more optional linkers to the extracellular domain of a signaling receptor or variant thereof; and b) a second chain comprising one or more heterologous antigen binding domains that are operationally linked via one or more optional linkers to the extracellular domain of a second signaling receptor or a variant thereof. In an embodiment, the one or both signaling receptors are naturally occurring. In an embodiment, the one or both signaling receptors are naturally occurring non-T cell receptors. In an embodiment, at least one heterologous antigen binding domain (e.g., vL, Vα, or Vγ etc.) present on the first chain associate with at least one heterologous antigen binding domain (e.g., vH, V3 or Vδ etc.) present on the second chain to form an antigen-binding module (e.g., Fv or TCR-Fv etc.) that specifically binds to a target antigen. In some embodiments, the target antigen is a cell surface antigen. In some embodiments, the target antigen is a complex comprising a peptide and an MHC protein (such as an MHC class I protein or an MHC class II protein). In some embodiments, the SAR binds to the target antigen with an equilibrium dissociation constant (Kd) from about 0.1 pM to about 500 nM. In some embodiments, the first polypeptide chain and the second polypeptide chain are linked via one or more disulfide bonds. In some embodiments, the first peptide linker and the second peptide linker are linked via one or more disulfide bonds. In some embodiments, there is a disulfide bond between a residue in the first optional linker in the first polypeptide chain and a residue in the second optional linker in the second polypeptide chain. In some embodiments, the first linker and/or the second linker are, individually, from about 5 to about 500 amino acids in length. In some embodiments, the first and/or second peptide linkers comprise, individually, a constant domain or fragment thereof from an immunoglobulin or T cell receptor subunit. In some embodiments, the first and/or second peptide linkers comprise, individually, a CH1, CH2, CH3, CH4 or CL antibody domain, or a fragment thereof. In some embodiments, the first and/or second peptide linkers comprise, individually, a Cα, C3, Cy, or Cδ TCR domain, or a variant or a fragment thereof. In some embodiments, the first and/or second linkers comprise, individually, an Ig like linker (e.g., IgCL, IgCHT etc.) derived from an immunoglobulin (e.g., SEQ ID NO: 3536-3551) or a TCR-Ig like linker (e.g., TCRb-Ig3, SEQ ID NO: 3560; TCRa-Ig3, SEQ ID NO:3562; TCRg-Ig3, SEQ ID NO: 3566; or TCRd-Ig3, SEQ ID NO: 3568 etc.) or a variant or a fragment thereof. In some embodiments, first and/or second peptide linkers comprise mutations that increase their expression, affinity and chain pairing. In some embodiments, the first and/or the second signaling receptor form a non-T cell receptor module (NTCRM) that is capable of recruiting at least one signaling adaptor (e.g., CD3ƒ or NCAM etc.). In some embodiments, the signaling adaptor is selected from the group consisting of CD3ƒ, FcRγ, DAP10 and/or DAP12.

[0311] In one embodiment, the disclosure provides a double chain SAR that specifically binds an antigen comprising a) a first antigen binding domain comprising vL (variable domain of light chain of an antibody), a Va (variable domain of TCRα or Vα), or a Vg (Variable domain of TCRg or Vγ) domain that is operationally linked via an optional linker to the entire or partial extracellular antigen binding domain of a non-TCR signaling receptor chain or a variant thereof, and b) second antigen binding domain a vH (variable domain of heavy chain of an antibody), a Vb (variable domain of TCRb or VD) or a Vd domain (variable domain of TCRd or Vδ) that is operationally linked via an optional linker to the entire or partial extracellular antigen binding domain of a second non-TCR signaling receptor chain or a variant thereof, wherein the vL, Vα or Vγ domains of the first antigen-binding domain and the vH, Vβ or Vδ domains of the second antigen-binding domain form a Fv or TCR-Fv like antigen-binding module that specifically binds to the target antigen. In one embodiment, the disclosure provides a double chain SAR that specifically binds an antigen comprising a) a vL domain that is operationally linked via an optional peptide linker to the entire or partial extracellular antigen binding domain of a non-TCR signaling receptor chain or a variant thereof, and b) a vH domain that is operationally linked via an optional peptide linker to the entire or partial extracellular antigen binding domain of a second non-TCR signaling receptor or a variant thereof, wherein the vL and vH domains form an Fv like antigen binding module that specifically binds to a target antigen in an MHC-dependent and/or MHC-independent manner. In one embodiment, the disclosure provides a double chain SAR that specifically binds an antigen comprising a) a Vα domain that is operationally linked via an optional peptide linker to the entire or partial extracellular antigen binding domain of a non-TCR signaling receptor or a variant thereof, and b) a Vβ domain that is operationally linked via an optional peptide linker to the entire or partial extracellular antigen binding domain of a second non-TCR signaling receptor or a variant thereof wherein the Vα and Vβ domains form an TCR-Fv like antigen binding module that specifically binds to a peptide/MHC complex in an MHC-dependent manner. In one embodiment, the disclosure provides a double chain SAR that specifically binds an antigen comprising a) a Vγ domain that is operationally linked via an optional peptide linker to the entire or partial extracellular antigen binding domain of a non-TCR signaling receptor or a variant thereof, and b) a Vδ domain that is operationally linked via an optional peptide linker to the entire or partial extracellular antigen binding domain of a second non-TCR signaling receptor or a variant thereof, wherein the Vγ and Vδ domains form an TCR-Fv like antigen binding module that specifically binds to an antigen in MHC-dependent or MHC-independent manner. In an exemplary embodiment, a non-TCR signaling receptor is selected from but not limited to one or more of the following: CD16A, CD16B, CD64, CD32, NKp30, NKp44, NKp46, KIR2DL1, KIR2DL2, KIR2DL3, KIR2DL5A, KIR2DL5B, KIR3DL1, KIR3DL2, KIR3DL4, KIR2DL4, KIR2DS1, KIR2DS2, KIR2DS3, KIR2DS4, KIR2DS5, KIR3DS1, DNAM-1, 2B4, OX40, CD28, 4-1BB, CD27, CD81, CD2, CD5, TNFR-I, TNFR-II, Fas, CD30, CD40, CRTAM, TIGIT, CD96, SLAMF6, SLAMF7, CD100, CD160, and ILT2. In some embodiments, the first and/or second peptide linkers comprise, individually, a constant domain or fragment thereof from an immunoglobulin or T cell receptor subunit. In some embodiments, the first and/or second peptide linkers comprise, individually, a CH1, CH2, CH3, CH4 or CL antibody domain, or a fragment thereof. In some embodiments, the first and/or second peptide linkers comprise, individually, a Cα, Cβ, Cγ, or Cδ TCR domain, or a variant or a fragment thereof. In some embodiments, the first and/or second linkers comprise, individually, an Ig like linker (e.g., IgCL, IgCH1 etc.) derived from an immunoglobulin (e.g., SEQ ID NO: 3536-3551) or a TCR-Ig like linker (e.g., TCRb-Ig3, SEQ ID NO: 3560; TCRa-Ig3, SEQ ID NO:3562; TCRg-Ig3, SEQ ID NO: 3566; or TCRd-Ig3, SEQ ID NO: 3568 etc.) or a variant or a fragment thereof. In some embodiments, first and/or second peptide linkers comprise mutations that increase their expression, affinity and chain pairing. In some embodiments, the first and the second polypeptide chains further comprise one or more autonomous antigen binding domains (AABD) that are attached to the N-terminus or near the N-terminus of the first (e.g., vL, Vα or Vγ) and/or the second (e.g., vH, V3 or Vδ) antigen binding domains.

[0312] In one embodiment, the disclosure provides a double chain SAR that specifically binds an antigen comprising a) a first antigen binding domain comprising vL (variable domain of light chain of an antibody), a Va (variable domain of TCRα or Vα), or a Vg (Variable domain of TCRg or Vγ) domain that is operationally linked via an optional peptide linker to the entire or partial hinge domain of a non-TCR signaling receptor chain or a variant thereof; and b) second antigen binding domain a vH (variable domain of heavy chain of an antibody), a Vb (variable domain of TCRb or VD) or a Vd domain (variable domain of TCRd or Vδ) that is operationally linked via an optional peptide linker to the entire or partial hinge domain of a second non-TCR signaling receptor chain or a variant thereof, wherein the vL, Vα or Vγ domains of the first antigen-binding domain and the vH, Vβ or Vδ domains of the second antigen-binding domain form a Fv or TCR-Fv like antigen-binding module that specifically binds to the target antigen. In one embodiment, the disclosure provides a double chain SAR that specifically binds an antigen comprising a) a vL domain that is operationally linked via an optional peptide linker to the entire or partial hinge domain of a non-TCR signaling receptor chain or a variant thereof, and b) a vH domain that is operationally linked via an optional peptide linker to the entire or partial hinge domain of a second non-TCR signaling receptor or a variant thereof, wherein the vL and vH domains form an Fv like antigen binding module that specifically binds to a target antigen in an MHC-dependent and/or MHC-independent manner. In one embodiment, the disclosure provides a double chain SAR that specifically binds an antigen comprising a) a Vα domain that is operationally linked via an optional peptide linker to the entire or partial hinge domain of a non-TCR signaling receptor or a variant thereof, and b) a Vβ domain that is operationally linked via an optional peptide linker to the entire or partial hinge domain of a second non-TCR signaling receptor or a variant thereof wherein the Vα and Vβ domains form an TCR-Fv like antigen binding module that specifically binds to a peptide/MHC complex in an MHC-dependent manner. In one embodiment, the disclosure provides a double chain SAR that specifically binds an antigen comprising a) a Vγ domain that is operationally linked via an optional peptide linker to the entire or partial hinge domain of a non-TCR signaling receptor or a variant thereof, and b) a Vδ domain that is operationally linked via an optional peptide linker to the entire or partial hinge domain of a second non-TCR signaling receptor or a variant thereof, wherein the Vγ and Vδ domains form an TCR-Fv like antigen binding module that specifically binds to an antigen in MHC-dependent or MHC-independent manner. In an exemplary embodiment, a non-TCR signaling receptor is selected from but not limited to one or more of the following: CD16A, CD16B, CD64, CD32, NKp30, NKp44, NKp46, KIR2DL1, KIR2DL2, KIR2DL3, KIR2DL5A, KIR2DL5B, KIR3DL1, KIR3DL2, KIR3DL4, KIR2DL4, KIR2DS1, KIR2DS2, KIR2DS3, KIR2DS4, KIR2DS5, KIR3DS1, DNAM-1, 2B4, OX40, CD28, 4-1BB, CD27, CD81, CD2, CD5, TNFR-I, TNFR-II, Fas, CD30, CD40, CRTAM, TIGIT, CD96, SLAMF6, SLAMF7, CD100, CD160, and ILT2. In some embodiments, the first and/or second peptide linkers comprise, individually, a constant domain or fragment thereof from an immunoglobulin or T cell receptor subunit. In some embodiments, the first and/or second peptide linkers comprise, individually, a CH1, CH2, CH3, CH4 or CL antibody domain, or a fragment thereof. In some embodiments, the first and/or second peptide linkers comprise, individually, a Cα, Cβ, Cγ, or Cδ TCR domain, or a variant or a fragment thereof. In some embodiments, the first and/or second peptide linkers comprise, individually, an Ig like linker (e.g., IgCL, IgCH1 etc.) derived from an immunoglobulin (e.g., SEQ ID NO: 3536-3551) or a TCR-Ig like linker (e.g., TCRb-Ig3, SEQ ID NO: 3560; TCRa-Ig3, SEQ ID NO:3562; TCRg-Ig3, SEQ ID NO: 3566; or TCRd-Ig3, SEQ ID NO: 3568 etc.) or a fragment thereof. In some embodiments, first and/or second peptide linkers comprise mutations that increase their expression, affinity and chain pairing. In some embodiments, the first and the second polypeptide chains further comprise one or more autonomous antigen binding domains (AABD) that are attached to the N-terminus or near the N-terminus of the first (e.g., vL, Vα or Vγ) and/or the second (e.g., vH, Vβ or Vδ) antigen binding domains.

[0313] In one embodiment, the disclosure provides a double chain SAR that specifically binds an antigen comprising a) a first antigen binding domain comprising vL (variable domain of light chain of an antibody), a Va (variable domain of TCRα or Vα), or a Vg (Variable domain of TCRg or Vγ) domain that is operationally linked via an optional peptide linker to the entire or partial transmembrane/membrane anchoring domain of a non-TCR signaling receptor chain or a variant thereof; and b) second antigen binding domain a vH (variable domain of heavy chain of an antibody), a Vb (variable domain of TCRb or VD) or a Vd domain (variable domain of TCRd or Vδ) that is operationally linked via an optional peptide linker to the entire or partial transmembrane/membrane anchoring domain of a second non-TCR signaling receptor chain or a variant thereof, wherein the vL, Vα or Vγ domains of the first antigen-binding domain and the vH, Vβ or Vδ domains of the second antigen-binding domain form a Fv or TCR-Fv like antigen-binding module that specifically binds to the target antigen. In one embodiment, the disclosure provides a double chain SAR that specifically binds an antigen comprising a) a vL domain that is operationally linked via an optional peptide linker to the entire or partial transmembrane/membrane anchoring domain of a non-TCR signaling receptor chain or a variant thereof; and b) a vH domain that is operationally linked via an optional peptide linker to the entire or partial transmembrane/membrane anchoring domain of a second non-TCR signaling receptor or a variant thereof, wherein the vL and vH domains form an Fv like antigen binding module that specifically binds to a target antigen in an MHC-dependent and/or MHC-independent manner. In one embodiment, the disclosure provides a double chain SAR that specifically binds an antigen comprising a) a Va domain that is operationally linked via an optional peptide linker to the entire or partial transmembrane/membrane anchoring domain of a non-TCR signaling receptor or a variant thereof; and b) a Vβ domain that is operationally linked via an optional peptide linker to the entire or partial transmembrane/membrane anchoring domain of a second non-TCR signaling receptor or a variant thereof wherein the Vα and Vβ domains form an TCR-Fv like antigen binding module that specifically binds to a peptide/MHC complex in an MHC-dependent manner. In one embodiment, the disclosure provides a double chain SAR that specifically binds an antigen comprising a) a Vγ domain that is operationally linked via an optional peptide linker to the entire or partial transmembrane/membrane anchoring domain of a non-TCR signaling receptor or a variant thereof; and b) a Vδ domain that is operationally linked via an optional peptide linker to the entire or partial transmembrane/membrane anchoring domain of a second non-TCR signaling receptor or a variant thereof, wherein the Vγ and Vδ domains form an TCR-Fv like antigen binding module that specifically binds to an antigen in MHC-dependent or MHC-independent manner. In an exemplary embodiment, a non-TCR signaling receptor is selected from but not limited to one or more of the following: CD16A, CD16B, CD64, CD32, NKp30, NKp44, NKp46, KIR2DL1, KIR2DL2, KIR2DL3, KIR2DL5A, KIR2DL5B, KIR3DL1, KIR3DL2, KIR3DL4, KIR2DL4, KIR2DS1, KIR2DS2, KIR2DS3, KIR2DS4, KIR2DS5, KIR3DS1, DNAM-1, 2B4, OX40, CD28, 4-1BB, CD27, CD81, CD2, CD5, TNFR-I, TNFR-II, Fas, CD30, CD40, CRTAM, TIGIT, CD96, SLAMF6, SLAMF7, CD100, CD160, and ILT2. In some embodiments, the first and/or second peptide linkers comprise, individually, a constant domain or fragment thereof from an immunoglobulin or T cell receptor subunit. In some embodiments, the first and/or second peptide linkers comprise, individually, a CH1, CH2, CH3, CH4 or CL antibody domain, or a fragment thereof. In some embodiments, the first and/or second peptide linkers comprise, individually, a Cα, Cβ, Cγ, or Cδ TCR domain, or a variant or a fragment thereof. In some embodiments, the first and/or second peptide linkers comprise, individually, an Ig like linker (e.g., IgCL, IgCHT etc.) derived from an immunoglobulin (e.g., SEQ ID NO: 3536-3551) or a TCR-Ig like linker (e.g., TCRb-Ig3, SEQ ID NO: 3560; TCRa-Ig3, SEQ ID NO:3562; TCRg-Ig3, SEQ ID NO: 3566; or TCRd-Ig3, SEQ ID NO: 3568 etc.) or a fragment thereof. In some embodiments, first and/or second peptide linkers comprise mutations that increase their expression, affinity and chain pairing. In some embodiments, the first and the second polypeptide chains further comprise one or more autonomous antigen binding domains (AABD) that are attached to the N-terminus or near the N-terminus of the first (e.g., vL, Vα or Vγ) and/or the second (e.g., vH, Vβ or Vδ) antigen binding domains.

[0314] In one embodiment, the disclosure provides a double chain SAR that specifically binds an antigen comprising a) a first antigen binding domain that is operationally linked via an optional peptide linker to the entire or partial transmembrane/membrane anchoring domain of a non-TCR signaling receptor chain or a signaling adaptor or a variant or a fragment thereof; and b) second antigen binding domain that is operationally linked via an optional peptide linker to the entire or partial transmembrane/membrane anchoring domain of a second non-TCR signaling receptor chain or a signaling adaptor or a variant or a fragment thereof. In some embodiments, the first and/or second peptide linkers comprise, individually, a constant domain or fragment thereof from an immunoglobulin or T cell receptor subunit. In some embodiments, the first and/or second peptide linkers comprise, individually, a CH1, CH2, CH3, CH4 or CL antibody domain, or a fragment thereof. In some embodiments, the first and/or second peptide linkers comprise, individually, a Cα, Cβ, Cγ, or Cδ TCR domain, or a variant or a fragment thereof. In an embodiment, the first antigen-binding domain and the second antigen-binding domain specifically binds to their respective target antigens. In an embodiment, the one or both of the antigen binding domains are autonomous antigen binding domains (e.g., AABD, e.g., vHH, FHVH, SVH, centyrin, DARPIN, svd-TCR, adaptor, adaptor binding domain, ligand binding domain of a receptor, receptor binding domain of a ligand etc.). In an embodiment, the one or both of the antigen binding domains comprise an antibody, an antibody fragment (e.g., Fab), scFv, a TCR or a scTCR. In some embodiments, the first and the second polypeptide chains further comprise one or more autonomous antigen binding domains (AABD) that are attached to the N-terminus or near the N-terminus of the first and/or the second antigen binding domains. In an embodiment, the first and/or the second signaling chain comprise a cytosolic domain comprising an activation domain and an optional costimulatory domain.

[0315] In an embodiment, the double chain SAR retains the entire or partial binding properties of the original signaling receptors (e.g., non-T cell receptors) and also acquires the binding properties conferred by the one or more heterologous antigen binding domains. In an embodiment, the double chain SAR retains the entire or partial binding properties of the original signaling receptors. In an embodiment, the double chain SAR additionally acquires the binding properties conferred by the one or more heterologous antigen binding domains. In an embodiment, the double chain SAR retains the signaling properties of the two signaling receptors. In an embodiment, the double chain SAR acquires new signaling properties that are not exhibited by either of the two signaling receptors when activated alone. In an embodiment, the double chain SAR acquires new signaling properties that are additive of the signaling properties of the two signaling receptors when activated alone. In an embodiment, the double chain SAR acquires new signaling properties that are synergistic of the signaling properties of the two signaling receptors when activated alone.

[0316] In an embodiment, the signaling receptor comprising one or both chains of a double chain SAR is a Type I membrane protein with a single transmembrane domain. In an embodiment, the signaling receptor is a naturally occurring signaling receptor. In an embodiment, the signaling receptor is a non-TCR signaling receptor. In an embodiment, one or both chains of the double chain SAR are capable of recruiting a signaling adaptor (e.g., CD3ƒ, FcRγ, DAP10 or DAP12 etc.). In an embodiment, one or both chains of the double chain SAR are capable of recruiting a signaling adaptor that comprises an activation domain. In an embodiment, one or both chains of the double chain SAR are capable of recruiting a signaling adaptor that comprises one or more ITAMs. In an embodiment, one or both chains of the double chain SAR are capable of recruiting a signaling adaptor that comprises one or more ITIMs. In an embodiment, one or both chains of the double chain SAR are capable of recruiting a signaling adaptor that comprise a costimulatory domain. In an embodiment the signaling adaptor is naturally occurring. In an embodiment, the signaling adaptor is non-naturally occurring. In an embodiment, one or both chains of the double chain SAR are capable of recruiting a signaling adaptor that activates intracellular signaling pathways (e.g., NFAT, NF-κB, ERK, PI3K etc.). In an embodiment, one or both chains of the double chain SAR are capable of recruiting a signaling adaptor that inhibits intracellular signaling pathways (e.g., NFAT, NF-κB, ERK, PI3K etc.).

[0317] In an embodiment, one or both chains of the double chain SAR comprise a costimulatory domain. In an embodiment, one or both chains of the double chain SAR comprise an activation domain and a costimulatory domain. In an embodiment, one or both chains of the double chain SAR comprise an intracellular activation domain. In an exemplary embodiment, one or both chains of the double chain SAR comprise an intracellular activation domain derived from a signaling adaptor. In exemplary embodiments, one or both chains of a double chain SAR comprise an intracellular activation domain derived from CD3ƒ, FcRγ, DAP10 or DAP12. In an embodiment, the activation domain present in one or both chains of a double chain SAR comprises one or more ITAMs. In an embodiment, one or both chains of the double chain SAR comprise an activation domain that contains one or more ITAMs. In an embodiment, one or both chains of the double chain SAR comprise an activation domain that contain two or more ITAM motifs. In an embodiment, one or both chains of a double chain SAR comprise an activation domain that contains a single ITAM. In an embodiment, one or both chains of a double chain SAR lack an ITAM. In an embodiment, one or both chains of a double chains SAR comprise an activation domain that contains a tyrosine-based motif (YINM). In an embodiment, one or both chains of a double chains SAR comprise an activation domain that recruits the p85 subunit of PI3K and/or Grb2. In an embodiment, one or both chains of a double chains SAR comprise an activation domain that activate one or more of NFAT, PI3K, NF—KB and/or ERK signaling pathways.

[0318] In an embodiment, the SAR comprises an intracellular inhibitory domain. In an exemplary embodiment, the SAR comprises an intracellular inhibitory domain derived from PD1. In an embodiment, the inhibitory domain of SAR comprises one or more ITIM motifs.

[0319] In an embodiment, the SAR is capable of recruiting signaling adaptors. In an exemplary embodiment, the SAR is capable of recruiting one or more signaling adaptors selected from the group of, but not limited to, CD3ƒ, FcRγ, DAP10 and DAP12.

[0320] In one embodiment, the disclosure provides a double chain SAR comprising one or more heterologous antigen binding domains that are operationally linked via optional linkers to two polypeptide chains at least one of which can recruit a signaling adaptor. In one embodiment, the disclosure provides a double chain SAR comprising one or more heterologous antigen binding domains that are operationally linked via optional linkers to two polypeptide chains each of which can recruit a signaling adaptor. In an embodiment, one or both polypeptides comprise a hinge domain, a transmembrane domain and a cytosolic domain. In an embodiment, at least one polypeptide comprises a transmembrane domain. In an embodiment, both polypeptides comprise a transmembrane domain. In an embodiment, at least one polypeptide comprises a cytosolic domain. In an embodiment, both polypeptides comprise a cytosolic domain. In one embodiment, the disclosure provides a double chain SAR comprising one or more heterologous antigen binding domains that are operationally linked via optional linkers to two polypeptide chains at least one of which can recruit a signaling adaptor. In one embodiment, the disclosure provides a double chain SAR comprising one or more heterologous antigen binding domains that are operationally linked via optional linkers to two polypeptide chains comprising one or more intracellular activation domains. In one embodiment, the disclosure provides a double chain SAR comprising one or more heterologous antigen binding domains that are operationally linked via optional linkers to two polypeptide chains at least one of which comprises an intracellular activation domain.

[0321] In an embodiment, the signaling adaptor is a non-TCR/CD3 signaling adaptor. In an embodiment, the signaling adaptor is not a component of the TCR/CD3 signaling complex. In an embodiment, the signaling adaptor is not CD3ƒ. In an embodiment, the signaling adaptor is a non-natural signaling adaptor; i.e., a signaling adaptor that does not exist in nature. In an embodiment, the signaling adaptor comprise one or more ITAMs. In an embodiment, the signaling adaptor comprises one or more ITIMs. In an embodiment, the signaling adaptor is a disulfide linked dimeric protein. In an embodiment, the signaling adaptor is a type I transmembrane protein. In an embodiment, the signaling adaptor is capable of recruiting signaling proteins, e.g., protein kinases, e.g., ZAP70. In an embodiment, the signaling adaptor is capable of activating one or more cellular signaling pathways, e.g., NFAT, NF-κB, ERK, PI3K etc.

[0322] In an embodiment, the two non-TCR signaling receptor chains comprising the two chains of a double chain SAR are of the same type and sequence (e.g., both signaling chains comprise the extracellular, transmembrane and cytosolic domains of CD16A, NKp46 or NKp30 etc.). Exemplary such double chain SAR are represented by SEQ ID NO: 6383-6293, 4675, 4696 and 8344) In an embodiment, the two signaling chains of a double chain SAR are of the different type (e.g., one chain comprises the extracellular, transmembrane and cytosolic domains of CD16A and the second chain comprises the extracellular, transmembrane and cytosolic domains of NKp30 or comprises the hinge, transmembrane and cytosolic domains of CD16A and the second chain comprises the hinge, transmembrane and cytosolic domains of CD3ƒetc.). Exemplary such SARs are represented by SEQ ID NO: 4695 and 4670.

[0323] In an embodiment, the two signaling chains of a double chain SAR are derived from the same receptor (e.g., both chains are derived from CD16A). An exemplary such SAR is represented by SEQ ID NO: 4676. In an embodiment, the two signaling chains of a double chain SAR are derived from different receptors (e.g., one chain is derived from NKp44 and the second chain is derived from NKp30 etc.). An exemplary such SAR is represented by SEQ ID NO: 4713.

[0324] In an embodiment, the disclosure provides a double chain SAR comprising a first chain that is derived from a non-TCR receptor signaling chain (e.g., CD16A) and a second chain that is derived from a signaling adaptor (e.g., CD3ƒ or FcRy). An exemplary such a SAR is represented by SEQ ID NO: 4670.

[0325] In an embodiment, a double chain SAR may comprise first chain that is derived from a non-TCR receptor signaling chain (e.g., CD16A) and a second chain that is derived from a TCR signaling chain (e.g., constant chain of TCRα, TCRβ, TCRγ, TCRδ, preTCRα or a variant or a fragment thereof). In some embodiments, the disclosure provides a double chain SAR comprising one non-TCR module (or NTCRM) and one TCR module (or TCRM). Exemplary such SARs are represented by SEQ ID NO: 4708-4710.

[0326] In an embodiment, the optional linker between the vL/vH, Vα/Vβ, Vγ/Vδ chains of the heterologous antigen binding domain and the non-TCR signaling chains is an Ig like linker (SEQ ID NO (DNA): 1142-1175 and SEQ ID NO (PRT): 3536-3569) represented in Table 13.

[0327] In one embodiment, the signaling receptor that is used in the construction of a double chain SAR is any receptor expressed on the surface of an immune cell. In one embodiment, the signaling receptor is a signaling chain of a naturally occurring signaling receptor which is expressed on the surface of an immune cell. In an exemplary embodiment, the immune cell is selected from but not limited to a T cell, an NK cell, a monocyte/macrophage, a granulocyte and a B cell. Exemplary signaling receptors that can be used in the construction of a double chain SAR of the disclosure include CD16A, CD16B, CD64, CD32, NKp30, NKp44, NKp46, KIR2DL1, KIR2DL2, KIR2DL3, KIR2DL5A, KIR2DL5B, KIR3DL1, KIR3DL2, KIR3DL4, KIR2DL4, KIR2DS1, KIR2DS2, KIR2DS3, KIR2DS4, KIR2DS5, KIR3DS1, NKG2D, NKG2C, NKG2A, NKG2E, NKG2F, DNAM-1, 2B4, OX40, CD28, 4-1BB, CD27, CD81, CD2, CD5, TNFR-I, TNFR-II, Fas, CD30, CD40, CRTAM, TIGIT, CD96, SLAMF6, SLAMF7, CD100, CD160, CEACAM, ILT2, KLRG1, LAIR1, CD161, Siglec3, Siglec-7 and Siglec-9 etc. or variants thereof. In further embodiment, an autonomous antigen binding domain (e.g., fully human vH domain, vHH, single chain TCR etc.), non-immunoglobulin antigen binding domain (e.g., Centyrin, affibody etc.), ligand (e.g., APRIL, TPO, NKG2D-YA-G4Sx3-NKG2D-YA etc.), and extracellular domain of a receptor (e.g., NKp30, NKp44, NKp46, NKG2D, CD16A etc.), an adaptor binding domain (e.g., EZip, RZip, E4, R4 etc.) can be operationally linked the amino-terminus or near the amino-terminus of the vL, vH, Va, VD, Vγ or Vδ chains of the SAR to confer additional antigen binding capabilities on the SAR.

[0328] In some embodiments, there is provided a SAR (such as an isolated SAR) that specifically binds to a target antigen, wherein the SAR comprises: a) a first polypeptide chain comprising a first antigen-binding domain comprising a vL, a Va or a Vγ domains and a first Membrane associated module (MAM); and b) a second polypeptide chain comprising a second antigen-binding domain comprising a vH, a Vβ or a Vδ domains and a second Membrane associated module (MAM), wherein the vL, Vα or Vγ domains of the first antigen-binding domain and the complementary vH, Vβ or Vδ domains of the second antigen-binding domain form a Fv or TCR-Fv like antigen-binding module that specifically binds to the target antigen, and wherein the first MAM and/or the second MAM form a non-T cell receptor module (NTCRM). In an embodiment, the SAR is capable of activating at least one signaling pathway and/or recruiting at least one signaling adaptor. In an embodiment, the first and/or second MAM are derived from, but not limited to, one or more of the following signaling adaptors: CD3ƒ, FcRγ. DAP10 or DAP12 or a variant or fragment thereof. In an embodiment, a NTCRM is comprised of, but not limited to, one or more of the following signaling adaptors: CD3ƒ, FcRγ. DAP10 or DAP12. In some embodiments, the signaling adaptor is a non-CD3 adaptor (NCAM). In some embodiments, the signaling adaptor is not CD3ƒ. In some embodiments, the first polypeptide chain and the second polypeptide chain are linked via one or more disulfide bonds. In some embodiments, the first polypeptide chain further comprises a first peptide linker between the first antigen-binding domain and the first MAM. In some embodiments, the second polypeptide chain further comprises a second peptide linker between the second antigen-binding domain and the second MAM. In some embodiments, the first polypeptide chain and the second polypeptide chain are linked via one or more disulfide bonds. In some embodiments, the first peptide linker and the second peptide linker are linked via one or more disulfide bonds. In some embodiments, the first peptide linker and/or the second peptide linker are, individually, from about 5 to about 500 amino acids in length. In some embodiments, the first and/or second peptide linkers comprise, individually, a constant domain or fragment thereof from an immunoglobulin or T cell receptor subunit. In some embodiments, the first and/or second peptide linkers comprise, individually, a CH1, CH2, CH3, CH4 or CL antibody domain, or a fragment thereof. In some embodiments, the first and/or second peptide linkers comprise, individually, a Cα, Cβ, Cγ, or Cδ TCR domain, or a variant or a fragment thereof. In some embodiments, first and/or second peptide linkers comprise mutations that increase their affinity and chain pairing. In some embodiments, the first and/or second linkers comprise, individually, an Ig like linker (e.g., IgCL, IgCH1 etc.) derived from an immunoglobulin (e.g., SEQ ID NO: 3536-3551) or a TCR-Ig like linker (e.g., TCRb-Ig3, SEQ ID NO: 3560; TCRa-Ig3, SEQ ID NO:3562; TCRg-Ig3, SEQ ID NO: 3566; or TCRd-Ig3, SEQ ID NO: 3568 etc.) or a fragment thereof. In some embodiments, first and/or second peptide linkers comprise mutations that increase their expression, affinity and chain pairing. In an embodiment, the first and the second antigen binding domains comprise complementary chains (e.g., vL and vH, Vα and Vβ or Vγ and Vδ). In some embodiments, the first and the second polypeptide chains further comprise one or more autonomous antigen binding domains (AABD) that are attached to the N-terminus or near the N-terminus of the first (e.g., vL, Vα or Vγ) and/or the second (e.g., vH, Vβ or Vδ) antigen binding domains. In some embodiments, the SAR binds to the target antigen with an equilibrium dissociation constant (Kd) from about 0.1 pM to about 500 nM. In some embodiments, the target antigen is a cell surface antigen. In an exemplary embodiment, the target antigen is one or more of the antigens listed in Table B. In some embodiments, the cell surface antigen is selected from the group consisting of protein, carbohydrate, and lipid. In some embodiments, the cell surface antigen is one or more of CD19, CD20, CD22, CD33, CD70, CD123, CD138, CLL-1, FLT3, Claudin 18.2, BCMA, GCC, MPL, SLAMF7, RORI, ROR2, GPRC5D, FCRL5, MSLN, EGFR, EGFRviii, PSMA, PSCA, KLK2, IL13Ra2, TROP2, PTK7, DLL3, Muc1, Muc16 or Her2. In some embodiments, the target antigen is a complex comprising a peptide and a major histocompatibility complex (MHC) protein. In exemplary embodiments, the peptide/MHC complex comprises a peptide derived from one or more of NY-ESO-1, MAGE-A2, MAGE-A3, MAGE4, WT1, AFP, TERT, MART-1, pp66-CMV, HPV16-E7, PRAME, EBV-LMP2A, HIV-1, PSA or gp100.

[0329] In some embodiments, according to any of the SARs (such as isolated SARs) described above, the first MAM further comprises a first hinge domain or fragment thereof N-terminal to the first transmembrane domain, the second MAM further comprises a second hinge domain or fragment thereof N-terminal to the second transmembrane domain. In some embodiments, the NTCRM comprises a disulfide bond between a residue in the first hinge domain and a residue in the second hinge domain. In some embodiments, the first MAM further comprises a first cytosolic domain C-terminal to the first transmembrane domain. In some embodiments, the second MAM further comprises a second cytosolic domain C-terminal to the second transmembrane domain. In an embodiment, the first and/or second cytosolic domains are activation domains comprising one or more ITAMs. In some embodiments, the SAR binds to the target antigen with an equilibrium dissociation constant (Kd) from about 0.1 pM to about 500 nM.

[0330] In some embodiments, according to any of the SARs (such as isolated SARs) described above, the first polypeptide chain further comprises a first co-stimulatory domain C-terminal to the first transmembrane domain. In some embodiments, the second polypeptide chain further comprises a second co-stimulatory domain C-terminal to the second transmembrane domain. In some embodiments, the first polypeptide chain further comprises a first signaling peptide N-terminal to the first antigen-binding domain. In some embodiments, the second polypeptide chain further comprises a second signaling peptide N-terminal to the second antigen-binding domain.

[0331] In one embodiment, the disclosure provides a double chain SAR that specifically binds an antigen comprising a) a first antigen binding domain comprising vL (variable domain of light chain of an antibody), a Va (variable domain of TCRα or Vα), or a Vg (Variable domain of TCRg or Vγ) domain that is operationally linked via an optional peptide linker to the entire or partial hinge domain of a signaling adaptor or a variant thereof; and b) second antigen binding domain a vH (variable domain of heavy chain of an antibody), a Vb (variable domain of TCRb or Vβ) or a Vd domain (variable domain of TCRd or Vδ) that is operationally linked via an optional peptide linker to the entire or partial hinge domain of a second signaling adaptor or a variant thereof, wherein the vL, Vα or Vγ domain of the first antigen-binding domain and the complementary vH, Vβ or Vδ domain of the second antigen-binding domain form a Fv or TCR-Fv like antigen-binding module that specifically binds to a target antigen. In one embodiment, the disclosure provides a double chain SAR that specifically binds an antigen comprising a) a vL domain that is operationally linked via an optional peptide linker to the entire or partial hinge domain of a signaling adaptor or a variant thereof; and b) a vH domain that is operationally linked via an optional peptide linker to the entire or partial hinge domain of a second signaling adaptor or a variant thereof, wherein the vL and vH domains form an Fv like antigen binding module that specifically binds to a target antigen in an MHC-dependent and/or MHC-independent manner. In one embodiment, the disclosure provides a double chain SAR that specifically binds an antigen comprising a) a Va domain that is operationally linked via an optional peptide linker to the entire or partial hinge domain of a signaling adaptor or a variant thereof; and b) a Vβ domain that is operationally linked via an optional peptide linker to the entire or partial hinge domain of a second signaling adaptor or a variant thereof wherein the Vα and Vβ domains form an TCR-Fv like antigen binding module that specifically binds to a peptide/MHC complex in an MHC-dependent manner. In one embodiment, the disclosure provides a double chain SAR that specifically binds an antigen comprising a) a Vγ domain that is operationally linked via an optional peptide linker to the entire or partial hinge domain of a signaling adaptor or a variant thereof; and b) a Vδ domain that is operationally linked via an optional peptide linker to the entire or partial hinge domain of a second signaling adaptor or a variant thereof, wherein the Vγ and Vδ domains form an TCR-Fv like antigen binding module that specifically binds to an antigen in MHC-dependent or MHC-independent manner. In an exemplary embodiment, a signaling adaptor is selected from but not limited to one or more of the following: CD3ƒ, FcRγ, DAP10 or DAP10 or a variant or a fragment thereof. In some embodiments, the signaling adaptor is a non-CD3 adaptor (NCAM). In some embodiments, the signaling adaptor is not CD3ƒ. In some embodiments, the first and/or second peptide linkers comprise, individually, a constant domain or fragment thereof from an immunoglobulin or T cell receptor subunit. In some embodiments, the first and/or second peptide linkers comprise, individually, a CH1, CH2, CH3, CH4 or CL antibody domain, or a fragment thereof. In some embodiments, the first and/or second peptide linkers comprise, individually, a Cα, Cβ, Cγ, or Cδ TCR domain, or a variant or a fragment thereof. In some embodiments, the first and/or second linkers comprise, individually, an Ig like linker (e.g., IgCL, IgCHT etc.) derived from an immunoglobulin (e.g., SEQ ID NO: 3536-3551) or a TCR-Ig like linker (e.g., TCRb-Ig3, SEQ ID NO: 3560; TCRa-Ig3, SEQ ID NO:3562; TCRg-Ig3, SEQ ID NO: 3566; or TCRd-Ig3, SEQ ID NO: 3568 etc.) or a variant or a fragment thereof. In some embodiments, first and/or second peptide linkers comprise mutations that increase their expression, affinity and chain pairing. In some embodiments, the signaling adaptor further comprises one or more co-stimulatory domains. In exemplary embodiments, a signaling adaptor comprises a co-stimulatory domain from CD28, 4-1BB, OX40, 2B4, CD27, CD81, CD2, CD5, BAFF-R, CD30, CD40, HVEM or ICOS, or a variant or a fragment thereof. In some embodiments, the first and/or second peptide linkers comprise, individually, an Ig like linker (e.g., IgCL, IgCH1 etc.) derived from an immunoglobulin (e.g., SEQ ID NO: 3536-3551) or a TCR-Ig like linker (e.g., TCRb-Ig3, SEQ ID NO: 3560; TCRa-Ig3, SEQ ID NO:3562; TCRg-Ig3, SEQ ID NO: 3566; or TCRd-Ig3, SEQ ID NO: 3568 etc.) or a fragment thereof. In some embodiments, first and/or second peptide linkers comprise mutations that increase their expression, affinity and chain pairing. In some embodiments, the first and the second polypeptide chains further comprise one or more autonomous antigen binding domains (AABD) that are attached to the N-terminus or near the N-terminus of the first (e.g., vL, Vα or Vγ) and/or the second (e.g., vH, Vβ or Vδ) antigen binding domains.

[0332] In one embodiment, the disclosure provides a double chain SAR that specifically binds an antigen comprising a) a first antigen binding domain comprising vL, a Vα, or Vγ domain that is operationally linked via an optional peptide linker to the entire or partial transmembrane/membrane anchoring domain of a signaling adaptor or a variant thereof; and b) second antigen binding domain comprising a vH, a Vβ or a Vδ domain that is operationally linked via an optional peptide linker to the entire or partial transmembrane/membrane anchoring domain of a second signaling adaptor or a variant thereof, wherein the vL, Vα or Vγ domain of the first antigen-binding domain and the complementary vH, Vβ or Vδ domain of the second antigen-binding domain form a Fv or TCR-Fv like antigen-binding module that specifically binds to the target antigen. In one embodiment, the disclosure provides a double chain SAR that specifically binds an antigen comprising a) a vL domain that is operationally linked via an optional peptide linker to the entire or partial transmembrane/membrane anchoring domain of a signaling adaptor or a variant thereof; and b) a vH domain that is operationally linked via an optional peptide linker to the entire or partial transmembrane/membrane anchoring domain of a second signaling adaptor or a variant thereof, wherein the vL and vH domains form an Fv like antigen binding module that specifically binds to a target antigen in an MHC-dependent and/or MHC-independent manner. In one embodiment, the disclosure provides a double chain SAR that specifically binds an antigen comprising a) a Va domain that is operationally linked via an optional peptide linker to the entire or partial transmembrane/membrane anchoring domain of a signaling adaptor or a variant thereof; and b) a Vβ domain that is operationally linked via an optional peptide linker to the entire or partial transmembrane/membrane anchoring domain of a second signaling adaptor or a variant thereof wherein the Va and Vβ domains form an TCR-Fv like antigen binding module that specifically binds to a peptide/MHC complex in an MHC-dependent manner. In one embodiment, the disclosure provides a double chain SAR that specifically binds an antigen comprising a) a Vγ domain that is operationally linked via an optional peptide linker to the entire or partial transmembrane/membrane anchoring domain of a signaling adaptor or a variant thereof; and b) a Vδ domain that is operationally linked via an optional peptide linker to the entire or partial transmembrane/membrane anchoring domain of a second signaling adaptor or a variant thereof, wherein the Vγ and Vδ domains form an TCR-Fv like antigen binding module that specifically binds to an antigen in MHC-dependent or MHC-independent manner. In an exemplary embodiment, a signaling adaptor is selected from but not limited to one or more of the following: CD3ƒ, FcRγ, DAP10 or DAP12 or a variant or a fragment thereof. In some embodiments, the signaling adaptor is a non-CD3 adaptor (NCAM). In some embodiments, the signaling adaptor is not CD3ƒ. In some embodiments, the signaling adaptor further comprises one or more co-stimulatory domains. In exemplary embodiments, a signaling adaptor comprises a co-stimulatory domain from CD28, 4-1BB, OX40, 2B4, CD27, CD81, CD2, CD5, BAFF-R, CD30, CD40, HVEM or ICOS, or a variant or a fragment thereof. In some embodiments, the first and/or second peptide linkers comprise, individually, a constant domain or fragment thereof from an immunoglobulin or T cell receptor subunit. In some embodiments, the first and/or second peptide linkers comprise, individually, a CH1, CH2, CH3, CH4 or CL antibody domain, or a fragment thereof. In some embodiments, the first and/or second peptide linkers comprise, individually, a Cα, Cβ, Cγ, or Cδ TCR domain, or a variant or a fragment thereof. In some embodiments, the first and/or second peptide linkers comprise, individually, an Ig like linker (e.g., IgCL, IgCHT etc.) derived from an immunoglobulin (e.g., SEQ ID NO: 3536-3551) or a TCR-Ig like linker (e.g., TCRb-Ig3, SEQ ID NO: 3560; TCRa-Ig3, SEQ ID NO:3562; TCRg-Ig3, SEQ ID NO: 3566; or TCRd-Ig3, SEQ ID NO: 3568 etc.) or a variant or a fragment thereof. In some embodiments, the first and the second polypeptide chains further comprise one or more autonomous antigen binding domains (AABD) that are attached to the N-terminus or near the N-terminus of the first (e.g., vL, Vƒ or Vγ) and/or the second (e.g., vH, V3 or Vδ) antigen binding domains.

[0333] In one embodiment, the disclosure provides a SAR comprising a) one or more heterologous antigen binding domains that are operationally linked via an optional linker to the amino-terminus or near the amino-terminus of one chain of a signaling adaptor (or a signaling chain) or a variant thereof; and b) one or more heterologous antigen binding domains that are operationally linked via an optional linker to the amino-terminus or near the amino-terminus of second chain of a signaling adaptor (or a signaling chain) or a variant thereof. In an embodiment, such a SAR retains the signaling capability of the original signaling adaptors (or signaling chains). In an embodiment, the SAR also acquires the binding capabilities conferred by the heterologous antigen binding domains. In an exemplary embodiment, the signaling adaptor is any signaling adaptor (or signaling chain) that can be expressed on the plasma membrane of a cell (e.g., an immune cell, e.g., an immune effector cell). In an exemplary embodiment, the immune cell is selected from but is not limited to a T cell, an NK cell, a monocyte/macrophage, a granulocyte or a B cell. Exemplary signaling adaptors (or signaling chains) that can be used for the construction of SAR of the disclosure include but are not limited to CD3z (CD3ƒ, FcRγ (FcεRIγ), DAP10 and DAP12 etc. or variants thereof.

[0334] The disclosure provides SARs in which one or more heterologous antigen binding domains are operationally linked to the extracellular domains (e.g., hinge or spacer domains) of one or more chains of a signaling adaptor. In an embodiment, the SAR comprises a signaling adaptor that is a component of a TCR complex (e.g., CD3ƒ, CD3R, CD3γ, CD3E etc.). In an embodiment, the SAR comprises a signaling adaptor (e.g., CD3ƒ) that interacts with TCRα, J, y and/or 6 chains of the TCR complex. In an embodiment, the SAR comprises a signaling adaptor that does not interacts with TCRα, J, y and/or 6 chains of the TCR complex. In an embodiment, the SAR comprises a signaling adaptor that has a conserved aspartic acid residue in its transmembrane domain which interacts with positive charged residues (lysine or arginine) in the transmembrane regions or TCRα, TCRβ, TCRγ or TCRδ. In an embodiment, the SAR comprises a signaling adaptor that lacks a conserved aspartic acid residue in its transmembrane domain. In an embodiment, the SAR comprises a signaling adaptor that is not a component of a TCR complex. In an embodiment, the signaling adaptor is a non-CD3 signaling adaptor (NCAM). In an embodiment, the signaling adaptor is not CD3ƒ or a variant thereof.

[0335] In some embodiments, according to any of the SARs (such as isolated SARs) described above, the SAR comprises a signaling adaptor (e.g., CD3) that activates cell signaling. In an embodiment, the SAR comprises a signaling adaptor that inhibits cell signaling. In an embodiment, the SAR comprises a signaling adaptor (e.g. CD3) that possesses one or more ITAM motifs. In an embodiment, the SAR comprises a signaling adaptor that possesses two or more ITAM motifs. In an embodiment, the SAR comprises a signaling adaptor (e.g., FcRy) that possesses a single ITAM motif. In an embodiment, the SAR comprises a signaling adaptors that lacks an ITAM motifs. In an embodiment, the SAR comprises a signaling adaptor (e.g., DAP10) that comprises a tyrosine-based motif (YINM). In an embodiment, the SAR comprises a signaling adaptor (e.g., DAP10) that recruits the p85 subunit of PI3K and/or Grb2. In an embodiment, the SAR comprises a signaling adaptor that is a disulfide linker dimer in its native form. In an embodiment, the signaling adaptor is not a disulfide linker dimer in its native form. In an embodiment, the SAR comprises a signaling adaptor (e.g., CD3ƒ) that in its native state contains an interchain disulfide bond located in its transmembrane region. In an embodiment, the SAR comprises a signaling adaptor (e.g., DAP10 and DAP12) which in its native state contains an interchain disulfide bond that is not located in its transmembrane region. In an embodiment, the SAR comprises a signaling adaptor that in its native state contains an interchain disulfide bond that is located in its extracellular region.

[0336] In some embodiments, according to any of the SARs (such as isolated SARs) described above, the extracellular domain of the signaling adaptor is less than 10 amino acids in length. In an embodiment, the extracellular domain of the signaling adaptor is less than 8 amino acids in length. In an embodiment, the extracellular domain of the signaling adaptor is more than 10 amino acids in length. In an embodiment, the extracellular domain of the signaling adaptor is more than 15 amino acids in length.

[0337] In some embodiments, according to any of the SARs (such as isolated SARs) described above, the SAR comprises a signaling adaptor that induces protein phosphorylation. In an embodiment, the SAR comprises a signaling adaptor that induces protein dephosphorylation. In an embodiment, the SAR comprises a signaling adaptor that interacts with Zap70. In an embodiment, the SAR comprises a signaling adaptor that does not interact with Zap70. In an embodiment, the two chains of a double chain SAR comprise identical signaling adaptors (e.g., CD3ƒ and CD3ƒ). In an embodiment, the two chains of a double chain SAR comprise non-identical signaling adaptors (e.g., CD3ƒ and FcRγ or CD3ƒ and DAP10 or DAP10 and DAP12 etc.).

[0338] In some embodiments, according to any of the double chain SARs comprising signaling adaptors (such as isolated SARs) described above, one or both chains of a double chain SAR comprise signaling adaptors that contain costimulatory domains (e.g., co-stimulatory domains derived from 4-1BB, CD28, 2B4, OX40 etc.). In an embodiment, one or both chains of a double chain SAR comprise signaling adaptor that contain costimulatory domains (e.g., co-stimulatory domains derived from 4-1BB, CD28, 2B4, OX40 etc.) that are operationally linked to activation domains (e.g., CD3ƒ activation domains). Exemplary such CD3 signaling adaptors that are linked to the costimulatory domain of CD28 and 4-1BB are presented in SEQ ID NO:3493 and 3494, respectively. Exemplary SARs comprising the costimulatory domain of OX40 fused to activation domain of CD3 are represented by SEQ ID NO: 4460 and 4479. In an embodiment, one or both chains of a double chain SAR comprise a signaling adaptor containing fusion of the cytosolic domains of two different signaling adaptors. An exemplary such a SAR comprising a chain with containing fusion of cytosolic domains of DAP10 and CD3 is represented by SEQ ID NO: 4460. In an embodiment, the SAR comprises signaling adaptors comprising mutants of CD3z (or CD3ƒ), FcRγ, DAP10 and DAP12 that carry mutations which abolish the interchain disulfide bonds. Exemplary such signaling adaptors are represented by SEQ ID NO:3747, 3753, 3760, 3817 and 3820. In an embodiment, the signaling chain comprise mutants of CD3z, FcRγ, DAP10 and DAP12 that carry one or more mutations in their ITAM motifs (e.g., IXX mutant of CD3z). Exemplary such a signaling adaptor is represented by SEQ ID NO: 9824.

[0339] The exemplary antigen binding domains that can be used in the construction of a double chain SAR of the disclosure comprising include variable domains of an antibody (e.g., vL, vH), variable domains of TCR (e.g., Va, Vb, Vg or Vd chains etc.), an antibody, antibody fragment (e.g., Fab, Fab2), autonomous antigen binding domain (e.g., fully human vH domain, vHH, single chain TCR, svd-TCR etc.), scFv, non-immunoglobulin antigen binding domain (e.g., Centyrin, affibody, ZIP domain, an adaptor etc.), ligand, and extracellular domain of a receptor, an auto-antigen, TCR, HLA-independent TCR, variable domains of TCR (e.g., Va, Vb, Vg, Vd etc.) or a fragment thereof etc. In further embodiment, an autonomous antigen binding domain (e.g., fully human vH domain, vHH, single chain TCR etc.), non-immunoglobulin antigen binding domain (e.g., Centyrin, affibody etc.), ligand (e.g., APRIL, TPO, NKG2D-YA-G4Sx3-NKG2D-YA etc.), and extracellular domain of a receptor (e.g., NKp30, NKp44, NKp46, NKG2D, CD16A etc.), an adaptor binding domain (e.g., EZip, RZip, E4, R4 etc.) can be operationally linked the amino-terminus or near the amino-terminus of the vL, vH, Vα, Vβ, Vγ or Vδ chains of the SAR to confer additional antigen binding capabilities on the SAR.

[0340] In an embodiment, the two signaling adaptors of a double chain SAR are of the same type (e.g., both chains are derived from CD3ƒ). An exemplary such SAR is represented by SEQ ID NO: 4702. In an embodiment, the two signaling adaptors comprising a double chain SAR are of the different type (e.g., one signaling adaptor is derived from CD3 and the second adaptor is derived from FcRγ etc.). An exemplary such SAR is represented by SEQ ID NO: 6733.

[0341] In an embodiment, a double chain SAR may comprise one chain that is derived from a non-TCR receptor signaling chain (e.g., CD16A) and another chain that is derived from a signaling adaptor (e.g., CD3ƒ or FcRy). An exemplary such SAR is represented by SEQ ID NO: 4670.

[0342] In an embodiment, a double chain SAR may comprise one chain that comprises a signaling adaptor (e.g., CD3ƒ) and another chain that comprises a TCR constant chain (e.g., TCRa-T48C).

[0343] In an embodiment, the optional linker is a long linker. In an embodiment, the optional linker between the vL/vH, Vα/Vβ, Vγ/Vδ chains of the heterologous antigen binding domain and the non-TCR signaling chains is an Ig like linker (SEQ ID NO (DNA): 1142-1175 and SEQ ID NO (PRT): 3536-3569) represented in Table 13.

[0344] In some embodiments, the disclosure provides a cell that is not a T cell with target recognition properties and function of a T cell. In an embodiment, the disclosure provides a cell that is not a T cell (i.e., non-T cell) which expresses a receptor that confers on the cell a T cell receptor like target recognition and/or signal transduction. In an embodiment, the disclosure provides a cell that is not a T cell (i.e., non-T cell) which expresses a double chain or a multi-chain receptor that confers on the cell a T cell receptor like target recognition and/or signal transduction. In an embodiment, a double chain or a multichain receptor comprises at least two membrane associated domains (e.g., transmembrane domain or membrane anchoring domain). In an embodiment, a double chain or a multichain receptor comprises at least two transmembrane domains. In an embodiment, T cell receptor like recognition comprises specific binding to a peptide target presented by an MHC molecule. In an embodiment, the cell that is not a T cell (i.e., non-T cell) lacks the expression of T cell chains and/or lacks the expression of functional TCR chains. In an embodiment, the cell that is not a T cell (i.e., non-T cell) lacks the expression of a functional TCR/CD3 complex. In an embodiment, the cell that is not a T cell (i.e., non-T cell) lacks the expression of one or more of CD3ε, CD3γ and CD3δ or variants or fragments thereof. In an embodiment, the cell that is not a T cell (i.e., non-T cell) is not engineered to exogenously express one or more of CD3ε, CD3γ and CD3δ chains or variants or fragments thereof. In an embodiment, the cell that is not a T cell (i.e., non-T cell) is not engineered to exogenously express one or more of TCR chains or variants or fragments thereof. In an embodiment, the cell that is not a T cell (i.e., non-T cell) is not activated by a CD3 agonist antibody. In an embodiment, the cell that is not a T cell (i.e., non-T cell) is not activated by OKT3 antibody.

[0345] In an embodiment, the disclosure provides a non-T cell with T cell receptor like target recognition that is generated from an NK cell, g-NK cell, memory like NK cells, cytokine induced killer cell (CIK), iPSC, a modified HLA deficient iPSC, iPSC-derived NK cell, iPSC-derived T cell, B cell, a macrophage/monocyte, granulocyte, a dendritic cell, an immortalized cell line, an immortalized NK cell line, NK92 cell line, NK92MI cell line or derivative thereof. In an embodiment, the disclosure provides a non-T cell with T cell receptor like target recognition that is generated following the introduction of a single receptor into a cell that is not a functional T cell. In an embodiment, the disclosure provides a non-T cell with T cell receptor like target recognition that is generated without genetic modifications involving ectopic expression of the four CD3 chains, i.e., CD3ε, CD3γ, CD3δ and CD3ƒ into a cell that is not a functional T cell.

[0346] In an embodiment, the non-T cell expressing the double chain receptor (e.g., a SAR, e.g., uTCR-SAR) upon specific binding the target antigen results in the recruitment of at least one signaling adaptor. In an embodiment, the non-T cell expressing the double chain receptor upon specific binding the target antigen results in activation of at least one signaling pathway. In an exemplary embodiment, the signaling pathway is selected from the group of but not limited to NFAT, NF-κB, PI3K or ERK pathway. In an embodiment, the non-T cell expressing the double chain receptor upon binding the target antigen results in activation of at least one biological activity. In an embodiment, the biological activity is chosen from the group of but not limited to cellular activation, proliferation, differential, cytokine secretion, phagocytosis, migration or cytotoxicity.

[0347] In another aspect, the disclosure provides a modified cell, such as, but not limited to, a Natural Killer (NK) cell, having Major Histocompatibility Complex (MHC)-restricted antigen-specific cytotoxicity. The MHC can be any of MHC-class I, MHC-class II, and MHC-like molecules. A non-limiting example of an MHC-like molecule is HLA-E.

[0348] In a further aspect, the disclosure provides a method for producing a modified cell, such as, but limited to, a Natural Killer (NK) cell or macrophage, expressing a double chain receptor with two transmembrane/membrane associated domains and TCR like antigen recognition. The method includes providing a cell (e.g., Natural Killer (NK) cell or macrophage) and modifying the cell to express the antigen-specific receptor with TCR like binding properties. The modified cell can be any cell. Commonly used, non-limiting examples, are an NK-92 cell, a YTS cell, and a primary human NK cell.

[0349] In another embodiment, the disclosure provides a class of SARs with TCR like binding properties that can be expressed in any cell type. Such a SAR with TCR like binding properties and universal expression is designated Universal TCR-SAR or uTCR-SAR or uTCR. Provided herein are single chain and multichain (e.g., double chain) uTCR-SARs comprising the variable antigen binding domains of a TCR (e.g., Va/Vα, Vb/Vβ, Vg/Vγ, Vd/Vδ etc.) that can be expressed in not only T cells but also in any other cells including, but not limited to, NK cells, monocytes, macrophages, dendritic cells, granulocytes, endothelial cells and epithelial cells etc. In an embodiment, the cells expressing the uTCR respond to target cells expressing their antigen by increased cell proliferation, activation, cytokine secretion and cytotoxicity. In an embodiment, the target antigen is a peptide that is presented as part of an MHC complex. In an embodiment the target antigen is a lipid. The uTCR may also respond to a non-MHC restricted antigen if their TCR binding domain is derived from an HLA-independent TCR. In an embodiment, the disclosure provides a cell that is not a T cells which functionally expresses a double chain receptor with TCR like binding properties, including the property to bind to an intracellular peptide when presented by MHC complex.

[0350] The disclosure provides single chain uTCR-SAR comprising one or more heterologous antigen binding domains comprising scTCR, svd-TCR or a TCR mimic scFv or a fragment thereof operationally linked via optional linkers to the entire or partial extracellular domain of a non-TCR signaling receptor. In some embodiments, the disclosure provides that single chain SAR comprising scTCR, svd-TCR or a TCR mimic scFv acquires TCR-like binding capabilities (e.g., ability to bind to a peptide/MHC complex) and can be expressed in any cell, including a cell that is not a T cells or expresses TCR chains.

[0351] In some embodiments, there is provided a uTCR-SAR (such as an isolated uTCR-SAR) that specifically binds to a target antigen, wherein the uTCR-SAR comprises: a) a first polypeptide chain comprising a first antigen-binding domain and a first Membrane associated module (MAM); and b) a second polypeptide chain comprising a second antigen-binding domain and a second Membrane associated module (MAM), wherein the first antigen-binding domain and the second antigen-binding domain form a TCR-like (e.g., TCR-Fv) antigen-binding module that specifically binds to the target antigen, and wherein the first MAM and the second MAM form a non-T cell receptor module (NTCRM). In an embodiment, the NTCRM is capable of activating at least one signaling pathway and/or recruiting at least one signaling adaptor.

[0352] In an embodiment, the first and second antigen binding domains of the uTCR-SAR comprise of antigen binding domains of a TCR. In an embodiment, the first and second antigen binding domains of the uTCR-SAR comprise of antigen binding domains of a TCR that specifically bind to a peptide presented by an MHC molecule. In an embodiment, the first and second antigen binding domains comprise of variable domains of a TCR. In an embodiment, the first and second antigen binding domains comprise of Vα, Vβ, Vγ and V6 domains of a TCR. In an embodiment, the first antigen binding domain comprises of a Vu domain or a variant or a fragment thereof and the second antigen binding domain comprises of a Vβ domain or a variant or a fragment thereof. In an embodiment, the first antigen binding domain comprises of a Vγ domain or a variant or a fragment thereof and the second antigen binding domain comprises of a Vδ domain or a variant or a fragment thereof. In an embodiment, the first antigen binding domain comprises of antigen binding domain of preTCRα or a variant or a fragment thereof and the second antigen binding domain comprises of a Vβ domain or a variant or a fragment thereof. In an embodiment, the target antigen is a peptide/MHC complex. In an embodiment, the peptide recognized by the uTCR-SAR is an intracellular peptide. In an embodiment, the target antigen of a uTCR-SAR is an MHC-independent antigen. In an embodiment, the target antigen is a lipid. In an embodiment, the uTCR-SAR comprises of the variable domain of an HLA-independent TCR and its target antigen is a cell surface protein. In some embodiments, the uTCR-SAR binds to the target antigen with an equilibrium dissociation constant (Kd) from about 0.1 pM to about 500 nM.

[0353] In an embodiment, the first antigen binding domain and the second antigen binding domain are not derived from an antibody or an antibody fragment. In an embodiment, the first antigen binding domain and the second antigen binding domain are not variable domains of an antibody or variants or fragments thereof. In an embodiment, the first antigen binding domain and the second antigen binding domain are not vL and vH domains of an antibody. In an embodiment, the first antigen binding domain and the second antigen binding domain are not vL and vH domains of a TCR mimic antibody.

[0354] In an embodiment, the TCR-like (e.g., TCR-Fv) antigen-binding module specifically binds to a peptide presented by an MHC molecule. In an embodiment, the TCR-like (e.g., TCR-Fv) antigen-binding module specifically binds to an antigen (e.g., HLA-independent antigen) that is not presented by an MHC molecule. In an embodiment, the TCR-like (e.g., TCR-Fv) antigen-binding module specifically binds to lipid antigen.

[0355] In an embodiment, at least one of the MAM of a uTCR-SAR comprise of the transmembrane domain of a signaling adaptor. In an embodiment, both of the MAM of a uTCR-SAR comprise of the transmembrane domain of a signaling adaptor. In an embodiment, at least one of the MAM of a uTCR-SAR comprise of the transmembrane domain/membrane associated domain of a signaling receptor that is capable of recruiting a signaling adaptor. In an embodiment, both of the MAM of a uTCR-SAR comprise of the transmembrane domain/membrane associated domain of a signaling receptor that is capable of recruiting a signaling adaptor.

[0356] In some embodiments, there is provided a uTCR-SAR (such as an isolated uTCR-SAR) that specifically binds to a target antigen, wherein the uTCR-SAR comprises: a) a first polypeptide chain comprising a first antigen-binding domain comprising a Vα or a Vy domain and a first Membrane associated module (MAM); and b) a second polypeptide chain comprising a second antigen-binding domain comprising a Vβ or a Vδ domains and a second Membrane associated module (MAM), wherein the Vα or Vγ domain of the first antigen-binding domain and the complementary Vβ or Vδ domain of the second antigen-binding domain form TCR-like (e.g., TCR-Fv) antigen-binding module that specifically binds to the target antigen, and wherein the first MAM and the second MAM form a non-T cell receptor module (NTCRM). In an embodiment, the NTCRM is capable of activating at least one signaling pathway and/or recruiting at least one signaling adaptor. In an embodiment, the target antigen is a peptide/MHC complex.

[0357] In some embodiments, there is provided a uTCR-SAR (such as an isolated uTCR-SAR) that specifically binds to a target antigen, wherein the uTCR-SAR comprises: a) a first polypeptide chain comprising a first antigen-binding domain comprising a Vα domain (variable domain derived from a TCRα chain) and a first Membrane associated module (MAM); and b) a second polypeptide chain comprising a second antigen-binding domain comprising a Vβ domain (variable domain derived from TCRβ chain) and a second Membrane associated module (MAM), wherein the Vα domain of the first antigen-binding domain and the Vβ of the second antigen-binding domain form TCR-like (e.g., TCR-Fv) antigen-binding module that specifically binds to the target antigen, and wherein the first MAM and the second MAM form a non-T cell receptor module (NTCRM). In an embodiment, the NTCRM is capable of activating at least one signaling pathway and/or recruiting at least one signaling adaptor. In an embodiment, the target antigen is a peptide/MHC complex. In an embodiment, the target antigen is an MHC (HLA)-independent antigen.

[0358] In some embodiments, there is provided a uTCR-SAR (such as an isolated uTCR-SAR) that specifically binds to a target antigen, wherein the uTCR-SAR comprises: a) a first polypeptide chain comprising a first antigen-binding domain comprising a Vγ domain (variable domain derived from a TCRγ chain) and a first Membrane associated module (MAM); and b) a second polypeptide chain comprising a second antigen-binding domain comprising a Vδ domain (variable domain derived from TCRS chain) and a second Membrane associated module (MAM), wherein the Vγ domain of the first antigen-binding domain and the Vδ of the second antigen-binding domain form TCR-like (e.g., TCR-Fv) antigen-binding module that specifically binds to the target antigen, and wherein the first MAM and the second MAM form a non-T cell receptor module (NTCRM). In an embodiment, the NTCRM is capable of activating at least one signaling pathway and/or recruiting at least one signaling adaptor. In an embodiment, the target antigen is a peptide/MHC complex. In an embodiment, the target antigen is an MHC (HLA)-independent antigen. In an embodiment, the target antigen is a lipid.

[0359] In some embodiments, there is provided a uTCR-SAR (such as an isolated uTCR-SAR) that specifically binds to a target antigen, wherein the uTCR-SAR comprises: a) a first polypeptide chain comprising a first antigen-binding domain comprising a V-preTCRα domain (variable domain derived from a preTCRα chain) and a first Membrane associated module (MAM); and b) a second polypeptide chain comprising a second antigen-binding domain comprising a Vβ domain (variable domain derived from TCRβ chain) and a second Membrane associated module (MAM), wherein the Vα domain of the first antigen-binding domain and the Vβ of the second antigen-binding domain form TCR-like (e.g., TCR-Fv) antigen-binding module that specifically binds to the target antigen, and wherein the first MAM and the second MAM form a non-T cell receptor module (NTCRM). In an embodiment, the NTCRM is capable of activating at least one signaling pathway and/or recruiting at least one signaling adaptor. In an embodiment, the target antigen is a peptide/MHC complex.

[0360] In an embodiment, the first MAM and the second MAM do not comprise the transmembrane domain of a TCR chain selected from TCRα, TCRβ, TCRγ, TCRS or preTCRα. In an embodiment, the first MAM or the second MAM do not comprise the transmembrane domain of a TCR chain selected from TCRα, TCRβ, TCRγ, TCRS or preTCRα. In an embodiment, the first MAM and the second MAM do not comprise the transmembrane domain of a CD3 chain selected from CD3ε, CD3γ, CD3δ or CD3ƒ. In an embodiment, the first MAM and the second MAM do not comprise the transmembrane domain of a TCR chain and a CD3 chain. In an embodiment, the first MAM and the second MAM do not comprise the transmembrane domain of CD3ƒ. In some embodiments, the first and the second MAM of a uTCR-SAR comprises of a transmembrane or membrane associated domain of a signaling adaptor. In an embodiment, the signaling adaptor is selected from, but not limited, to one or more of CD3ƒ, FcRγ, DAP10 and/or DAP12 or variants or fragments thereof. In some embodiments, the signaling adaptor is a non-CD3 adaptor (NCAM). In some embodiments, the signaling adaptor is not CD3ƒ. In an embodiment, the MAM of a uTCR-SAR comprises of a non-TCR receptor. In an embodiment, the non-TCR is selected from, but not limited to, one or more of the following: CD16A, CD16B, CD64, CD32, NKp30, NKp44, NKp46, KIR2DL1, KIR2DL2, KIR2DL3, KIR2DL5A, KIR2DL5B, KIR3DL1, KIR3DL2, KIR3DL4, KIR2DL4, KIR2DS1, KIR2DS2, KIR2DS3, KIR2DS4, KIR2DS5, KIR3DS1, DNAM-1, 2B4, OX40, CD28, 4-1BB, CD27, CD81, CD2, CD5, TNFR-I, TNFR-II, Fas, CD30, CD40, CRTAM, TIGIT, CD96, SLAMF6, SLAMF7, CD100, CD160, and ILT2. Exemplary uTCR-SAR comprising variable domains of a NY-ESO-1 TCR attached to two polypeptides comprising the hinge domains of NKp46 and CD16 and NKp30 are represented by SEQ ID NO:10467 and 10468, respectively. An exemplary uTCR-SAR comprising Va and Vb domains of a NY-ESO-1 TCR attached to two polypeptides comprising the extracellular domain of NKp30 is represented by SEQ ID NO: 10469. In some embodiments, the first polypeptide chain and the second polypeptide chain are linked via one or more disulfide bonds. In some embodiments, the first polypeptide chain further comprises a first peptide linker between the first antigen-binding domain and the first MAM. In some embodiments, the second polypeptide chain further comprises a second peptide linker between the second antigen-binding domain and the second MAM. In some embodiments, the first polypeptide chain and the second polypeptide chain are linked via one or more disulfide bonds. In some embodiments, the first peptide linker and/or the second peptide linker are, individually, from about 5 to about 500 amino acids in length. In some embodiments, the first and/or second peptide linkers comprise, individually, a constant domain or fragment thereof from an immunoglobulin or T cell receptor subunit. In some embodiments, the first and/or second peptide linkers comprise, individually, a CH1, CH2, CH3, CH4 or CL antibody domain, or a fragment thereof. In some embodiments, the first and/or second peptide linkers comprise, individually, a Cα, Cβ, Cγ, or Cδ TCR domain, or a variant or a fragment thereof. In exemplary embodiments, the first and/or second linkers comprise, individually, an Ig like linker (e.g., IgCL, IgCH1 etc.) derived from an immunoglobulin (e.g., SEQ ID NO: 3536-3551) or a TCR-Ig like linker (e.g., TCRb-Ig3, SEQ ID NO: 3560; TCRa-Ig3, SEQ ID NO:3562; TCRg-Ig3, SEQ ID NO: 3566; or TCRd-Ig3, SEQ ID NO: 3568 etc.) or a variant or a fragment thereof. In some embodiments, first and/or second peptide linkers comprise mutations that increase their expression, affinity and chain pairing. In an embodiment, the first and the second antigen binding domains comprise complementary chains (e.g., Vα and Vβ or Vγ and Vδ). In some embodiments, the first and the second polypeptide chains further comprise one or more autonomous antigen binding domains (AABD) that are attached to the N-terminus or near the N-terminus of the first (e.g., vL, Vα or Vγ) and/or the second (e.g., vH, Vβ or Vδ) antigen binding domains. In some embodiments, the SAR binds to the target antigen with an equilibrium dissociation constant (Kd) from about 0.1 pM to about 500 nM. In some embodiments, the target antigen is a complex comprising a peptide and a major histocompatibility complex (MHC) protein. In exemplary embodiments, the peptide/MHC complex comprises a peptide derived from one or more of NY-ESO-1, MAGE-A2, MAGE-A3, MAGE4, WT1, AFP, TERT, MART-1, pp66-CMV, HPV16-E7, PRAME, EBV-LMP2A, HIV-1, PSA or gp100. In some embodiments, the uTCR is an HLA independent TCR that can target cell surface antigens. In an embodiment, the target antigen is a cell surface antigen. In an exemplary embodiment, the target antigen is one or more of the antigens listed in Table B. In some embodiments, the cell surface antigen is selected from the group consisting of protein, carbohydrate, and lipid. In some embodiments, the cell surface antigen is one or more of CD2, CD5, CD19, CD20, CD22, CD33, CD70, CD123, CD138, CD179b, CLL-1, FLT3, Claudin 18.2, BCMA, GCC, MPL, SLAMF7, ROR1, ROR2, GPRC5D, FCRL5, MSLN, EGFR, EGFRviii, PSMA, PSCA, KLK2, IL13Ra2, TROP2, PTK7, DLL3, Mucd, Muc16 or Her2. In an embodiment, a uTCR-SAR is bispecific or multispecific. In an embodiment, the disclosure provides a uTCR that can bind to two or more antigens that are MHC restricted. In an embodiment, a uTCR-SAR can bind to two or more antigens that are MHC restricted and/or MHC-non-restricted. In an embodiment, a uTCR-SAR can bind to a peptide/MHC complex via its TCR-Fv domain and bind to one or more peptide/MHC complexes via one or more svd-TCR that are attached to the N-terminus or near the N-terminus of its Vα and Vβ or Vγ and Vδ domains. In an embodiment, a uTCR-SAR can bind to one or more peptide/MHC complex via its TCR-Fv domain and svd-TCR domain and bind to one or more surface antigens via one or more AABD (e.g., vHH, FHVH, centyrin etc.) that are attached to the N-terminus or near the N-terminus of its Vα and Vβ or Vγ and Vδ domains.

[0361] In some embodiments, according to any of the uTCR-SARs (such as isolated uTCR-SARs) described above, the first MAM further comprises a first hinge domain or fragment thereof N-terminal to the first transmembrane domain, and/or the second MAM further comprises a second hinge domain or fragment thereof N-terminal to the second transmembrane domain. In some embodiments, the NTCRM comprises a disulfide bond between a residue in the first hinge domain and a residue in the second hinge domain. In some embodiments, according to any of the uTCR-SARs (such as isolated uTCR-SARs) described above, the first MAM further comprises a first antigen binding domain or fragment thereof N-terminal to the first hinge domain and/or the second MAM further comprises a second antigen binding domain or fragment thereof N-terminal to the second hinge domain. In some embodiments, the first MAM further comprises a first cytosolic domain C-terminal to the first transmembrane domain. In some embodiments, the second MAM further comprises a second cytosolic domain C-terminal to the second transmembrane domain. In an embodiment, the first and/or second cytosolic domains are activation domains comprising one or more ITAMs. In some embodiments, the uTCR-SAR binds to the target antigen with an equilibrium dissociation constant (Kd) from about 0.1 pM to about 500 nM.

[0362] In some embodiments, according to any of the uTCR-SARs (such as isolated uTCR-SARs) described above, the first polypeptide chain further comprises a first co-stimulatory domain C-terminal to the first transmembrane domain. In some embodiments, the second polypeptide chain further comprises a second co-stimulatory domain C-terminal to the second transmembrane domain. In some embodiment, according to any of the uTCR-SARs (such as isolated uTCR-SARs) described above, the first polypeptide chain comprises more than one co-stimulatory domains C-terminal to the first transmembrane domain and/or the second polypeptide chain comprises more than one co-stimulatory domains C-terminal to the second transmembrane domain. In some embodiments, the first polypeptide chain further comprises a first signaling peptide N-terminal to the first antigen-binding domain. In some embodiments, the second polypeptide chain further comprises a second signaling peptide N-terminal to the second antigen-binding domain.

[0363] In an embodiment, the disclosure provides a double chain uTCR-SAR construct (such as an isolated construct) that specifically targets an antigen (e.g., a peptide/MHC complex) comprising TCR variable domains (e.g., Va/Vα, Vb/Vβ, Vg/Vγ, Vd/Vδ etc.) fused to at least one polypeptide comprising a non-T cell receptor module (NTCRM). In some embodiments, the SAR comprises one or more TCR variable domains that specifically bind to a target antigen (e.g., a peptide/MHC complex or a lipid antigen) and a non-T cell receptor module (NTCRM) capable of recruiting at least one signaling adaptor. In an exemplary embodiment, the signaling adaptor is one or more of but not limited to CD3ƒ, FcRγ, DAP10 or DAP12. In some embodiments, the target antigen is a complex comprising a peptide and an MHC protein (such as an MHC class I protein or an MHC class II protein).

[0364] In an embodiment, the uTCR-SAR is expressed on the surface of a cell. In an embodiment, the uTCR-SAR is expressed on the surface of a cell that is not a T cell. In an embodiment, the uTCR-SAR is expressed on the surface of a cell that lacks the expression of TCRα, TCRβ, TCRγ, TCRS, preTCRα chains or variants or fragments thereof. In an embodiment, the uTCR-SAR is expressed on the surface of a cell that lacks the expression of CD3ε, Cd3γ and CD3δ chains or variants or fragments thereof. In an embodiment, the uTCR-SAR with TCR-like properties is functionally active (i.e., capable of inducing cell proliferation, cytokine secretion or cytotoxicity) when expressed in a T cell. In an embodiment, the uTCR-SAR is functionally active (i.e., capable of inducing cell proliferation, cytokine secretion or cytotoxicity) when expressed in a cell that is not a T cell (i.e., when expressed in a NK cell, macrophage, granulocyte dendritic cell etc.). In an embodiment, the SAR is expressed and functionally active in a cell that lacks the expression of one or more of TCRα, TCRβ, TCRγ, TCRS and preTCRα chains or variants or fragments thereof. In an embodiment, the uTCR-SAR is expressed and functionally active in a cell that lacks the expression and/or function of TCRα, TCRβ, TCRγ, TCRS and preTCRα chains or variants thereof. In an embodiment, the uTCR-SAR is expressed and functionally active in a cell that lacks the expression and/or function of CD3ε, Cd3γ and CD3δ chains or variants thereof.

[0365] In an embodiment, a uTCR-SAR confers TCR-like antigen recognition to a T cell. In an embodiment, a uTCR-SAR confers TCR-like antigen recognition to a cell other than a T cell (e.g., NK cell, g-NK cell, memory like NK cell, CIK, monocytes, macrophages, dendritic cells, epithelial cells, iPSC derived NK cells etc.). In an embodiment, a uTCR-SAR is capable of binding peptide antigens in an MHC (HLA) dependent manner. In an exemplary embodiment, a cell (e.g., NK cell or macrophage) expressing a uTCR-SAR can recognize intracellular peptide antigens in an MHC (HLA)-dependent manner. In an exemplary embodiment, an immune cell (e.g., NK cell or macrophage) expressing a uTCR-SAR can recognize intracellular peptide antigens in an MHC (HLA)-dependent manner and activate one or more cellular signaling pathways (e.g., NFAT, PI3K, NF-κB pathway etc.). In an exemplary embodiment, an immune cell (e.g., NK cell or macrophage) expressing a uTCR-SAR can recognize intracellular peptide antigens in an MHC (HLA)-dependent manner and block one or more cellular signaling pathways (e.g., NFAT, PI3K, NF-κB pathway etc.). In an embodiment, an immune cell (e.g., NK cell, T cell or macrophage) expressing a uTCR/SAR possess the ability to induce cell activation, proliferation, cytokine secretion (e.g., secretion of IFNγ, TNFα and IL2) and/or cytotoxicity upon binding their target peptide antigen. In an embodiment, an immune cell (e.g., NK cell, T cell or macrophage) expressing a uTCR-SAR possess the ability to block cell activation, proliferation, cytokine secretion (e.g., secretion of IFNγ, TNFα and IL2) and/or cytotoxicity upon binding their target peptide antigen. In an embodiment, a uTCR-SAR is an activating receptor. In an embodiment, uTCR-SAR is an inhibitory receptor.

[0366] In an embodiment, a uTCR-SAR comprises one or more antigen binding domains derived from variable domains of a TCR (e.g., Va/Vα, Vb/Vβ, Vg/Vγ, Vd/Vδ and preTCRα) and has two chains. In an embodiment, a uTCR-SAR comprises a Va/Vα and a Vb/Vβ domain. In an embodiment, a uTCR-SAR comprises a Vg/Vγ and a Vd/Vδ domain. In an embodiment, the uTCR-SAR comprises a preTCRα and a Vb/Vβ domain. In an embodiment, the two variable domains of a uTCR SAR are present on two separate polypeptide chains. In an embodiment, the two variable domains comprising the antigen binding domain (e.g., peptide/MHC complex binding domain) of a uTCR SAR are not part of a single polypeptide chain. In an embodiment, the two variable domains of a uTCR-SAR are not operationally linked via a linker, i.e., a uTCR is not a single chain TCR (scTCR).

[0367] In an embodiment, one or both chains of a uTCR comprise a transmembrane domain or a membrane anchoring domain. In an embodiment, one or both chains of a uTCR SAR comprise a cytosolic domain. In an embodiment, one or both chains of a uTCR SAR comprise transmembrane and/or cytosolic domains that are capable of recruiting signaling proteins or signaling adaptors. In an embodiment, one or both chains of a double chain uTCR SAR comprise one or more cytosolic activation domains. In an embodiment, one or both chains of a double chain uTCR SAR comprise one or more ITAMs in their cytosolic domain. In an exemplary embodiment, one or both chains of a double chain uTCR SAR comprise cytosolic domains comprising 1, 2 or 3 ITAMs. In an exemplary embodiment, one chain of a uTCR SAR comprises a cytosolic domain with a single ITAM while the second chain has a cytosolic domain with 3 ITAMs. In an exemplary embodiment, one chain comprises a cytosolic domain with a single 1 ITAM while the second chain comprises a cytosolic domain with 2 or 3 ITAMs. In an embodiment, one or both chains of a double uTCR SAR comprise one or more inhibitory motifs, e.g., ITIMs. In an embodiment, the uTCR-SAR comprises a cytosolic activation domain derived from a CD3 chain in which 1 or more ITAMs are mutated. In exemplary embodiment, the uTCR-SAR comprises a cytosolic activation domain derived from a CD3 chain in which the tyrosine residues of 1 or more ITAMs are mutated to phenylalanine.

[0368] In an embodiment, the disclosure also provides uTCR-SAR comprising variable domains (e.g., Va, VD, Vγ and VS etc.) of TCRs as their antigen binding domains operationally linked to the extracellular domains of signaling chains (adaptors) and/or non-TCR receptors and comprising co-stimulatory domains.

[0369] In an embodiment, one or both chains of a double chain uTCR SAR with TCR-like binding properties optionally comprise one or more co-stimulatory domains. In an embodiment, the one or more co-stimulatory domains are located in the juxtamembrane regions of one or both chains. In an exemplary embodiment, the co-stimulatory domains are derived from the cytosolic domain of 4-1BB, CD28, CD27, CD81, OX40, 2B4 or CD2 etc. Exemplary such CD3 signaling chains comprising the costimulatory domain of CD28 and 4-1BB are presented in SEQ ID NO:3493 and 3494, respectively. As SARs are modular in format, the costimulatory domains of CD28 and 4-1BB can be replaced by co-stimulatory domains derived from other co-stimulatory receptors (e.g., OX40, 2B4, CD2, CD81 etc.) and variants thereof to generate novel uTCR-SARs. Similarly, one or both CD3 signaling chains can be substituted for other signaling chains to generate novel uTCR-SARs based on the signaling chains of FcRγ, DAP10 and DAP10 and variants thereof and comprising the different costimulatory domains. Exemplary such uTCR-SAR targeting NY-ESO1 peptide/MHC complex are represented by SEQ ID NO: 10481-10530.

[0370] In an embodiment, the uTCR SAR with TCR-like binding properties is unispecific. In an embodiment, the uTCR SAR with TCR-like binding properties is bispecific. In an embodiment, the uTCR SAR with TCR-like binding properties is biparatopic. In an embodiment, the uTCR SAR with TCR-like binding properties is multispecific. In an embodiment, the disclosure provides uTCR SAR with TCR like binding properties that are capable of binding to two or more distinct intracellular peptides when presented by the MHC complex. In an embodiment, the disclosure provides uTCR SAR with TCR like binding properties that are capable of binding to intracellular peptides and cell surface expressed (or extracellular) proteins (e.g., CD19, CD20 etc.). An exemplary such uTCR-SAR that targets both NY-ESO-1 peptide/MHC complex and CD20 is represented by SEQ ID NO:10478. In this construct a vHH domain targeting CD20 is attached to the N-terminus of Vb domain targeting NY-ESO-1 peptide via a small linker. The CD20 vHH domain can be replaced by other AABD targeting other surface antigens or peptide/MHC complexes. In an exemplary embodiment, the CD20 vHH domain is replaced by a single variable domain TCR targeting a MAGE-A3 peptide/HLA-A2 complex to generate a bispecific uTCR-SAR that can target both NY-ESO-1 and MAGE-A3 peptides. An AABD can be also attached to the Va domain of a uTCR to generate bispecific SAR or to both Vb and Va domains to generate a multispecific uTCR-SAR. Further, more than one AABD (e.g., vHH, FHVH, centyrins, svd-TCR) can be attached to the N-terminus of each of the variable domains of a uTCR-SAR. In an embodiment, the disclosure provides uTCR SAR with TCR like binding properties that are capable of binding to their target antigen(s) in an MHC (or HLA)-dependent and an MHC (HLA)-independent manner.

[0371] In an embodiment, the uTCR SAR with TCR binding properties comprise two variable domains (e.g., Vα and Vβ or Vγ and Vδ etc.) that associate with each other to form a fragment variable TCR (TCR-Fv) that binds to the peptide/MHC complex. In an embodiment, the SAR with TCR binding properties further comprise one or more autonomous antigen binding domains (e.g., vHH, FHVH, svd-TCR etc.). In an embodiment, the one or more autonomous antigen binding domains (e.g., vHH, FHVH, svd-TCR etc.) are operationally linked to the N-terminus or near N-terminus of one or both of the TCR variable domains (e.g., Vα and Vβ or Vγ and Vδ etc.) via optional linkers. In exemplary embodiments, the disclosure provides double chain SARs that recognize NY-ESO-1 peptide in complex with MHC through their Va/V domains and co-expresses svd-TCR targeting NY-ESO-1 or MAGE-A3 or a vHH or FHVH domain targeting CD20 or BCMA etc. An exemplary such uTCR-SAR that targets NY-ESO-1 peptide/MHC complex, CD20 and BCMA is represented by SEQ ID NO:10479.

[0372] In an embodiment, the disclosure provides a double chain uTCR SAR in which the Va (Vα) domain of a TCR is operationally linked to the extracellular domain of one membrane anchored polypeptide chain via an optional linker (e.g., TCRa-Ig3, SEQ ID NO: 3562) and a Vb (Vβ) domain is operationally linked to the extracellular domain of a second membrane anchored polypeptide chain via an optional linker (e.g., TCR-like linker, e.g., TCRb-Ig3; e.g., SEQ ID NO: 3560). In an embodiment, one or both membrane anchored polypeptide chains comprising the double chain SAR are transmembrane proteins.

[0373] In an exemplary embodiment, the disclosure provides a uTCR-SAR in which the Va (Vα) domain derived from a TCR is operationally linked to the extracellular hinge domain of one chain of a signaling adaptor (e.g., CD3ƒ, FcRγ, DAP10 or DAP12 etc.) or a variant thereof via an optional linker (e.g., TCRa-Ig3, SEQ ID NO: 3562) and a Vb (Vβ) domain is operationally linked to the extracellular hinge domain of a second chain of a signaling adaptor or a variant thereof via an optional linker (e.g., TCR-like linker, e.g., TCRb-Ig3; e.g., SEQ ID NO: 3560). An exemplary such uTCR-SAR that recognizes an NY-ESO-1 peptide/HLA-A*02:01 complex when expressed in a cell (e.g., T cell, NK cell, macrophage etc.) is presented in SEQ ID NO (DNA): 9355 and SEQ ID NO: (PRT): 10447. As SAR are modular in format, the one or both CD3 signaling chains of this SAR can be replaced by other signaling chains/adaptors, including signaling chains of FcRγ, DAP10 and DAP10 or variants thereof. Furthermore, the linker domains can be replaced by other linker domains. In an exemplary embodiment, the Ig like linker TCRa-Ig3 (SEQ ID NO: 3562) is replaced by IgCL linker (SEQ ID NO: 3536) and the linker TCRb-Ig3 (SEQ ID NO: 3560) is replaced by IgG-CH1 (SEQ ID NO: 3537), IgG2-0C-CH1(SEQ ID NO: 3543), IgG2-IC-CHI1 (SEQ ID NO: 3544), IgG3-CHI1 (SEQ ID NO: 3545), IgG4-CHI1(SEQ ID NO:3546), IgAI-CHI1 (SEQ ID NO: 3547), IgA2-CHI1, IgD-CHI1, IgE-CHI1 or IgM-CHI1 (SEQ ID NO: 3551). Exemplary such uTCR-SAR constructs targeting NY-ESO-1 peptide/MHC complex are represented by SEQ ID NO:9357-9365.

[0374] In some embodiments, a Vα domain is attached to an IgCL linker and a VP domain is attached to an IgCH1 linker. In some embodiments, a Vβ domain is attached to an IgCH1 linker and a Vα domain is attached to a IgCL linker. In some embodiments, a Vu domain is attached to a Cu-derived linker (e.g., TCRa-Ig3) and Vβ domain is attached to a CP derived linker (e.g., TCRb-Ig3). In some embodiments, a Vβ domain is attached to a Cu-derived linker (e.g., TCRa-Ig3) and Vα domain is attached to a Cβ derived linker (e.g., TCRb-Ig3). An exemplary such construct is represented by SEQ ID NO: 10448. In some embodiments, a Vγ domain is attached to a Cy-derived linker (e.g., TCRg-Ig3) and Vδ domain is attached to a Cδ derived linker (e.g., TCRd-Ig3). An exemplary such construct is SEQ ID NO:10694. This construct has the Vd2 and Vg9 variable domains. In some embodiments, a Vγ domain is attached to a Cδ-derived linker (e.g., TCRd-Ig3) and Vδ domain is attached to a Cγ derived linker (e.g., TCRg-Ig3). An exemplary such as construct is represented by SEQ ID NO: 10693. In some embodiments, other configurations of variable domains and linkers are envisioned.

[0375] In an exemplary embodiment, in the case of a uTCR-SAR comprising the variable domains of TCRγ and TCRδ, the Vγ fragment is attached to one chain of the signaling adaptor (e.g., CD3ƒ, FcRγ, DAP10 or DAP10 etc.) via an Ig-like linker derived from TCRγ (e.g., TCRg-Ig3, SEQ ID NO: 3566) and the Vδ fragment is attached to the second chain of the signaling adaptor via an Ig like linker derived from TCRδ chain (e.g., TCRd-Ig3, SEQ ID NO: 3568). The TCRg-Ig3 and TCRg-Ig3 linker domains can be replaced by other linker domains. The disclosure provides SAR comprising the variable domains of TCRγ and TCRδ in which linkers derived from Ig (e.g., IgCL and IgG-CH1) or TCRα/β (e.g., TCRa-Ig3 and TCRb-Ig3) can be substituted for one or both linkers derived from TCRγ (e.g., TCRg-Ig3, SEQ ID NO: 3566) and TCRδ chain (e.g., TCRd-Ig3, SEQ ID NO: 3568).

[0376] The disclosure provides heterodimeric double chain uTCR-SAR comprising variable domains of TCR as their antigen binding domains in which the two signaling chains are of different types (e.g., CD3ƒ and FcγR, CD3ƒ and DAP10, CD3ƒ and DAP12, FcRγ and DAP10 etc.). The disclosure provides heterodimeric double chain uTCR-SAR in which one or both signaling chains comprise the transmembrane and optionally the cytosolic domains of a naturally occurring signaling receptor, e.g., CD16A, NKp30, NKp44, NKp44 etc. The one or both chains of such uTCR-SAR may further comprise one or more co-stimulatory domains. Exemplary uTCR-SAR constructs targeting NY-ESO-1 peptide/HLA-A*02:01 and MAGE-A3 peptide/HLA-A*02:01 complexes and comprising different binding domains, linkers, activation domains and costimulatory domains are represented by SEQ ID NO (PRT): 10447-10530 and 10531-10610, respectively. Exemplary uTCR-SAR constructs comprising the variable domain of MC.7.G5, an HLA-independent TCR, that recognizes multiple cancer types are represented by SEQ ID NO (PRT): 10620-10692 and SEQ ID NO (DNA): 9528-9600.

[0377] The disclosure provides, single chain, double chain and double chain hetero-dimeric SARs comprising the partial or entire region of CD16 (FcγRIII). The disclosure provides SARs comprising CD16 or fragments thereof that have 70%, 75%, 80%, 85%, 90%, 95%, 97%, 98%, 98.5%, 99% or 99.9% identity to any of the CD16 sequences described herein while retaining the biological activity. Exemplary full-length CD16 nucleic acid and amino acid sequences that can be used in the construction of CD16-SARs of the disclosure are provided in SEQ ID NO (DNA): 1415-1417 and SEQ ID NO (PRT): 3809-3811 or equivalent residues (i.e., a homolog) from a non-human species, e.g., mouse, rodent, monkey, ape and the like. The CD16 fragments that can be used in the construction of CD16 SARs of the disclosure are provided in Tables 25-30 of the provisional application. The CD16 SARs can be also constructed using variants of the CD16 fragments whose sequences are provided in Tables 25-30 or equivalent residues from non-human species. Exemplary single chain, double chain and double chain hetero-dimeric SARs of the disclosure are provided in Tables 32, 34, and 36-39 of the provisional application.

[0378] CD16 has two isoforms, CD16a and CD16b which bears sequence homology in the extracellular and transmembrane domains. Unless specified otherwise, CD16 refers to both CD16a (FcγRIIIa) and CD16b (FcγRIIIb) isoforms and any other alternatively spliced variant from human or non-human species. However, as the CD16b isoform lacks a cytosolic domain, any description regarding the CD16 cytosolic domain pertains only to the CD16a isoform and the equivalent residues from a non-human species. In some embodiments, the CD16 sequences that can be used in the construction of the CD16 SARs of the disclosure may include mutants and variants that increase the affinity of CD16 for immunoglobulin Fc region (e.g., CD16A-F158V; SEQ ID NO: 1415) and, in addition, prevent its cleavage from cell surface (e.g., CD16A-F158V-S197P; SEQ ID NO: 1453).

[0379] In certain embodiments, the nucleic acid sequence of the SAR molecule comprises the nucleic acid sequence of human CD16 as shown in SEQ ID NO: 1415-1417. In certain embodiments, the nucleotide sequence of the SAR comprises sequence that encodes for amino acid sequence of CD16 having at least one, five or ten modifications but not more than 20 modifications of an amino acid sequence of SEQ ID NO: 3809-3811, or a sequence with 70-99% identity to an amino acid sequence of SEQ ID NO: 3809-3811. In certain embodiments, SAR molecule comprises the amino acid sequence of SEQ ID NO: 3809-3811 or equivalent residues from a non-human species.

[0380] In an embodiment, the disclosure provides a single chain CD16 SAR comprising the partial or entire region of CD16 or a variant thereof. In an embodiment, the disclosure provides a single chain CD16 SAR comprising a partial or entire region of CD16 extracellular domain. Exemplary CD16 extracellular domain sequences that can be used in the construction of a CD16-SAR of the disclosure are provided in SEQ ID NO (DNA): 1496-1509 and SEQ ID NO (PRT): 3890-3903 or the equivalent residues (i.e., a homolog) from a non-human species. In an embodiment, the disclosure provides a CD16 SAR comprising the partial or entire region of CD16 hinge domain. Exemplary CD16 hinge domain sequences that can be used in the construction of a CD16-SAR of the disclosure are provided in SEQ ID NO (DNA): 1545-1547 and SEQ ID NO (PRT): 3939-3941 or the equivalent residues (i.e., a homolog) from a non-human species. In an embodiment, the disclosure provides a CD16 SAR comprising the partial or entire region of CD16 transmembrane domain. Exemplary CD16 transmembrane sequences that can be used in the construction of CD16-SARs of the disclosure are provided in SEQ ID NO (DNA): 1528-1530 and SEQ ID NO (PRT): 3922-3924 or the equivalent residues (i.e., a homolog) from a non-human species. In an embodiment, the disclosure provides a CD16 SAR comprising a partial or entire region of CD16 cytosolic domain. Exemplary CD16 transmembrane sequences that can be used in the construction of CD16-SARs of the disclosure are provided in SEQ ID NO (DNA): 1556-1558 and SEQ ID NO (PRT): 3950-3952 or the equivalent residues (i.e., a homolog) from a non-human species. The disclosure also provides SARs comprising variants of CD16 or fragments thereof that retain at least one biological activity of the wild-type CD16 to which it has identity or homology.

[0381] In an embodiment, the CD16 SAR comprises the CD16 extracellular domain comprising both immunoglobulin like domains (i.e., D1 and D2) that is attached via the CD16 hinge domain to CD16 transmembrane domain and to CD16 cytosolic domain. An exemplary such CD16 SAR targeting BCMA is represented by CD8SP-Sph-BCMA-FHVH93-Kpn-G4S-EcoR1-Xho-CD16-F158V-FL-TMCP-v1-F-P2A-SpeXba-PAC (SEQ ID NO(DNA): 1638 and SEQ ID NO (PRT): 4032). Additional exemplary such SARs comprising scFv, FHVH, vHH and non-immunoglobulin antigen binding scaffolds targeting different antigens are provided in SEQ ID NO (DNA): 4851-5121. Such a CD16 SAR also retains the ability to bind to the Fc region of an antibody, an antibody fragment or bispecific/tri-specific engager and mediate antibody dependent cytotoxicity. Thus, immune cells (e.g., T cells, NK cells, monocytes/macrophages, neutrophils etc.) expressing the SAR CD8SP-BCMA-FHVH-33-CD16A-F158V-S197P-FL-v3 (SEQ ID NO: 5062) can target BCMA expressing target cells through BCMA FCVH region. In addition, such immune cells can be redirected to targeted Her2 expressing target cells in the presence of Herceptin. Alternatively, such immune cells (e.g., T or NK cells) can be redirected to targeted CD20 expressing target cells in the presence of Rituximab.

[0382] In an embodiment, the CD16 SAR contains the partial CD16 extracellular domain that is missing the first immunoglobulin like domain (i.e., D1) of CD16. Such a CD16 SAR comprises the linker region between D1 and D2 domains and 2nd immunoglobulin like domains (i.e., D2) that is attached via CD16 hinge domain to CD16 transmembrane domain and CD16 cytosolic domain. An exemplary such CD16 SAR targeting BCMA is represented by CD8SP-Sph-BCMA-FHVH93-Kpn-G4S-EcoR1-Xho-CD16-F158V-D2TMCPv1-F-P2A-SpeXba-PAC (SEQ ID NO (DNA): 1664 and SEQ ID NO (PRT): 4058). Such a CD16-SAR lacks the ability to bind to an antibody as it contains only the D2 domain of CD16 and lacks the D1 domain.

[0383] In an embodiment, a CD16 SAR comprises the CD16 D2 domain that is attached via CD16 hinge domain to CD16 transmembrane domain and CD16 cytosolic domain. Such a CD16-SAR lacks the ability to bind to an antibody as it contains only the D2 domain of CD16 and lacks the D1 domain.

[0384] In an embodiment, the CD16 SAR comprises the partial or entire CD16 hinge domain that is attached to CD16 transmembrane domain and to CD16 cytosolic domain. An exemplary such CD16 SAR targeting BCMA is represented by CD8SP-Sph-BCMA-FHVH93-Kpn-G4S-EcoR1-Xho-CD16-F158V-Hinge-TM-CP-v1-F-P2A-SpeXba-PAC (SEQ ID NO(DNA): 1690 and SEQ ID NO (PRT): 4084). Such a CD16-SAR lacks the ability to bind to an antibody as it lacks both the D1 and D2 domains.

[0385] In an embodiment, the CD16 SAR comprises a heterologous hinge (spacer) domain that is present between the antigen binding domain (e.g., scFv, or AABD) and the hinge domain of CD16. An exemplary such CD16 SAR targeting CD19 is represented by CD8SP-CD19-hu-mROO5-1-scFv-CD8-hinge-CD16A-Hinge-TM-CP-V158-F-P2A-PAC (SEQ ID NO (DNA): 7693 and SEQ ID NO (PRT): 8385). This construct comprises a CD19 targeted hu-mROO5-1 scFv operationally linked via CD8-hinge to a fragment encoding CD16A-Hinge, transmembrane and cytosolic domain. In an alternate embodiment, the CD8 hinge region is directly linked to CD16A transmembrane and cytosolic domains. As the SAR are modular in the design, the CD19-hu-mROO5-1-scFv in the above constructs can be replaced by an antigen binding domain (e.g., scFv, AABD etc.) targeting another antigen. Further, the CD8 hinge domain can be replaced by a different hinge domain. An exemplary such construct comprising a CD28 hinge in place of the CD8 hinge is presented by CD8SP-CD19-hu-mROO5-1-scFv-CD28-Ig-113-137-CD16A-v158-Hinge-TM-CP-v2-F-F2A-PAC (SEQ ID NO (DNA): 7683; SEQ ID NO (PRT): 8375) (Table 46).

[0386] In an embodiment, the CD16 SAR comprises, an AABD (e.g., a vHH, FHVH, chVH, centyrin, affibody etc.) that is inserted between the D2 domain and the hinge domain of CD16 with optional intervening linkers (e.g., Gly4-Ser linker). In an exemplary embodiment, the different domains of such a CD16 SAR from amino to carboxy-terminal include an N-terminal signal peptide, CD16-D1 domain, CD16-D2 domain, optional linker, AABD (e.g., vHH, FHVH, centyrin, affibody etc.), optional linker, CD16-hinge domain, CD16-transmembrane domain and CD16-cytosolic domain.

[0387] It is to be understood that the different CD16 domains (i.e., extracellular, D1, D2, hinge, transmembrane and cytosolic) that may be used in the construction of the SAR may comprise their entire sequence or a deletion mutant or a variant as long as the domain retains at least one of its functional properties. The CD16 domains may comprise their wild-type sequence or one or more of the high affinity (e.g., F158V) or high affinity non-cleavable (e.g., F158V/S197P or F158V/S197R) variants.

[0388] In an embodiment, the antigen binding domain of the CD16 SAR comprises a scFv, a vL, vH, Fv, Va, Vb, Vg, Vd, TCR-Fv, vHH, FHVH, a single domain antibody, a single chain TCR (scTCR), a single variable domain TCR (svd-TCR), a non-immunoglobulin antigen binding scaffold, a ligand (e.g., APRIL) or the extracellular domain of a receptor (e.g., PD1, NKG2D, NKp30, NKp44, NKp46 etc.). The chain of a single chain SAR may bind to one antigen or more than one antigen (e.g., two, three, four etc.). The chain of a single chain CD16 SAR may further comprise one or more adaptors (e.g., RZIP, EZIP, NKG2D-YA, NKG2D-FA etc.).

[0389] In some embodiments, the CD16 SAR of the disclosure comprises a molecule of the general formula:

[0390] AABD(n)-optional CD16 D1 domain-optional CD16 linker domain-optional-CD16 D2 domain, CD16 hinge domain-CD16 transmembrane domain-optional-intracellular costimulatory domain(n)-optional CD16 intracellular signaling domain wherein n is 1 or more. In one embodiment, n is at least 2, for example 2, 3, 4 or 5. The AABD (autonomous antigen binding domain) forms the antigen binding domain and is located at the extracellular side when expressed in a cell.

[0391] In an embodiment, the AABD is a fully human vH domain or a humanized vH domain. In an embodiment, the AABD is a fully human single VH (SVH) domain or a humanized SVH domain. An SVH domain, also known as an autonomous vH domain, can bind to a target in the absence of a vL domain. In an embodiment, the AABD is a fully human vHH domain or a humanized vHH domain.

[0392] In an embodiment, the AABD is a non-immunoglobulin antigen binding scaffold such as a DARPIN, an affibody, a ZIP domain (e.g., RZIP, EZIP, E4, R4 etc.), an affilin, an adnectin, an affitin, an obodies, a repebody, a fynomer, an alphabody, an avimer, an atrimer, a centyrin, a pronectin, an anticalin, a kunitz domain, an Armadillo repeat protein or a fragment thereof; an extracellular domain of a receptor (e.g., NKG2D), a ligand (e.g., APRIL, Thrombopoietin) and the like.

[0393] In some embodiments, the CD16 SAR of the disclosure comprises a molecule of the general formula:

[0394] scFv(n)-optional CD16 D1-optional CD16 linker domain-optional-CD16 D2 domain, CD16 hinge domain-CD16 transmembrane domain-optional-intracellular costimulatory domain(n)-optional CD16 intracellular signaling domain, wherein n is 1 or more.

[0395] In another embodiment, a costimulatory domain is also incorporated in the CD16 chain(s) of CD16-SAR. Exemplary costimulatory domains include costimulatory domains of 41BB, CD28, OX40 and 2B4 etc. (Table 30; SEQ ID NO (DNA): 1565-1572 and SEQ ID NO (PRT): 3959-3966). Collectively, the above results provide a novel platform for adoptive cellular therapy that overcomes some of the design limitations of current generation CARs and also provide a complementary approach to CARs.

[0396] The nucleic acid and amino acid sequences of SARs comprising the entire CD16A in fusion with scFv fragments targeting different antigens are represented by SEQ ID NO (DNA):4851-5039 and SEQ ID NO (PRT): 5151-5339, respectively. The order of the scFv fragments and their target antigens is the same as the order of the scFv and target antigens show in Table 3. The full names of these CD16 based SAR constructs is also provided in Table 36 of the provisional application which is incorporated in its entirety by reference herein. Additional SAR comprising the CD16 full length sequenced attached to different scFv, single domain antibodies, adaptors or scTCR are presented in SEQ ID NO(PRT): 10043-10323. Exemplary SAR comprising the CD16 full length sequence and comprising a vHH fragment or a FHVH fragment attached to an scFv targeting CD19 are represented by SEQ ID NO: 10324-10326. Exemplary SAR comprising the CD16 full length sequence and comprising an adaptor (SEQ ID NO: 10331-32) or a scTCR (SEQ ID NO: 10329-10330) are also provided.

[0397] The nucleic acid and amino acid sequences of exemplary SARs comprising the entire CD16A in fusion with vHH and FHVH fragments targeting different antigens are represented by SEQ ID NO (DNA):5040-5108 and SEQ ID NO (PRT): 5340-5408, respectively. The names and target antigens of these SARS are provided in the Table 37 of the provisional application. The nucleic acid and amino acid sequences of exemplary SARs comprising the entire CD16A in fusion with non-immunoglobulin antigen binding domains targeting different antigens are represented by SEQ ID NO (DNA):5110-5121 and SEQ ID NO (PRT): 5410-5421, respectively. The names and target antigens of these SARS are provided in the Table 38 of the provisional application. The nucleic acid and amino acid sequences of exemplary SARs comprising the entire CD16A in fusion with the extracellular antigen binding domains of receptors, adaptors and cytokines are represented by SEQ ID NO (DNA):5123-5129 and SEQ ID NO (PRT): 5423-5429, respectively. The names and target antigens of these SARS are provided in the Table 39 of the provisional application.

[0398] The different SARS of this disclosure are modular in design. Therefore, the sequence encoding the CD16A-F158V-FL-v1 (SEQ ID NO: 1415) may be replaced by a sequence encoding different signaling modules (e.g., SEQ ID NO:9635-9740; 9813-9851). Exemplary such modules include CD16-F158V-D2TMCPv1 (SEQ ID NO: 1450), CD16-F158V-Hinge-TM-CP (SEQ ID NO: 1451), NKp30-ECDTMCP-opt1 (SEQ ID NO:1369), NKp30-Hinge-TMCP-opt1 (SEQ ID NO: 1370), NKp44-ECDTMCP-opt1 (SEQ ID NO: 1382), NKp44-Hinge-TM-CP-opt1 (SEQ ID NO: 1383), NKp46-ECDTMCP-opt1 (SEQ ID NO: 1395), NKp46-Linker-Ig1-Hinge-TM-CP-opt1 (SEQ ID NO: 1396), NKp46-Ig1-Hinge-TM-CP-opt1 (SEQ ID NO: 1397), and NKp46-Hinge-TM-CP-opt1 (SEQ ID NO: 1398). The exemplary SARS in which one or more of the CD16A-F158V-FL-v1 modules are replaced with a different signaling modules are represented by SEQ ID NO (PRT): 9860-10042 and SEQ ID NO (DNA): 8768-8950. The names and SEQ ID of the various exemplary constructs are also presented in Table 33 of the provisional application which is incorporated in its entirety by reference herein.

[0399] The amino acid sequence of the polypeptides comprising the extracellular, transmembrane and cytosolic domains of different naturally occurring receptors that can be used in the construction of SAR are provided in SEQ ID NO (PRT): 9633-9668. The exemplary SAR are presented in SEQ ID NO:9860-9895. The amino acid sequence of the polypeptides comprising the hinge, transmembrane and cytosolic domains of different naturally occurring receptors that can be used in the construction of SAR are provided in SEQ ID NO (PRT): 9669-9704. The exemplary CD19 SAR comprising a CD19 scFv attached to these polypeptides and a hinge domain of CD28 are presented in SEQ ID NO:9896-9931. The amino acid sequence of the polypeptides comprising the transmembrane and cytosolic domains of different naturally occurring receptors that can be used in the construction of SAR are provided in SEQ ID NO (PRT): 9705-9740. The exemplary CD19 SAR comprising a CD19 scFv attached to these polypeptides and a hinge domain of CD28 are presented in SEQ ID NO:9957-9992. The CD19 scFV domain in any of the above SAR can be replaced with a different antigen binding domain (e.g., scFv, vHH, FHVH, non-immunoglobulin antigen binding domain, scTCR, scv-TCR, ligand binding domain of a receptor, receptor binding domain of a ligand or an adaptor etc.) domain targeting a different antigen to generate novel SARs. Exemplary antigen binding domains are presented in Tables 3-10 of the provisional application. A SAR may also comprise two heterologous antigen binding domains attached to a naturally occurring receptor.

[0400] In the one embodiment, the CD16 SAR comprises the entire extracellular domain of CD16 and has the formula: AABD(n)-CD16 D1-CD16 linker domain-CD16 D2 domain-CD16 hinge domain-CD16 transmembrane domain-CD16 intracellular domain, wherein n is 1 or more and where AABD comprises a fully human vH domain or a humanized vHH domain. The CD16 extracellular domain may carry the F158V and S197P mutations. The nucleic acid and amino acid sequences of exemplary CD16 SARs comprising the entire extracellular domain of CD16 and targeting different antigens are provided in SEQ ID NO (DNA):4851-5129 and 8951-9244 and SEQ ID NO (PRT):5151-5429 and 10043-10336 and in the Tables 36-39 of the provisional application. The composition and the order of the antigen binding domains of the SAR constructs of SEQ ID NO: 5151-5429, 8951-9244 is the same as the order of the scFv with SEQ ID NO:2924-3160 shown in Table 3. The constructs with SEQ ID NO:9140-9153 and 9188-9215 target BCMA, constructs with SEQ ID NO: 9216-9222 target PSMA, and those with SEQ ID NO: 9223-9231 target mesothelin. Constructs with SEQ ID NO:9232 and 9234 are bispecific CD16-SAR that target both CD19 and BCMA, while construct with SEQ ID NO: 9233 is bispecific CD16 SAR that targets CD20 and CD19. Constructs with SEQ ID NO: 9237 and 9238 comprise scTCR targeting NY-ESO-1 peptide (SEQ ID NO: 10880) and MAGE-A3 peptide (112-120) (SEQ ID NO:10879) peptides as their target antigen, while SAR construct with SEQ ID NO: 9241 comprises a single variable domain TCR (svd-TCR) targeting MAGE-A3 peptide-270-279 (SEQ ID NO: 10878). Constructs SEQ ID NO: 9239 and 9240 comprise Rzip and EZip adaptors as the antigen binding domains. Finally constructs with SEQ ID NO: 9242-9244 comprise other adaptors.

[0401] T cells expressing a single chain CD16-SAR when exposed to a cell expressing the cognate target antigen can activate NFAT signaling, induce IL2 production, promote T cell proliferation, promote T cell activation and exert cytotoxicity. In another exemplary embodiment, NK cells expressing a single chain CD16-SAR when exposed to a cell expressing the cognate target antigen can induce IL2 production, promote NK cell proliferation, promote NK cell activation or exert cytotoxicity. In another exemplary embodiment, monocytes/macrophages expressing a single chain CD16-SAR when exposed to a cell expressing the cognate target antigen can induce phagocytosis of the target cells. In another exemplary embodiment, granulocytes (e.g., neutrophils) expressing a single chain CD16-SAR when exposed to a cell expressing the cognate target antigen can induce phagocytosis of the target cells.

[0402] In certain embodiments, the disclosure provides a novel platform of synthetic antigen receptors, designated CD16-SARs, containing two chains wherein each chain comprises the partial or the entire sequence of CD16 or a variant thereof.

[0403] In an embodiment, the disclosure provides a double chain CD16 SARs where each chain comprises a partial or entire region of CD16 extracellular domain. Exemplary CD16 extracellular domain sequences that can be used in the construction of double chain CD16-SARs of the disclosure are provided in SEQ ID NO (DNA): 1496-1509 and SEQ ID NO (PRT): 3890-3903. In an embodiment, the disclosure provides double chain CD16 SARs where each chain comprises a partial or entire region of CD16 hinge domain. Exemplary CD16 hinge domain sequences that can be used in the construction of double chain CD16-SARs of the disclosure are provided in SEQ ID NO (DNA): 1545-1547 and SEQ ID NO (PRT): 3939-3941. In an embodiment, the disclosure provides a double chain CD16 SAR where each chain comprises partial or entire region of CD16 transmembrane domain. Exemplary CD16 transmembrane sequences that can be used in the construction of double chain CD16-SARs of the disclosure are provided in SEQ ID NO (DNA): 1528-1530 and SEQ ID NO (PRT): 3922-3924. In an embodiment, the disclosure provides a double chain CD16 SAR where each chain comprises a partial or entire region of CD16 cytosolic domain. Exemplary CD16 transmembrane sequences that can be used in the construction of CD16-SARs of the disclosure are provided in SEQ ID NO (DNA): 1556-1558 and SEQ ID NO (PRT): 3950-3952.

[0404] The disclosure provides that the vL fragment of an antibody can be joined to one of the two CD16 chains and the vH fragment can be joined to the other CD16 chain. When the two such chains (e.g., vL-CD16 and vH-CD16) are co-expressed in the same cell, the vL and vH fragments can bind their cognate antigen and transmit a cell signal. In an exemplary embodiment, T cells expressing such CD16-SAR when exposed to a cell expressing the cognate target antigen can activate NFAT signaling, induce IL2 production, promote T cell proliferation, promote T cell activation and exert cytotoxicity. In another exemplary embodiment, NK cells expressing such CD16-SAR when exposed to a cell expressing the cognate target antigen can induce IL2 production, promote NK cell proliferation, promote NK cell activation or exert cytotoxicity. In another exemplary embodiment, monocytes/macrophages expressing such CD16-SAR when exposed to a cell expressing the cognate target antigen can induce phagocytosis of the target cells. In another exemplary embodiment, monocytes/macrophages expressing a single chain CD16-SAR when exposed to a cell expressing the cognate target antigen can induce phagocytosis of the target cells. In another exemplary embodiment, granulocytes (e.g., neutrophils) expressing a single chain CD16-SAR when exposed to a cell expressing the cognate target antigen can induce phagocytosis of the target cells.

[0405] The expression and activity of the double chain CD16-SAR can be further increased by incorporation of a linker between the vL/vH and the CD16 fragments. In particular, the IgCL (SEQ ID NO (DNA): 1142 and SEQ ID NO (PRT): 3536) and IgCH domains (SEQ ID NO (DNA): 1143-1157 and SEQ ID NO (PRT): 3537-3551) derived from antibodies serve as useful linkers between the vL/vH and CD16 fragments. Additional Ig like domains are known in the art (e.g., Table 13; SEQ ID NO (DNA):1168-1175 and SEQ ID NO (PRT):3562-3569) and can serve as useful linkers in alternate embodiment of the disclosure.

[0406] In an embodiment, each chain of the double chain CD16 SAR comprises the CD16 extracellular domain comprising both immunoglobulin like domains (i.e., D1 and D2) that is attached via the CD16 hinge domain to CD16 transmembrane domain and to CD16 cytosolic domain. An exemplary such double chain CD16 SAR targeting CD20 and BCMA is represented by the SAR CD8SP-CD20-VHH-2HC2D6-USC1-xho-IgCL-Bam-CD16-F158V-FL-TMCP-v1-F-P2A-SP-Apa-BCMA917-vHH-E59D-Mlu-IgG1-CH1-Kpn-CD16-F158V-S197P-FL-TMCP-v3-F-F2A-PAC (SEQ ID NO(DNA): 1633 and SEQ ID NO (PRT): 4027). In this SAR, a CD20 vHH domain is attached to one CD16 chain via an IgCL linker and a BCMA vHH is attached to a second CD16 chain via an IgG1-CH1 linker. The two chains of this double chain CD16 SAR are expressed from a single vector with an intervening P2A cleavable linker. This SAR construct also expresses a puromycin resistance cassette (PAC), which is optional. Another exemplary double chain CD16 SAR targeting CD19 is represented by CD8SP-hu-mROO5-1-vL-xho-IgCL-Bam-CD16-F158V-FL-TMCP-v1-F-P2A-SP-hu-mROO5-1-vH-Mlu-IgG1-CH1-Kpn-CD16-F158V-S197P-FL-TMCP-v3-F-F2A-K13-opt (SEQ ID NO(DNA): 1628 and SEQ ID NO (PRT): 4022). In this SAR, a hu-mROO5-1 vL domain is attached to one CD16 chain via an IgCL linker and a hu-mROO5-1 vH domain is attached to a second CD16 chain via an IgG1-CH1 linker. The hu-mROO5-1 vL and vH fragments join to form a Fv that can bind to human CD19. The two chains of this double chain CD16 SAR are expressed from a single vector with an intervening P2A cleavable linker. This SAR construct also expresses an accessory module comprising codon optimized vFLIP K13 module from human herpesvirus 8, which is optional. The double chain CD16 SAR represented by SEQ ID NO (DNA): 1629 and SEQ ID NO (PRT): 4023 is similar to the SAR construct represented by SEQ ID NO (DNA): 1628 and SEQ ID NO (PRT): 4022 with the exception that the K13 module is replaced by MC159 module from molluscum contagiosum virus. The double chain CD16 SAR represented by SEQ ID NO (DNA): 1630 and SEQ ID NO (PRT): 4024 is similar to the SAR construct represented by SEQ ID NO (DNA): 1628 and SEQ ID NO (PRT): 4022 with the exception that the K13 module is replaced by the puromycin resistance gene. The double chain CD16 SAR represented by SEQ ID NO (DNA): 1625 and SEQ ID NO (PRT): 4020 is similar to the SAR construct represented by SEQ ID NO (DNA): 1630 and SEQ ID NO (PRT): 4024 with the exception that the IgCL and IgG1-CH1 linker domains are missing and the hu-mROO5-1 vL and vH fragments are attached to the two CD16 chains directly. The double chain CD16 SAR represented by SEQ ID NO (DNA): 1631 and SEQ ID NO (PRT): 4025 is similar to the SAR construct represented by SEQ ID NO (DNA): 1630 and SEQ ID NO (PRT): 4024 with the exception that a vHH domain targeting human CD20 is attached to the amino-terminus of hu-mROO5-1 vL region via a short Gly4Serx2 linker (SEQ ID NO (DNA): 1024). This construct can target both CD19 and CD20. The double chain CD16 SAR represented by SEQ ID NO (DNA): 1632 and SEQ ID NO (PRT): 4026 is similar to the SAR construct represented by SEQ ID NO (DNA): 1631 and SEQ ID NO (PRT): 4025 with the exception that a vHH domain targeting human BCMA is attached to the amino-terminus of hu-mROO5-1 vH region via a short G4Sx3linker (SEQ ID NO (DNA): 40). This construct can target CD19, CD20 and BCMA. The double chain CD16 SAR represented by SEQ ID NO (DNA): 1634 and SEQ ID NO (PRT): 4028 is similar to the SAR construct represented by SEQ ID NO(DNA): 1630 and SEQ ID NO (PRT): 4024 with the exception that the IgCL and IgG1-CH1 linker domains are replaced by TCRb-ECD (TCRb-wt-opt-8ECD; SEQ ID NO: 1166) and TCRa-ECD (TCRa-Ig-Like-C1-Domain-6MD; SEQ ID NO: 1168) linker domains, respectively. The double chain CD16 SAR represented by SEQ ID NO (DNA): 1635 and SEQ ID NO (PRT): 4029 is similar to the SAR construct represented by SEQ ID NO(DNA): 1631 and SEQ ID NO (PRT): 4025 with the exception that the IgCL and IgG1-CH1 linker domains are replaced by TCRb-ECD (TCRb-wt-opt-8ECD; SEQ ID NO: 1166) and TCRa-ECD (TCRa-Ig-Like-C1-Domain-6MD; SEQ ID NO: 1168) linker domains, respectively. The double chain CD16 SAR represented by SEQ ID NO (DNA): 1636 and SEQ ID NO (PRT): 4030 is similar to the SAR construct represented by SEQ ID NO(DNA): 1632 and SEQ ID NO (PRT): 4026 with the exception that the IgCL and IgG1-CH1 linker domains are replaced by TCRb-ECD (TCRb-wt-opt-8ECD; SEQ ID NO: 1166) and TCRa-ECD (TCRa-Ig-Like-C1-Domain-6MD; SEQ ID NO: 1168) linker domains, respectively. The double chain CD16 SAR represented by SEQ ID NO (DNA): 1637 and SEQ ID NO (PRT): 4031 is similar to the SAR construct represented by SEQ ID NO(DNA): 1633 and SEQ ID NO (PRT): 4027 with the exception that the IgCL and IgG1-CH1 linker domains are replaced by TCRb-ECD (TCRb-wt-opt-8ECD; SEQ ID NO: 1166) and TCRa-ECD (TCRa-Ig-Like-C1-Domain-6MD; SEQ ID NO: 1168) linker domains, respectively.

[0407] In an embodiment, the disclosure provides a double chain CD16 SAR where each chain comprises a partial or entire region of CD16. In an embodiment, the disclosure provides a double chain CD16 SARs where each chain comprises a partial or entire region of CD16 extracellular domain. In an embodiment, the disclosure provides a double chain CD16 SARs where each chain comprises a partial or entire region of CD16 D1 domain. In an embodiment, the disclosure provides a double chain CD16 SARs where each chain comprises a partial or entire region of CD16 D2 domain. In an embodiment, the disclosure provides a double chain CD16 SARs where each chain comprises a partial or entire region of CD16 hinge domain. In an embodiment, the disclosure provides a double chain CD16 SARs where each chain comprises a partial or entire region of a CD16 transmembrane domain. In an embodiment, the disclosure provides a double chain CD16 SARs where each chain comprises a partial or entire region of a CD16 cytosolic domain.

[0408] In an embodiment, each chain of the double chain CD16 SAR comprises the CD16 extracellular domain comprising both immunoglobulin like domains (i.e., D1 and D2) that is attached via the CD16 hinge domain to CD16 transmembrane domain and CD16 cytosolic domain. In an embodiment, each chain of a double chain CD16 SAR also retains the ability to bind to the Fc region of an antibody, an antibody fragment or bispecific/tri-specific engager and mediate antibody dependent cytotoxicity. In an embodiment, each chain of the double chain CD16 SAR comprises the partial CD16 extracellular domain comprising the 2nd immunoglobulin like domains (i.e., D2) that is attached via CD16 hinge domain to CD16 transmembrane domain and CD16 cytosolic domain. In an embodiment, each chain of such double chain CD16 SAR lacks the ability to bind to the Fc portion of an antibody or an antibody fragment as it contains only the D2 domain of CD16 and lacks the D1 domain. In an embodiment, each chain of the double chain CD16 SAR comprises the partial or entire CD16 hinge domain that is attached to CD16 transmembrane domain and CD16 cytosolic domain. In an embodiment, each chain of such double chain CD16 SAR lacks the ability to bind to the Fc portion of an antibody or an antibody fragment as it lacks both the D1 and D2 domains.

[0409] In an embodiment, at least one chain of the double chain CD16 SAR comprises, an AABD (e.g., a vHH, FHVH, chVH, centyrin, affibody etc.) that is inserted between the D2 domain and the hinge domain of CD16 with optional intervening linkers (e.g., Glycine-Serine linker). In an exemplary embodiment, the different domains of such a chain comprising a double chain CD16 SAR from amino to carboxy-terminal include a N-terminal signal peptide, CD16-D1 domain, CD16-D2 domain, optional linker, AABD (e.g., vHH, FHVH, centyrin, affibody etc.), optional linker, CD16-hinge domain, CD16-transmembrane domain and CD16-cytosolic domain.

[0410] It is to be understood that the different CD16 domains (i.e., extracellular, D1, D2, hinge, transmembrane and cytosolic etc.) that may be used in the construction of the double chain CD16 SAR may comprise their entire sequence or a deletion mutant or a variant as long as it retains the functional property of that domain. In an embodiment, the antigen binding domain of one or both chains of the double chain CD16 SAR comprises a scFv, a vL, vH, Fv, vHH, FHVH, a single domain antibody, a non-immunoglobulin antigen binding scaffold, a ligand or the extracellular domain of a receptor.

[0411] In an embodiment, both chains of a double chain CD16 SAR comprise an antigen binding domain. In an embodiment, only one of the chains of a double chain CD16 SAR comprise an antigen binding domain. In an embodiment, one of the chains of a double chain CD16 SAR comprise a non-natural antigen binding domain (e.g., a scFv, a vL, vH, Fv, vHH, FHVH, a single domain antibody, a non-immunoglobulin antigen binding scaffold, a ligand or the extracellular domain of a receptor) and the second chain binds to Fc portion of an antibody or antibody fragment or a bispecific/trispecific engager via the CD16 extracellular domain.

[0412] In an embodiment, one chain of a double chain CD16 SAR comprises an antigen binding domain consisting of a vL domain and the second chain of the double chain CD16 SAR comprises an antigen binding domain consisting of a vH domain. In an embodiment, both chains of a double chain CD16 SAR comprise an antigen binding domain of the same class (i.e., scFv, vHH, FHVH, a single domain antibody, a non-immunoglobulin antigen binding scaffold, a ligand or a receptor etc.). In an embodiment, each chain of a double chain CD16 SAR comprise a vHH domain. In an embodiment, each chain of a double chain CD16 SAR comprise a FHVH domain. In an embodiment, both chains of a double chain CD16 SAR comprise an antigen binding domain of different classes (i.e., scFv, vHH, FHVH, a single domain antibody, a non-immunoglobulin antigen binding scaffold, a ligand or a receptor etc.). In an exemplary embodiment, one chain of a double chain CD16 SAR comprises an antigen binding domain derived from vHH domain while the second chain comprises an antigen binding domain derived from a FHVH domain.

[0413] The two chains of a double chain CD16 SAR may target the same antigen (e.g., CD19) or different antigens (e.g., CD19 and CD20). The two chains of a double chain CD16 SAR may target two different epitopes of a single antigen (e.g., CD19) or two different antigens (e.g., CD19 and CD20). Each chain of a double chain SAR may bind to one antigen or more than one antigen (e.g., two, three, four etc.). Each chain of a double chain CD16 SAR may further comprise adaptors (e.g., RZIP, EZIP, NKG2D-YA, NKG2D-FA etc.).

[0414] In another embodiment, a costimulatory domain is also incorporated in one or both of the CD16 chain(s) of a double chain CD16-SAR. Exemplary costimulatory domains include costimulatory domains of 41BB, CD28, OX40 and 2B4 etc. (Table 30; SEQ ID NO (DNA): 1565-1572 and SEQ ID NO (PRT): 3959-3966). Collectively, the above results provide a novel platform for adoptive cellular therapy that overcomes some of the design limitations of CAR and also provide a complementary approach to SARs.

[0415] The two chains of CD16A-SARs described herein may be encoded by a single polynucleotide chain and translated into a single polypeptide chain, which is subsequently cleaved into different proteins. The two chains of CD16A-SARs described herein may be expressed using two distinct promoters and encoded by two separate polynucleotide chains. The two chains of CD16A-SARs described herein may be encoded by a single vector. The two chains of CD16A-SARs described herein may be encoded by a two different vector. The nucleic acid molecule encoding a CD16-SAR can comprise one or more leader sequences (also known as a signal peptide). In one embodiment, each functional unit (e.g., an antigen binding domain joined to a CD3z chain plus Furine-SGSG-cleavable linker) of a CD16A-SAR can be preceded by a leader sequence which directs the CD16A-SAR to the cell surface as a type I transmembrane protein. In one embodiment, the antigen-binding domain of CD16-SAR is extracellular-facing. In some embodiments, the leader sequence comprises the nucleic acid sequence of any of SEQ ID NO: 31 to 34 and amino acid sequences of SEQ ID NO: 2425 to 2428. In some embodiments, short nucleic acid sequences (3-9 nucleic acids) comprising restriction enzyme sites are located between the different subunits of a CD16A-SAR, e.g., between a signal sequence and the antigen binding domain of the CD16-SAR or between the antigen binding and the CD16 chain.

[0416] The different SARS of this disclosure are modular in design. Therefore, the sequence encoding the CD16A-F158V-FL-v1 (SEQ ID NO: 1415) and CD16-F158V-S197P-FL-TMCP-v3 (SEQ ID NO:1417) may be replaced by a sequence encoding different signaling modules (Table 25). Exemplary such modules include CD16-F158V-D2TMCPv1 (SEQ ID NO: 1450), CD16-F158V-Hinge-TM-CP (SEQ ID NO: 1451), NKp30-ECDTMCP-opt1 (SEQ ID NO:1369), NKp30-Hinge-TMCP-opt1 (SEQ ID NO: 1370), NKp44-ECDTMCP-opt1 (SEQ ID NO: 1382), NKp44-Hinge-TM-CP-opt1 (SEQ ID NO: 1383), NKp46-ECDTMCP-opt1 (SEQ ID NO: 1395), NKp46-Linker-Ig1-Hinge-TM-CP-opt1 (SEQ ID NO: 1396), NKp46-Ig1-Hinge-TM-CP-opt1 (SEQ ID NO: 1397), and NKp46-Hinge-TM-CP-opt1 (SEQ ID NO: 1398), 41BB-ECDTMCP-opt1 (SEQ ID NO: 1573), CD28-ECDTMCP-opt1 (SEQ ID NO: 1575), OX40-ECDTMCP-opt1 (SEQ ID NO: 1577), 2B4-ECDTMCP-opt1 (SEQ ID NO: 1579), CD32-ECDTMCP-opt1 (SEQ ID NO: 1581) and CD64-ECDTMCP-opt1 (SEQ ID NO: 1583). The SEQ ID NOs of exemplary SARS in which one or more of the CD16A-F158V-FL-v1 and CD16-F158V-S197P-FL-TMCP-v3 modules are replaced with a different signaling modules are presented in Table 33 of provisional application.

[0417] In certain embodiments, the disclosure provides a novel platform of synthetic antigen receptors, designated CD16-SARs, containing two chains, one of which incorporates the partial or entire region of CD16.

[0418] In alternate embodiment, the disclosure provides a double chain CD16 SARs where one of the chains comprises a partial or entire region of CD16 extracellular domain. Exemplary CD16 extracellular domain sequences that can be used in the construction of double chain CD16-SARs of the disclosure are provided in SEQ ID NO (DNA): 1496-1509 and SEQ ID NO (PRT): 3890-3903. In an embodiment, the disclosure provides double chain CD16 SARs where one of the chains comprises a partial or entire region of CD16 hinge domain. Exemplary CD16 hinge domain sequences that can be used in the construction of double chain CD16-SARs of the disclosure are provided in SEQ ID NO (DNA): 1545-1547 and SEQ ID NO (PRT): 3939-3941. In an embodiment, the disclosure provides a double chain CD16 SAR where one of the chains comprises partial or entire region of CD16 transmembrane domain. Exemplary CD16 transmembrane sequences that can be used in the construction of double chain CD16-SARs of the disclosure are provided in SEQ ID NO (DNA): 1528-1530 and SEQ ID NO (PRT): 3922-3924. In an embodiment, the disclosure provides a double chain CD16 SAR where one of the chains comprises a partial or entire region of CD16 cytosolic domain. Exemplary CD16 transmembrane sequences that can be used in the construction of CD16-SARs of the disclosure are provided in SEQ ID NO (DNA): 1556-1558 and SEQ ID NO (PRT): 3950-3952.

[0419] The disclosure provides that the vL fragment of an antibody can be joined to a CD16 chain and the vH fragment can be joined to the another signaling chain, such as CD3z, FcRγ. NKp30, NKp44, NKp46, TCRα constant chain, TCRβ constant chain, TCRγ constant chain or TCRδ constant chain etc. Alternatively, the disclosure provides that the vH fragment of an antibody can be joined to a CD16 chain and the vL fragment can be joined to the another signaling chain, such as CD3z, FcRγ, NKp30, NKp44, NKp46, TCRα constant chain, TCRβ constant chain, TCRγ constant chain or TCRδ constant chain etc. When the two such chains (e.g., vL-CD16 and vH-CD3z) are co-expressed in the same cell, the vL and vH fragments can bind their cognate antigen and transmit a T cell signal. In particular, T cells expressing such CD16-hererodimeric SAR when exposed to a cell line expressing the cognate target antigen can activate NFAT signaling, induce IL2 production, promote T cell proliferation, promote T cell activation and exert cytotoxicity. In another exemplary embodiment, NK cells expressing such CD16-SAR when exposed to a cell line expressing the cognate target antigen can induce IL2 production, promote NK cell proliferation, promote NK cell activation or exert cytotoxicity. The expression and activity of the CD16-heterodimeic SAR can be further increased by incorporation of a linker between the vL/vH and the CD16 and the other signaling chains (e.g., CD3z, FcRγ, NKp30, NKp44, NKp46 etc.). In particular, the IgCL (SEQ ID NO (DNA): 1142 and SEQ ID NO (PRT): 3536) and IgCH domains (SEQ ID NO (DNA): 1143-1157 and SEQ ID NO (PRT): 3537-3551) derived from antibodies serve as useful linkers between the vL/vH and CD16 fragments. Additional Ig like domains are known in the art (e.g., Table 13; SEQ ID NO (DNA):1168-1175 and SEQ ID NO (PRT):3562-3569) and can serve as useful linkers in alternate embodiment of the disclosure.

[0420] The different SARS of this disclosure are modular in design. Therefore, the sequence encoding the CD16A-F158V-FL-v1 (SEQ ID NO: 1415) may be replaced by a sequence encoding different signaling modules shown in the Table 25 of provisional application. Exemplary such modules include CD16-F158V-D2TMCPv1 (SEQ ID NO: 1450), CD16-F158V-Hinge-TM-CP (SEQ ID NO: 1451), NKp30-ECDTMCP-opt1 (SEQ ID NO: 1369), NKp30-Hinge-TMCP-opt1 (SEQ ID NO: 1370), NKp44-ECDTMCP-opt1 (SEQ ID NO: 1382), NKp44-Hinge-TM-CP-opt1 (SEQ ID NO: 1383), NKp46-ECDTMCP-opt1 (SEQ ID NO: 1395), NKp46-Linker-Ig1-Hinge-TM-CP-opt1 (SEQ ID NO: 1396), NKp46-Ig1-Hinge-TM-CP-opt1 (SEQ ID NO: 1397), NKp46-Hinge-TM-CP-opt1 (SEQ ID NO: 1398), 41BB-ECDTMCP-opt1 (SEQ ID NO: 1573), CD28-ECDTMCP-opt1 (SEQ ID NO: 1575), OX40-ECDTMCP-opt1 (SEQ ID NO: 1577), 2B4-ECDTMCP-opt1 (SEQ ID NO: 1579), CD32-ECDTMCP-opt1 (SEQ ID NO: 1581) and CD64-ECDTMCP-opt1 (SEQ ID NO: 1583). The SEQ ID NOs of exemplary SARS in which one or more of the CD16A-F158V-FL-v1 modules are replaced with a different signaling modules are presented in Table 33.

[0421] Also provided herein are clonal iPSCs genetically engineered to comprise, among other editing as contemplated and described herein, a CD16 SAR. In an embodiment, the CD16 SAR is a high affinity CD16 SAR or a high-affinity non-cleavable CD16 SAR (hnCD16-SAR). The genetically engineered iPSCs are capable of differentiating into effector cells comprising the CD16-SAR (e.g., high affinity CD16 SAR or hnCD16-SAR) introduced to the iPSCs. In some embodiments, the derived effector cells comprising CD16-SAR are NK cells. In some embodiments, the derived effector cells comprising CD16-SAR are T cells. In an embodiment, the CD16-SAR (e.g., high affinity CD16 SAR or hnCD16-SAR) expressed in iPSC or derivative cells thereof binds to not only ADCC antibodies or fragments thereof, but also to bi-, tri-, or multi-specific engagers or binders that recognize the CD16 or CD64 extracellular binding domains of said CD16 SAR. As such, the present application provides a derivative effector cell or a cell population thereof, preloaded with one or more pre-selected ADCC antibody through binding with the extracellular domain of the CD16-SAR expressed on the derivative effector cell, in an amount sufficient for therapeutic use in a treatment of a condition, a disease, wherein said CD16-SAR comprises an extracellular binding domain of CD64, or of CD16 having FI76V and S197P. In an embodiment, the antigen binding domain of the CD16-SAR comprises an AABD, a scFv, Fv, extracellular domain of a receptor, ligand, or another non-immunoglobulin antigen binding module. In an embodiment, the CD16-SAR comprises an antigen binding domain attached to or near the N-terminus of the Fc binding domain of CD16 or CD64. In an embodiment, the CD16-SAR further comprises an antigen binding domain (e.g., AABD, e.g., FHVH, chVH, aVH, vHH, Darpin, centyrin, affibody etc.) attached to or near the N-terminus of the Fc binding domain of CD16 or CD64.

[0422] In some other embodiments, the native CD16 transmembrane- and/or the intracellular-domain of a CD16-SAR (e.g., high affinity CD16 SAR or hnCD16-SAR) is further modified or replaced, such that a chimeric Fc-SAR (CFc-SAR) is produced to comprise a non-native transmembrane domain, a non-native stimulatory domain and/or a non-native signaling domain. The term “non-native” or “non-natural” used herein means that the transmembrane, stimulatory or signaling domain are derived from a different receptor other than the receptor which provides the extracellular domain. In the illustration here, the CFc-SAR based on CD16 or variants thereof does not have a transmembrane, stimulatory or signaling domain that is derived from CD16. In some embodiments, the exogenous CD16 based CFc-SAR comprises a non-native transmembrane domain derived from CD3D, CD3ε, CD3G, CD3z, CD4, CD8, CD8a, CD8b, CD27, CD28, CD40, CD84, CD166, 4-1BB, 0X40, ICOS, ICAM-1, CTLA-4, PD-1, LAG-3, 2B4, BTLA, CD16, IL-7, IL12, IL15, KIR2DL4, KIR2DSI, MKp30, MKp44, NKp46, NKG2C, NKG2D, T cell receptor polypeptide. In some embodiments, the CD16 based CFc-SAR comprises a non-native stimulatory/inhibitory domain derived from CD27, CD28, 4-1BB, 0X40, ICOS, PD-1, LAG-3, 2B4, BTLA, DAP10, DAP 12, CTLA-4, or NKG2D polypeptide. In some embodiments, the exogenous CD16 based CFc-SAR comprises a non-native signaling domain derived from CD3z, 2B4, DAP 10, DAP 12, DNAM1, CD137 (4 IBB), IL21, IL7, IL12, IL15, NKp30, NKp44, NKp46, NKG2C, or NKG2D polypeptide. In one embodiment of CD16-SAR, the provided chimeric receptor comprises a transmembrane domain and a signaling domain both derived from one of IL7, IL12, IL15, NKp30, NKp44, NKp46, NKG2C, and NKG2D polypeptide. One particular embodiment of the CD16 based CFc-SAR comprises a transmembrane domain of NKG2D, a stimulatory domain of 2B4, and a signaling domain of CD3z; wherein the extracellular domain of the CD16 is derived from a full length or partial sequence of the extracellular domain of CD64 or CD16, wherein the extracellular domain of CD16 comprises F176V (or 158V) and S197P (or S197R).

[0423] Another embodiment of the CD16 based chimeric Fc-SAR comprises a transmembrane domain and a signaling domain of CD3z; wherein the extracellular domain of the CD16 is derived from a full length or partial sequence of the extracellular domain of CD64 or CD16, wherein the extracellular domain of CD16 comprises FI 76V and S197P. In an embodiment, the antigen binding domain of the CD16-chimeric Fc SAR comprises an AABD (e.g., FHVH, vHH etc.), a scFv, Fv, ligand, extracellular domain of a receptor, or another non-immunoglobulin antigen binding module. In an embodiment, the CD16-chimeric Fc SAR further comprises an antigen binding domain attached to or near the N-terminus of the Fc binding domain of CD16 or CD64. In an embodiment, the hnCD16-chimeric Fc SAR further comprises an antigen binding domain (e.g., AABD, e.g., FHVH, chVH, aVH, vHH, Darpin, centyrin, affibody etc.) attached to or near the N-terminus of the Fc binding domain of CD16 or CD64.

[0424] The various embodiments of CD16 based chimeric Fc SAR as described above are capable of binding to the Fc region of an antibody or fragment thereof; or to the Fc region of a bi-, tri-, or multi-specific engager or binder. In addition, the CD16 based chimeric Fc SAR are capable of binding to an antigen specified by their antigen binding domain (i.e., AABD, scFv, Fv, etc.). Thus, a CD16 based chimeric Fc SAR with an antigen binding domain based on BCMA-FHVH may bind to the Fc region of an antibody while also having the capability of binding BCMA. Upon binding, the stimulatory and/or signaling domains of the CD16-CFc SAR enable the activation and cytokine secretion of the effector cells, and the killing of the tumor cells targeted by the antibody or their antigen binding domain (e.g., AABD, scFv, Fv etc.), or said bi-, tri-, or multi-specific engager or binder having a tumor antigen binding component as well as the Fc region. Without being limited by theory, through the non-native transmembrane, stimulatory and/or signaling domains, or through an engager binding to the ectodomain, of the CD16 based chimeric Fc receptor, the CFc-SAR could contribute to effector cells' killing ability while increasing the effector cells' proliferation and/or expansion potential. The antibody and the engager can bring tumor cells expressing the antigen and the effector cells expressing the CFc-SAR into a close proximity, which also contributes to the enhanced killing of the tumor cells. Exemplary tumor antigen for bi-, tri-, multi-specific engager or binders include, but are not limited to, B7H3, BCMA, CD10, CD19, CD20, CD22, CD24, CD30, CD33, CD34, CD3ε, CD44, CD79a, CD79b, CD123, CD138, CD179b, CEA, CLEC 12A, CS-1, DLL3, EGFR, EGFRvIII, EPCAM, FLT-3, FOLR1, FOLR3, GD2, gpA33, HER2, HM1.24, LGR5, MSLN, MCSP, MICA/B, PSMA, PAMA, P-cadherin, and ROR1. Some non-limiting exemplary bi-, tri-, multi-specific engager or binders suitable for engaging effector cells expressing the CD16 based CFc-SAR in attacking tumor cells include CD16 (or CD64)-CD30, CD16 (or CD64)-BCMA, CD16 (or CD64)-IL15-EPCAM, and CD 16 (or CD64)-IL15-CD33.

[0425] Unlike the endogenous CD16 receptor expressed by primary NK cells which gets cleaved from the cellular surface following NK cell activation, the non-cleavable versions of CD16-SAR (e.g. hnCD16-SAR) in derivative NK avoids CD16 shedding and maintains constant expression. In derivative NK cell, non-cleavable CD16-SAR increases expression of TNFa and CD107a indicative of improved cell functionality. Non-cleavable CD16 also enhances the antibody-dependent cell-mediated cytotoxicity (ADCC), and the engagement of bi-, tri-, or multi-specific engagers. ADCC is a mechanism of NK cell mediated lysis through the binding of CD16 to antibody-coated target cells. The additional high affinity characteristics of the introduced hnCD16-SAR in derived NK cell also enables in vitro loading of ADCC antibody to the NK cell through CD16 before administering the cell to a subject in need of a cell therapy. As provided, the hnCD16-SAR may comprise F176V (or 158V) and S197P (or S197R). As disclosed, the present application also provides a derivative NK cell or a cell population thereof, preloaded with one or more pre-selected ADCC antibody in an amount sufficient for therapeutic use in a treatment of a condition, a disease, or an infection.

[0426] In an embodiment, the CD16-SAR of the disclosure comprise the wild-type CD16 sequence attached at or near its N-terminus to an antigen binding domain (e.g., AABD, scFv, Fv etc.). Thus, the CD16-SAR of the disclosure may comprise the hnCD16 or wild-type CD16 coding regions.

[0427] In an embodiment, the CD16-SAR of the disclosure comprise the Fc binding region of CD32 or CD64 fused in frame to the transmembrane and intracellular domain of CD16 or variant thereof. In an exemplary embodiment, the order of different modules in such a CD16 SAR may comprise from NH2 to C-terminus the following: Antigen binding domain(n)-CD32-Fc binding domain-CD16 transmembrane domain-CD16-intracellualr domain; where n=1, 2, 3, or more.

[0428] In an exemplary embodiment, the order of different modules in such a CD16 SAR may comprise from NH2 to C-terminus the following: where n=1, 2, 3, or more. Antigen binding domain(n)-CD64-Fc binding domain-CD16 transmembrane domain-CD16-intracellualr domain

[0429] An exemplary CD20-targeted SAR construct containing a CD20 vHH domain fused to the extracellular domain of CD64 and transmembrane and intracellular domains of CD16 is represented by SEQ ID NO (DNA): 2328 and SEQ ID NO (PRT): 4722. Additional SAR construct targeting other antigens can be generated by replacing the CD20 vHH domain with antigen binding domains (e.g., scFv, vHH, FHVH, Centyrin etc.) targeting different antigens.

[0430] Unlike primary NK cells, mature T cells from a primary source (i.e., natural/native sources such as peripheral blood, umbilical cord blood, or other donor tissues) do not express CD16. It was unexpected that mature T cells expressing the exogeneous CD16-SAR construct show cell surface expression of the CD16 SAR and are capable of transmitting a cell signal (e.g., NFAT signaling) when exposed to the target antigen expressing cells.

[0431] It was also unexpected that iPSC comprising an expressed exogenous CD16-SAR did not impair the T cell developmental biology and was able to differentiate into functional derivative T cells that not only express the exogenous CD16-SAR, but also are capable of carrying out function through an acquired ADCC mechanism. This acquired ADCC in the derivative T cell can additionally be used as an approach for dual targeting and/or to rescue antigen escape often occurred with CAR-T cell therapy, where the tumor relapses with reduced or lost CAR-T targeted antigen expression or expression of a mutated antigen to avoid recognition by the CAR (chimerical antigen receptor). When said derivative T cell comprises acquired ADCC through exogenous CD16-SAR expression, and when an antibody targets a different tumor antigen from the one targeted by the SAR, the antibody can be used to rescue SAR-T antigen escape and reduce or prevent relapse or recurrence of the targeted tumor often seen in CAR-T treatment. Such a strategy to reduce and/or prevent antigen escape while achieving dual targeting is equally applicable to NK cells expressing one or more SARs.

[0432] As such, the disclosure provides a derivative T cell comprising an exogenous CD16-SAR. In some embodiment, the CD16-SAR comprise the wild-type sequence of CD16. In some embodiments, the hnCD16 comprised in the derivative T cell comprises F176V (158V) and S197R (or S197P). In some other embodiments, the hnCD16 comprised in the derivative T cell comprises a full or partial ectodomain originated from CD64 or may further comprises at least one of non-native transmembrane domain, stimulatory domain and signaling domain. As explained, such derivative T cells have an acquired mechanism to target tumors with a monoclonal antibody meditated by ADCC to enhance therapeutic effect of the antibody. As disclosed, the present application also provides a derivative T cell or a cell population thereof, preloaded with one or more pre-selected ADCC antibody in an amount sufficient for therapeutic use in a treatment of a condition, a disease, or an infection.

[0433] In addition to primary NK and T cells, the CD16 SARs of the disclosure can be expressed in immortalized cell lines. Exemplary immortalized cell lines suitable for expression of the CD16 SARs of the disclosure include NK92 and NK92MI cell lines. Additionally, CD16 SARs of the disclosure can be expressed in pluripotent hematopoietic stem cells (e.g., CD34+ stem cells), which can be differentiated to generate CD16 SAR expressing blood cells belonging to different lineages.

[0434] In certain embodiments, the disclosure provides a novel platform of synthetic antigen receptors, designated NKp30-SARs, containing the entire or partial sequence of a NKp30 chain.

[0435] The nucleic acid sequences of the NKp30 chains that can be used in the construction of NKp30 SARs are provided in SEQ ID NO: 1395 to 1414 (Table 25 of provisional application). The corresponding amino acid sequences are provided in SEQ ID NO: 3789 to 3808, respectively.

[0436] In an embodiment, the disclosure provides a single chain NKp30 SAR comprising a partial or entire region of NKp30. In alternate embodiment, the disclosure provides a single chain NKp30 SARs comprising a partial or entire region of NKp30 extracellular domain. In an embodiment, the disclosure provides NKp30 SARs comprising a partial or entire region of NKp30 hinge domain. In an embodiment, the disclosure provides a NKp30 SAR comprising partial or entire region of NKp30 transmembrane domain. In an embodiment, the disclosure provides a NKp30 SAR comprising a partial or entire region of NKp30 cytosolic domain. In an embodiment, a NKp30 SAR comprises the NKp30 Ig domain that is attached via NKp30 hinge domain to NKp30 transmembrane domain and NKp30 cytosolic domain. In an embodiment, a NKp30 SAR comprises the NKp30 hinge domain that is attached to NKp30 transmembrane domain and NKp30 cytosolic domain.

[0437] It is to be understood that the different NKp30 domains (i.e., extracellular, Ig domain, hinge, transmembrane and cytosolic) that may be used in the construction of the SAR may comprise their entire sequence or a deletion mutant or a variant as long as the domain retains at least some of its functional property.

[0438] In an embodiment, the antigen binding domain of the NKp30 SAR comprises a scFv, a vL, vH, Fv, vHH, FHVH, a single domain antibody, a non-immunoglobulin antigen binding scaffold, a ligand or a receptor. The chain of a single chain SAR may bind to one antigen or more than one antigen (e.g., two, three, four etc.). The chain of a single chain NKp30 SAR may further comprise one or more adaptors (e.g., RZIP, EZIP, NKG2D-YA, NKG2D-FA etc.).

[0439] In some embodiments, the NKp30 SAR of the disclosure comprises a molecule of the general formula: AABD(n)-optional NKp30 Ig domain, NKp30 hinge domain-NKp30 transmembrane domain-optional-intracellular costimulatory domain(n)-NKp30 intracellular signaling domain wherein n is 1 or more. In one embodiment, n is at least 2, for example 2, 3, 4 or 5. The AABD (autonomous antigen binding domain) forms the antigen binding domain and is located at the extracellular side when expressed in a cell.

[0440] In an embodiment, the AABD is a fully human vH domain or a humanized vH domain. In an embodiment, the AABD is a fully human single VH (SVH) domain or a humanized SVH domain. An SVH domain, also known as an autonomous vH domain, can bind to a target in the absence of a vL domain.

[0441] In an embodiment, the AABD is a fully human vHH domain or a humanized vHH domain.

[0442] In an embodiment, the AABD is a non-immunoglobulin antigen binding scaffold such as a DARPIN, an affibody, a ZIP domain (e.g., RZIP, EZIP, E4, R4 etc.), an affilin, an adnectin, an affitin, an obodies, a repebody, a fynomer, an alphabody, an avimer, an atrimer, a centyrin, a pronectin, an anticalin, a kunitz domain, an Armadillo repeat protein or a fragment thereof; a receptor (e.g., NKp30, CD16-F158V, NKG2D), a ligand (e.g., APRIL, Thrombopoietin) and the like.

[0443] In some embodiments, the NKp30 SAR of the disclosure comprises a molecule of the general formula:

[0444] scFv(n)-NKp30 Ig domain-NKp30 hinge domain-NKp30 transmembrane domain-optional-intracellular costimulatory domain(n)-optional NKp30 intracellular signaling domain, wherein n is 1 or more. In certain embodiments, the disclosure provides a novel platform of synthetic antigen receptors, designated NKp30-SARs, containing the entire or partial sequence of two NKp30 chains.

[0445] The disclosure provides that the vL fragment of an antibody can be joined to one of the two NKp30 chains and the vH fragment can be joined to the other NKp30 chain. When the two such chains (e.g., vL-NKp30 and vH-NKp30) are co-expressed in the same cell, the vL and vH fragments can bind their cognate antigen and transmit a T, NK cell or macrophage signal. In particular, T cells expressing such NKp30-SAR when exposed to a cell line expressing the cognate target antigen can activate NFAT signaling, induce IL2 production, promote T cell proliferation, promote T cell activation and exert cytotoxicity. In another embodiment, NK cells expressing such NKp30-SAR when exposed to a cell line expressing the cognate target antigen can promote NK cell proliferation, promote NK cell activation and exert cytotoxicity. The expression and activity of the NKp30-SAR can be further increased by incorporation of a linker between the vL/vH and the NKP30 fragments. In particular, the IgCL (SEQ ID NO (DNA): 1142 and SEQ ID NO (PRT): 3536) and IgCH domains (SEQ ID NO (DNA): 1143-1157 and SEQ ID NO (PRT): 3537-3551) derived from antibodies serve as useful linkers between the vL/vH and NKp30 fragments. Additional Ig like domains are known in the art (e.g., Table 13; SEQ ID NO (DNA):1168-1175 and SEQ ID NO (PRT):3562-3569) and can serve as useful linkers in alternate embodiment of the disclosure.

[0446] In another embodiment, a costimulatory domain is also incorporated in the NKp30 chain(s) of NKp30-SAR. Exemplary costimulatory domains include costimulatory domains of 41BB, CD28, OX40 and 2B4 etc. (Table 30; SEQ ID NO (DNA): 1565-1572 and SEQ ID NO (PRT): 3959-3966). Collectively, the above results provide a novel platform for adoptive cellular therapy that overcomes some of the design limitations of SAR and also provide a complementary approach to SARs.

[0447] The two chains of NKp30-SARs described herein may be encoded by a single polynucleotide chain and translated into a single polypeptide chain, which is subsequently cleaved into different proteins. The two chains of NKp30-SARs described herein may be expressed using two distinct promoters and encoded by two separate polynucleotide chains. The two chains of NKp30-SARs described herein may be encoded by a single vector. The two chains of NKp30-SARs described herein may be encoded by a two different vector. The nucleic acid molecule encoding a NKp30-SAR can comprise one or more leader sequences (also known as a signal peptide). In one embodiment, each functional unit (e.g., an antigen binding domain joined to a CD3z chain plus Furine-SGSG-cleavable linker) of a NKp30-SAR can be preceded by a leader sequence which directs the NKp30-SAR to the cell surface as a type I transmembrane protein. In one embodiment, the antigen-binding domain of NKp30-SAR is extracellular-facing. In some embodiments, the leader sequence comprises the nucleic acid sequence of any of SEQ ID NO: 31 to 34 and amino acid sequences of SEQ ID NO: 2425 to 2428. In some embodiments, short nucleic acid sequences (3-9 nucleic acids) comprising restriction enzyme sites are located between the different subunits of a NKp30-SAR, e.g., between a signal sequence and the antigen binding domain of the NKp30-SAR or between the antigen binding and the NKp30 chain.

[0448] In certain embodiments, the disclosure provides a novel platform of synthetic antigen receptors, designated NKp30-SARs, containing two chains, one of which incorporates the partial or entire region of NKp30.

[0449] In alternate embodiment, the disclosure provides a double chain NKp30 SARs where one of the chains comprises a partial or entire region of NKp30 extracellular domain. In an embodiment, the disclosure provides double chain NKp30 SARs where one of the chains comprises a partial or entire region of NKp30 hinge domain. In an embodiment, the disclosure provides a double chain NKp30 SAR where one of the chains comprises partial or entire region of NKp30 transmembrane domain. In an embodiment, the disclosure provides a double chain NKp30 SAR where one of the chains comprises a partial or entire region of NKp30 cytosolic domain.

[0450] The disclosure provides that the vL fragment of an antibody can be joined to a NKp30 chain and the vH fragment can be joined to the another signaling chain, such as CD3z, FcRγ. CD16, NKp44, NKp46, TCRα constant chain, TCRβ constant chain, TCRy constant chain or TCRδ constant chain etc. Alternatively, the disclosure provides that the vH fragment of an antibody can be joined to a NKp30 chain and the vL fragment can be joined to the another signaling chain, such as CD3z, FcRγ, CD16, NKp44, NKp46, TCRα constant chain, TCRβ constant chain, TCRγ constant chain or TCRδ constant chain etc. When the two such chains (e.g., vL-NKp30 and vH-CD3z) are co-expressed in the same cell, the vL and vH fragments can bind their cognate antigen and transmit a T cell signal. In particular, T cells expressing such NKp30-hererodimeric SAR when exposed to a cell line expressing the cognate target antigen can activate NFAT signaling, induce IL2 production, promote T cell proliferation, promote T cell activation and exert cytotoxicity. In another exemplary embodiment, NK cells expressing such NKp30-SAR when exposed to a cell line expressing the cognate target antigen can induce IL2 production, promote NK cell proliferation, promote NK cell activation or exert cytotoxicity. The expression and activity of the NKp30-heterodimeic SAR can be further increased by incorporation of a linker between the vL/vH and the NKp30 and the other signaling chains (e.g., CD3z, FcRγ, NKp30, NKp44, NKp46 etc.). In particular, the IgCL (SEQ ID NO (DNA): 1142 and SEQ ID NO (PRT): 3536) and IgCH domains (SEQ ID NO (DNA): 1143-1157 and SEQ ID NO (PRT): 3537-3551) derived from antibodies serve as useful linkers between the vL/vH and NKp30 fragments.

[0451] In certain embodiments, the disclosure provides a novel platform of synthetic antigen receptors, designated NKp44-SARs, containing the entire or partial sequence of a NKp44 chain. The nucleic acid sequences of the NKp44 chains that can be used in the construction of NKp44 SARs are provided in SEQ ID NO: 1381 to 1394. The corresponding amino acid sequences are provided in SEQ ID NO: 3775 to 3788, respectively.

[0452] In an embodiment, the disclosure provides a single chain NKp44 SAR comprising a partial or entire region of NKp44. In alternate embodiment, the disclosure provides a single chain NKp44 SARs comprising a partial or entire region of NKp44 extracellular domain. In an embodiment, the disclosure provides NKp44 SARs comprising a partial or entire region of NKp44 hinge domain. In an embodiment, the disclosure provides a NKp44 SAR comprising partial or entire region of NKp44 transmembrane domain. In an embodiment, the disclosure provides a NKp44 SAR comprising a partial or entire region of NKp44 cytosolic domain. In an embodiment, a NKp44 SAR comprises the NKp44 Ig domain that is attached via NKp44 hinge domain to NKp44 transmembrane domain and NKp44 cytosolic domain. In an embodiment, a NKp44 SAR comprises the NKp44 hinge domain that is attached to NKp44 transmembrane domain and NKp44 cytosolic domain.

[0453] It is to be understood that the different NKp44 domains (i.e., extracellular, Ig domain, hinge, transmembrane and cytosolic) that may be used in the construction of the SAR may comprise their entire sequence or a deletion mutant or a variant as long as the domain retains at least some of its functional property.

[0454] In an embodiment, the antigen binding domain of the NKp44 SAR comprises a scFv, a vL, vH, Fv, vHH, FHVH, a single domain antibody, a non-immunoglobulin antigen binding scaffold, a ligand or a receptor. The chain of a single chain SAR may bind to one antigen or more than one antigen (e.g., two, three, four etc.). The chain of a single chain NKp44 SAR may further comprise one or more adaptors (e.g., RZIP, EZIP, NKG2D-YA, NKG2D-FA etc.).

[0455] In some embodiments, the NKp44 SAR of the disclosure comprises a molecule of the general formula: AABD(n)-optional NKp44 Ig domain, NKp44 hinge domain-NKp44 transmembrane domain-optional-intracellular costimulatory domain(n)-NKp44 intracellular signaling domain wherein n is 1 or more. In one embodiment, n is at least 2, for example 2, 3, 4 or 5. The AABD (autonomous antigen binding domain) forms the antigen binding domain and is located at the extracellular side when expressed in a cell.

[0456] In an embodiment, the AABD is a fully human vH domain or a humanized vH domain. In an embodiment, the AABD is a fully human single VH (SVH) domain or a humanized SVH domain. An SVH domain, also known as an autonomous vH domain, can bind to a target in the absence of a vL domain.

[0457] In an embodiment, the AABD is a fully human vHH domain or a humanized vHH domain.

[0458] In an embodiment, the AABD is a non-immunoglobulin antigen binding scaffold such as a DARPIN, an affibody, a ZIP domain (e.g., RZIP, EZIP, E4, R4 etc.), an affilin, an adnectin, an affitin, an obodies, a repebody, a fynomer, an alphabody, an avimer, an atrimer, a centyrin, a pronectin, an anticalin, a kunitz domain, an Armadillo repeat protein or a fragment thereof; a receptor (e.g., NKp44, NKG2D), a ligand (e.g., APRIL, Thrombopoietin) and the like.

[0459] In some embodiments, the NKp44 SAR of the disclosure comprises a molecule of the general formula:

[0460] scFv(n)-NKp44 Ig domain-NKp44 hinge domain-NKp44 transmembrane domain-optional-intracellular costimulatory domain(n)-optional NKp44 intracellular signaling domain, wherein n is 1 or more.

[0461] In certain embodiments, the disclosure provides a novel platform of synthetic antigen receptors, designated NKp44-SARs, containing the entire or partial sequence of two NKp44 chains. The disclosure provides that the vL fragment of an antibody can be joined to one of the two NKp44 chains and the vH fragment can be joined to the other NKp44 chain. When the two such chains (e.g., vL-NKp44 and vH-NKp44) are co-expressed in the same cell, the vL and vH fragments can bind their cognate antigen and transmit a T or NK cell signal. In particular, T cells expressing such NKp44-SAR when exposed to a cell line expressing the cognate target antigen can activate NFAT signaling, induce IL2 production, promote T cell proliferation, promote T cell activation and exert cytotoxicity. In another embodiment, NK cells expressing such NKp44-SAR when exposed to a cell line expressing the cognate target antigen can promote NK cell proliferation, promote NK cell activation and exert cytotoxicity. The expression and activity of the NKp44-SAR can be further increased by incorporation of a linker between the vL/vH and the NKP30 fragments. In particular, the IgCL (SEQ ID NO (DNA): 1142 and SEQ ID NO (PRT): 3536) and IgCH domains (SEQ ID NO (DNA): 1143-1157 and SEQ ID NO (PRT): 3537-3551) derived from antibodies serve as useful linkers between the vL/vH and NKp44 fragments. Additional Ig like domains are known in the art (e.g., Table 13; SEQ ID NO (DNA):1168-1175 and SEQ ID NO (PRT):3562-3569) and can serve as useful linkers in alternate embodiment of the disclosure.

[0462] In another embodiment, a costimulatory domain is also incorporated in the NKp44 chain(s) of NKp44-SAR. Exemplary costimulatory domains include costimulatory domains of 41BB, CD28, OX40 and 2B4 etc. (Table 30; SEQ ID NO (DNA): 1565-1572 and SEQ ID NO (PRT): 3959-3966). Collectively, the above results provide a novel platform for adoptive cellular therapy that overcomes some of the design limitations of SAR and also provide a complementary approach to SARs.

[0463] The two chains of NKp44-SARs described herein may be encoded by a single polynucleotide chain and translated into a single polypeptide chain, which is subsequently cleaved into different proteins. The two chains of NKp44-SARs described herein may be expressed using two distinct promoters and encoded by two separate polynucleotide chains. The two chains of NKp44-SARs described herein may be encoded by a single vector. The two chains of NKp44-SARs described herein may be encoded by a two different vector. The nucleic acid molecule encoding a NKp44-SAR can comprise one or more leader sequences (also known as a signal peptide). In one embodiment, each functional unit (e.g., an antigen binding domain joined to a CD3z chain plus Furine-SGSG-cleavable linker) of a NKp44-SAR can be preceded by a leader sequence which directs the NKp44-SAR to the cell surface as a type I transmembrane protein. In one embodiment, the antigen-binding domain of NKp44-SAR is extracellular-facing. In some embodiments, the leader sequence comprises the nucleic acid sequence of any of SEQ ID NO: 31 to 34 and amino acid sequences of SEQ ID NO: 2425 to 2428. In some embodiments, short nucleic acid sequences (3-9 nucleic acids) comprising restriction enzyme sites are located between the different subunits of a NKp44-SAR, e.g., between a signal sequence and the antigen binding domain of the NKp44-SAR or between the antigen binding and the NKp44 chain.

[0464] In certain embodiments, the disclosure provides a novel platform of synthetic antigen receptors, designated NKp44-SARs, containing two chains, one of which incorporates the partial or entire region of NKp44.

[0465] In alternate embodiment, the disclosure provides a double chain NKp44 SARs where one of the chains comprises a partial or entire region of NKp44 extracellular domain. In an embodiment, the disclosure provides double chain NKp44 SARs where one of the chains comprises a partial or entire region of NKp44 hinge domain. In an embodiment, the disclosure provides a double chain NKp44 SAR where one of the chains comprises partial or entire region of NKp44 transmembrane domain. In an embodiment, the disclosure provides a double chain NKp44 SAR where one of the chains comprises a partial or entire region of NKp44 cytosolic domain.

[0466] The disclosure provides that the vL fragment of an antibody can be joined to a NKp44 chain and the vH fragment can be joined to the another signaling chain, such as CD3z, FcRγ. CD16, NKp30, NKp46, TCRα constant chain, TCRβ constant chain, TCRy constant chain or TCRδ constant chain etc. Alternatively, the disclosure provides that the vH fragment of an antibody can be joined to a NKp44 chain and the vL fragment can be joined to the another signaling chain, such as CD3z, FcRγ, CD16, NKp30, NKp46, TCRα constant chain, TCRβ constant chain, TCRγ constant chain or TCRδ constant chain etc. When the two such chains (e.g., vL-NKp44 and vH-CD3z) are co-expressed in the same cell, the vL and vH fragments can bind their cognate antigen and transmit a T cell signal. In particular, T cells expressing such NKp44-hererodimeric SAR when exposed to a cell line expressing the cognate target antigen can activate NFAT signaling, induce IL2 production, promote T cell proliferation, promote T cell activation and exert cytotoxicity. In another exemplary embodiment, NK cells expressing such NKp44-SAR when exposed to a cell line expressing the cognate target antigen can induce IL2 production, promote NK cell proliferation, promote NK cell activation or exert cytotoxicity. The expression and activity of the NKp44-heterodimeic SAR can be further increased by incorporation of a linker between the vL/vH and the NKp44 and the other signaling chains (e.g., CD3z, FcRγ, NKp44, NKp44, NKp46 etc.). In particular, the IgCL (SEQ ID NO (DNA): 1142 and SEQ ID NO (PRT): 3536) and IgCH domains (SEQ ID NO (DNA): 1143-1157 and SEQ ID NO (PRT): 3537-3551) derived from antibodies serve as useful linkers between the vL/vH and NKp44 fragments. Additional Ig like domains are known in the art (e.g., Table 13; SEQ ID NO (DNA):1168-1175 and SEQ ID NO (PRT):3562-3569) and can serve as useful linkers in alternate embodiment of the disclosure.

[0467] In certain embodiments, the disclosure provides a novel platform of synthetic antigen receptors, designated NKp46-SARs, containing the entire or partial sequence of a NKp46 chain.

[0468] The nucleic acid sequences of the NKp46 chains that can be used in the construction of NKp46 SARs are provided in SEQ ID NO: 1381 to 1394 (Table 25). The corresponding amino acid sequences are provided in SEQ ID NO: 3775 to 3788, respectively (Table 25).

[0469] In an embodiment, the disclosure provides a single chain NKp46 SAR comprising a partial or entire region of NKp46. In alternate embodiment, the disclosure provides a single chain NKp46 SARs comprising a partial or entire region of NKp46 extracellular domain. In an embodiment, the disclosure provides NKp46 SARs comprising a partial or entire region of NKp46 hinge domain. In an embodiment, the disclosure provides a NKp46 SAR comprising partial or entire region of NKp46 transmembrane domain. In an embodiment, the disclosure provides a NKp46 SAR comprising a partial or entire region of NKp46 cytosolic domain.

[0470] In an embodiment, a NKp46 SAR comprises the NKp46 Ig domain that is attached via NKp46 hinge domain to NKp46 transmembrane domain and NKp46 cytosolic domain. In an embodiment, a NKp46 SAR comprises the NKp46 hinge domain that is attached to NKp46 transmembrane domain and NKp46 cytosolic domain.

[0471] It is to be understood that the different NKp46 domains (i.e., extracellular, Ig domain, hinge, transmembrane and cytosolic) that may be used in the construction of the SAR may comprise their entire sequence or a deletion mutant or a variant as long as the domain retains at least some of its functional property.

[0472] In an embodiment, the antigen binding domain of the NKp46 SAR comprises a scFv, a vL, vH, Fv, vHH, FHVH, a single domain antibody, a non-immunoglobulin antigen binding scaffold, a ligand or a receptor. The chain of a single chain SAR may bind to one antigen or more than one antigen (e.g., two, three, four etc.). The chain of a single chain NKp46 SAR may further comprise one or more adaptors (e.g., RZIP, EZIP, NKG2D-YA, NKG2D-FA etc.).

[0473] In some embodiments, the NKp46 SAR of the disclosure comprises a molecule of the general formula: AABD(n)-optional NKp46 Ig domain, NKp46 hinge domain-NKp46 transmembrane domain-optional-intracellular costimulatory domain(n)-NKp46 intracellular signaling domain wherein n is 1 or more. In one embodiment, n is at least 2, for example 2, 3, 4 or 5. The AABD (autonomous antigen binding domain) forms the antigen binding domain and is located at the extracellular side when expressed in a cell.

[0474] In an embodiment, the AABD is a fully human vH domain or a humanized vH domain. In an embodiment, the AABD is a fully human single VH (SVH) domain or a humanized SVH domain. An SVH domain, also known as an autonomous vH domain, can bind to a target in the absence of a vL domain.

[0475] In an embodiment, the AABD is a fully human vHH domain or a humanized vHH domain.

[0476] In an embodiment, the AABD is a non-immunoglobulin antigen binding scaffold such as a DARPIN, an affibody, a ZIP domain (e.g., RZIP, EZIP, E4, R4 etc.), an affilin, an adnectin, an affitin, an obodies, a repebody, a fynomer, an alphabody, an avimer, an atrimer, a centyrin, a pronectin, an anticalin, a kunitz domain, an Armadillo repeat protein or a fragment thereof; a receptor (e.g., NKp46, NKG2D), a ligand (e.g., APRIL, Thrombopoietin) and the like.

[0477] In some embodiments, the NKp46 SAR of the disclosure comprises a molecule of the general formula:

[0478] scFv(n)-NKp46 Ig domain-NKp46 hinge domain-NKp46 transmembrane domain-optional-intracellular costimulatory domain(n)-optional NKp46 intracellular signaling domain, wherein n is 1 or more.

[0479] In certain embodiments, the disclosure provides a novel platform of synthetic antigen receptors, designated NKp46-SARs, containing the entire or partial sequence of two NKp46 chains. The disclosure provides that the vL fragment of an antibody can be joined to one of the two NKp46 chains and the vH fragment can be joined to the other NKp46 chain. When the two such chains (e.g., vL-NKp46 and vH-NKp46) are co-expressed in the same cell, the vL and vH fragments can bind their cognate antigen and transmit a T or NK cell signal. In particular, T cells expressing such NKp46-SAR when exposed to a cell line expressing the cognate target antigen can activate NFAT signaling, induce IL2 production, promote T cell proliferation, promote T cell activation and exert cytotoxicity. In another embodiment, NK cells expressing such NKp46-SAR when exposed to a cell line expressing the cognate target antigen can promote NK cell proliferation, promote NK cell activation and exert cytotoxicity. The expression and activity of the NKp46-SAR can be further increased by incorporation of a linker between the vL/vH and the NKP30 fragments. In particular, the IgCL (SEQ ID NO (DNA): 1142 and SEQ ID NO (PRT): 3536) and IgCH domains (SEQ ID NO (DNA): 1143-1157 and SEQ ID NO (PRT): 3537-3551) derived from antibodies serve as useful linkers between the vL/vH and NKp46 fragments. Additional Ig like domains are known in the art (e.g., Table 13; SEQ ID NO (DNA):1168-1175 and SEQ ID NO (PRT):3562-3569) and can serve as useful linkers in alternate embodiment of the disclosure.

[0480] In another embodiment, a costimulatory domain is also incorporated in the NKp46 chain(s) of NKp46-SAR. Exemplary costimulatory domains include costimulatory domains of 41BB, CD28, OX40 and 2B4 etc. (Table 30; SEQ ID NO (DNA): 1565-1572 and SEQ ID NO (PRT): 3959-3966). Collectively, the above results provide a novel platform for adoptive cellular therapy that overcomes some of the design limitations of SAR and also provide a complementary approach to SARs.

[0481] The two chains of NKp46-SARs described herein may be encoded by a single polynucleotide chain and translated into a single polypeptide chain, which is subsequently cleaved into different proteins. The two chains of NKp46-SARs described herein may be expressed using two distinct promoters and encoded by two separate polynucleotide chains. The two chains of NKp46-SARs described herein may be encoded by a single vector. The two chains of NKp46-SARs described herein may be encoded by a two different vector. The nucleic acid molecule encoding a NKp46-SAR can comprise one or more leader sequences (also known as a signal peptide). In one embodiment, each functional unit (e.g., an antigen binding domain joined to a CD3z chain plus Furine-SGSG-cleavable linker) of a NKp46-SAR can be preceded by a leader sequence which directs the NKp46-SAR to the cell surface as a type I transmembrane protein. In one embodiment, the antigen-binding domain of NKp46-SAR is extracellular-facing. In some embodiments, the leader sequence comprises the nucleic acid sequence of any of SEQ ID NO: 31 to 34 and amino acid sequences of SEQ ID NO: 2425 to 2428. In some embodiments, short nucleic acid sequences (3-9 nucleic acids) comprising restriction enzyme sites are located between the different subunits of a NKp46-SAR, e.g., between a signal sequence and the antigen binding domain of the NKp46-SAR or between the antigen binding and the NKp46 chain.

[0482] In certain embodiments, the disclosure provides a novel platform of synthetic antigen receptors, designated NKp46-SARs, containing two chains, one of which incorporates the partial or entire region of NKp46.

[0483] In alternate embodiment, the disclosure provides a double chain NKp46 SARs where one of the chains comprises a partial or entire region of NKp46 extracellular domain. In an embodiment, the disclosure provides double chain NKp46 SARs where one of the chains comprises a partial or entire region of NKp46 hinge domain. In an embodiment, the disclosure provides a double chain NKp46 SAR where one of the chains comprises partial or entire region of NKp46 transmembrane domain. In an embodiment, the disclosure provides a double chain NKp46 SAR where one of the chains comprises a partial or entire region of NKp46 cytosolic domain.

[0484] The disclosure provides that the vL fragment of an antibody can be joined to a NKp46 chain and the vH fragment can be joined to the another signaling chain, such as CD3z, FcRγ. CD16, NKp30, NKp44, TCRα constant chain, TCRβ constant chain, TCRy constant chain or TCRδ constant chain etc. Alternatively, the disclosure provides that the vH fragment of an antibody can be joined to a NKp46 chain and the vL fragment can be joined to the another signaling chain, such as CD3z, FcRγ, CD16, NKp30, NKp44, TCRα constant chain, TCRβ constant chain, TCRγ constant chain or TCRδ constant chain etc. When the two such chains (e.g., vL-NKp46 and vH-CD3z) are co-expressed in the same cell, the vL and vH fragments can bind their cognate antigen and transmit a T cell signal. In particular, T cells expressing such NKp46-hererodimeric SAR when exposed to a cell line expressing the cognate target antigen can activate NFAT signaling, induce IL2 production, promote T cell proliferation, promote T cell activation and exert cytotoxicity. In another exemplary embodiment, NK cells expressing such NKp46-SAR when exposed to a cell line expressing the cognate target antigen can induce IL2 production, promote NK cell proliferation, promote NK cell activation or exert cytotoxicity. The expression and activity of the NKp46-heterodimeic SAR can be further increased by incorporation of a linker between the vL/vH and the NKp46 and the other signaling chains (e.g., CD3z, FcRγ, NKp46, NKp46, NKp46 etc.). In particular, the IgCL (SEQ ID NO (DNA): 1142 and SEQ ID NO (PRT): 3536) and IgCH domains (SEQ ID NO (DNA): 1143-1157 and SEQ ID NO (PRT): 3537-3551) derived from antibodies serve as useful linkers between the vL/vH and NKp46 fragments.

[0485] The disclosure also provides SARs based on the extracellular, transmembrane and cytosolic domains of other NK receptor including co-stimulatory receptors (SEQ ID NO: 9860-9993). As SARs are modular in format, the hu-mROO5-scFv targeting CD19 in these constructs can be switched with other antigen binding domains described in Tables 3-7 to generate novel unispecific and bispecific SARs.

[0486] NKG2D is a type II protein, in which the N-terminus is located intracellularly. Although CAR based on fragments of NKG2D have been described in the art, they lack the native configuration of NKG2D cytosolic and transmembrane domains. The disclosure provides a SAR in which the N-terminus of a polypetide comprising one or more antigen binding domains (e.g., AABD, scFv) is fused in frame to a polypeptide comprising from N-terminus to C-terminus the intracellular, transmembrane, and extracellular domain of NKG2D or a Type II membrane protein via an optional linker. The schematic of such a construct is provided in FIG. 12. Exemplary such SARs are provided in SEQ ID NO: 7686-7687. Further, the N-terminus of the cytosolic domain of an adaptor (e.g., CD3z) with an ATG start codon can be fused to the N-terminus of NKG2D to provide an activation domain to the SAR. The disclosure also provides SARs in which the N-terminaus domain of an antigen binding domain is fused to the extracellular domain of NKG2C, NKG2A, NKG2E and NKG2F receptors. This scheme can be used to generate a fusion protein between any Type I protein, including a Type I protein comprising an antigen binding domain, and a Type II protein. The scheme can be also used to generate fusion comprising only the hinge, transmembrane and cytosolic domains of the Type II receptor and lacking its extracellular domain.

[0487] Finally, the disclosure also provides a method to generate heterodimeric SAR based on Type II proteins in which one antigen binding domain is attached to the C-terminus of one receptor chain and a second antigen binding domain is attached to the C-terminus of a second heterdimeric chain. An exemplary such receptors comprising NKG2E and CD94 is provided in SEQ ID NO: 10341.

[0488] In certain embodiments, the disclosure provides that novel platform of synthetic antigen receptors, comprising the partial or entire sequence derived from two CD3z chains can be functionally expressed in immune cells, such as NK cells, NK92 cell line, monocytes/macrophages and neutrophils, which lack the endogenous TCR chains. In certain embodiments, the disclosure provides that novel platform of SAR, comprising the partial or entire sequence derived from two CD3z chains that can be expressed in iPSC cells, embryonic stem cells or hematopoietic stem cells, which can be differentiated to generate immune cells, such as NK cells, monocytes/macrophages and neutrophils, expressing the zSAR. The nucleic acid sequences of the exemplary CD3z chains that can be used in the construction of zSAR are provided in SEQ ID NO: 1090 and 1096. The corresponding amino acid sequences are provided in SEQ ID NO: 3484 and 3490, respectively. The disclosure provides that the vL fragment of an antibody can be joined to one of the two CD3z chains and the vH fragment can be joined to the other CD3z chain. When the two such chains (e.g, vL-CD3z and vH-CD3z) are co-expressed in the same cell, the vL and vH fragments can bind their cognate antigen and transmit a T cell signal. In particular, NK cells expressing such zSAR when exposed to a cell line expressing the cognate target antigen can show increased proliferation, activation and exert cytotoxicity. The expression and activity of the zSAR can be further increased by incorporation of a linker between the vL/vH and the CD3z fragments. In particular, the IgCL (SEQ ID NO (DNA): 1142 and SEQ ID NO (PRT): 3536) and IgCH domains (SEQ ID NO (DNA): 1143-1157 and SEQ ID NO (PRT): 3537-3551) derived from antibodies serve as useful linkers between the vL/vH and CD3z fragments. Additional Ig like domains are known in the art (e.g., Table 13; SEQ ID NO (DNA):1168-1175 and SEQ ID NO (PRT):3562-3569) and can serve as useful linkers in alternate embodiment of the disclosure.

[0489] In another embodiment, a costimulatory domain is also incorporated in the CD3z chain(s) of zSAR. Exemplary costimulatory domains include costimulatory domains of 41BB and CD28. CD3z chains containing 41BB and CD28 costimulatory domains are presented in SEQ ID NO: 1100, 1102 and 1099 and 1101, respectively. Other exemplary costimulatory domains (e.g., OX40 and 2B4) that can be substituted for the 41BB and CD28 costimulatory domains are provided in Table 30 of provisional application. Collectively, the above results provide a novel platform for adoptive cellular therapy that overcomes some of the design limitations of CARs and also provide a complementary approach to SIRs.

[0490] The two chains of zSARs described herein may be encoded by a single polynucleotide chain and translated into a single polypeptide chain, which is subsequently cleaved into different proteins. The two chains of zSARs described herein may be expressed using two distinct promoters and encoded by two separate polynucleotide chains. The two chains of zSARs described herein may be encoded by a single vector. The two chains of zSARs described herein may be encoded by a two different vector. The nucleic acid molecule encoding a zSAR can comprise one or more leader sequences (also known as a signal peptide). In one embodiment, each functional unit (e.g., an antigen binding domain joined to a CD3z chain plus Furine-SGSG-cleavable linker) of a zSAR can be preceded by a leader sequence which directs the zSAR to the cell surface as a type I transmembrane protein. In one embodiment, the antigen-binding domain of zSAR is extracellular-facing. In some embodiments, the leader sequence comprises the nucleic acid sequence of any of SEQ ID NO: 31 to 34 and amino acid sequences of SEQ ID NO: 2425 to 2428. In some embodiments, short nucleic acid sequences (3-9 nucleic acids) comprising restriction enzyme sites are located between the different subunits of a zSAR, e.g., between a signal sequence and the antigen binding domain of the zSAR or between the antigen binding and the CD3z chain.

[0491] An exemplary zSAR targeting CD19 that can be expressed in immune cells (e.g., NK cells, monocytes/macrophages, neutrophils, NK92 cell line etc.) or stem cells (e.g., iPSC, hematopoietic stem cells etc.) that can give rise to immune cells is CD8SP-hu-mROO5-1-vL-IgCL-Bam-CD3zECDTMCP-opt-F-P2A-Spe-SP-Bst-hu-mROO5-1-vH-IgG1-CH1-KPN-CD3zECDTMCP (SEQ ID NO: 2306). Additional exemplary zSAR targeting CD19 that can be functionally expressed in NK cells are presented in SEQ ID NO (DNA): 2287-2291.

[0492] The disclosure also provides a zSAR in which the Va, b, g, d domains of a TCR is used as the antigen binding domain. Such a SAR acts like a uTCR-SAR.

[0493] The one or both CD3 domains in zSAR can be replaced by other signaling adaptors, such as DAP10, DAP12 or FcRγ or fragments or variants thereof to generate novel SARs comprising these adaptors.

[0494] The disclosure provides, single chain, double chain and double chain hetero-dimeric SARs comprising the partial or entire region of DAP10 (SEQ ID NO(DNA): 1349-1350). Exemplary single chain, double chain and double chain hetero-dimeric DAP10 SARs of the disclosure are provided in Tables 32 and 33 of provisional application.

[0495] In an embodiment, the disclosure provides a single chain DAP10 SAR comprising a partial or entire region of DAP10. In alternate embodiment, the disclosure provides a single chain DAP10 SARs comprising a partial or entire region of CD16 extracellular domain. In an embodiment, the disclosure provides a DAP10 SAR comprising partial or entire region of DAP10 transmembrane domain. In an embodiment, the disclosure provides a DAP10 SAR comprising a partial or entire region of DAP10 cytosolic domain. An exemplary SARS comprising DAP10 is CD8SP-Sph-BCMA-FHVH93-Kpn-G4S-EcoRI-Xho-DAP10-opt1-F-P2A-SpeXba-PAC and is represented by SEQ ID NO (DNA): 2002 and SEQ ID NO (PRT): 4396.

[0496] In an embodiment, the disclosure provides a single chain DAP10 SAR comprising a partial or entire region of DAP10 that is fused in frame at its C-terminus to sequence encoding an activation domain. In an embodiment, the activation domain is derived from the cytosolic domain of CD3z (SEQ ID NO (DNA): 1562-1564 and SEQ ID NO (PRT): 3956-3958). An exemplary SARS comprising DAP10 fused to CD3z activation domain is CD8SP-Sph-BCMA-FHVH93-Kpn-G4S-EcoR1-Xho-DAP10-opt1-Spe-CD3zCP-opt1-F-P2A-SpeXba-PAC (SEQ ID NO (DNA): 2037 and SEQ ID NO (PRT): 4431).

[0497] It is to be understood that the different DAP10 domains that may be used in the construction of the SAR may comprise their entire sequence or a deletion mutant or a variant as long as the domain retains at least some of its functional property.

[0498] In an embodiment, the antigen binding domain of the DAP10 SAR comprises a scFv, a vL, vH, Fv, vHH, FHVH, a single domain antibody, a non-immunoglobulin antigen binding scaffold, a ligand or a receptor. The chain of a single chain SAR may bind to one antigen or more than one antigen (e.g., two, three, four etc.). The chain of a single chain CD16 SAR may further comprise one or more adaptors (e.g., RZIP, EZIP, NKG2D-YA, NKG2D-FA etc.).

[0499] In some embodiments, the DAP10 SAR of the disclosure comprises a molecule of the general formula: AABD(n)-DAP10 hinge domain-DAP10 transmembrane domain-DAP10-intracellular signaling domain-optional activation domain wherein n is 1 or more. In one embodiment, n is at least 2, for example 2, 3, 4 or 5. The AABD (autonomous antigen binding domain) forms the antigen binding domain and is located at the extracellular side when expressed in a cell.

[0500] In an embodiment, the AABD is a fully human vH domain or a humanized vH domain. In an embodiment, the AABD is a fully human single VH (SVH) domain or a humanized SVH domain. An SVH domain, also known as an autonomous vH domain, can bind to a target in the absence of a vL domain.

[0501] In an embodiment, the AABD is a fully human vHH domain or a humanized vHH domain.

[0502] In an embodiment, the AABD is a non-immunoglobulin antigen binding scaffold such as a DARPIN, an affibody, a ZIP domain (e.g., RZIP, EZIP, E4, R4 etc.), an affilin, an adnectin, an affitin, an obodies, a repebody, a fynomer, an alphabody, an avimer, an atrimer, a centyrin, a pronectin, an anticalin, a kunitz domain, an Armadillo repeat protein or a fragment thereof, a receptor (e.g., CD16-F158V, NKG2D), a ligand (e.g., APRIL, Thrombopoietin) and the like.

[0503] In certain embodiments, the disclosure provides a novel platform of synthetic antigen receptors, designated DAP10-SARs, containing two DAP10 chains. The disclosure provides that the vL fragment of an antibody can be joined to one of the two DAP10 chains and the vH fragment can be joined to the other DAP10 chain. When the two such chains (e.g., vL-DAP10 and vH-DAP10) are co-expressed in the same cell, the vL and vH fragments can bind their cognate antigen and transmit a T cell signal. In particular, T cells expressing such DAP10-SAR when exposed to a cell line expressing the cognate target antigen can activate NFAT signaling, induce IL2 production, promote T cell proliferation, promote T cell activation and exert cytotoxicity. In another embodiment, NK cells expressing such DAP10-SAR when exposed to a cell line expressing the cognate target antigen can promote NK cell proliferation, promote NK cell activation and exert cytotoxicity. In particular, the IgCL (SEQ ID NO (DNA): 1142 and SEQ ID NO (PRT): 3536) and IgCH domains (SEQ ID NO (DNA): 1143-1157 and SEQ ID NO (PRT): 3537-3551) derived from antibodies serve as useful linkers between the vL/vH and DAP10 fragments. Additional Ig like domains are known in the art (e.g., Table 13; SEQ ID NO (DNA):1168-1175 and SEQ ID NO (PRT):3562-3569) and can serve as useful linkers in alternate embodiment of the disclosure.

[0504] In another embodiment, a costimulatory domain is also incorporated in the DAP10 chain(s) of DAP10-SAR. Exemplary costimulatory domains include costimulatory domains of 41BB, CD28, OX40 and 2B4 etc. (Table 30; SEQ ID NO (DNA): 1565-1572 and SEQ ID NO (PRT): 3959-3966). Collectively, the above results provide a novel platform for adoptive cellular therapy that overcomes some of the design limitations of SAR and also provide a complementary approach to SARs.

[0505] The two chains of DAP10-SARs described herein may be encoded by a single polynucleotide chain and translated into a single polypeptide chain, which is subsequently cleaved into different proteins. The two chains of DAP10-SARs described herein may be expressed using two distinct promoters and encoded by two separate polynucleotide chains. The two chains of DAP10-SARs described herein may be encoded by a single vector. The two chains of DAP10-SARs described herein may be encoded by a two different vector. The nucleic acid molecule encoding a DAP10-SAR can comprise one or more leader sequences (also known as a signal peptide). In one embodiment, each functional unit (e.g., an antigen binding domain joined to a CD3z chain plus Furine-SGSG-cleavable linker) of a DAP10-SAR can be preceded by a leader sequence which directs the DAP10-SAR to the cell surface as a type I transmembrane protein. In one embodiment, the antigen-binding domain of DAP10-SAR is extracellular-facing. In some embodiments, the leader sequence comprises the nucleic acid sequence of any of SEQ ID NO: 31 to 34 and amino acid sequences of SEQ ID NO: 2425 to 2428. In some embodiments, short nucleic acid sequences (3-9 nucleic acids) comprising restriction enzyme sites are located between the different subunits of a DAP10-SAR, e.g., between a signal sequence and the antigen binding domain of the DAP10-SAR or between the antigen binding and the CD3z chain.

[0506] The different SARS of this disclosure are modular in design. Therefore, the sequence encoding the DAP10 module (SEQ ID NO: 1349) may be replaced by a sequence encoding different signaling modules (Table 25). Exemplary such modules include DAP12-ECDTMCP-opt1 (SEQ ID NO:1362), DAP12-C35S-ECDTMCP-opt1 (SEQ ID NO: 1366), CD3z-ECD™-opt1 (SEQ ID NO: 1351), mutCD3z-ECD™-opt1 (SEQ ID NO: 1353), CD3z-ECD™-OX40-opt1 (SEQ ID NO: 1357), FcRy-C24S-ECDTMCP-opt1 (SEQ ID NO: 1423), FcRy-ECDTMCP-opt1 (SEQ ID NO: 1419), mutCD3z-ECD™-2B4CP-opt1 (SEQ ID NO: 1426), CD8-hinge-NKG2D-TM-2B4CP-opt1 (SEQ ID NO: 1430), mutCD8-hinge-NKG2D-TM-2B4CP-opt-1 (SEQ ID NO: 1438). The SEQ ID NOs of exemplary SARS in which one or more of the DAP10 modules are replaced with a different signaling modules are presented in Table 33 of provisional application.

[0507] In certain embodiments, the disclosure provides a novel platform of synthetic antigen receptors, designated a costimulatory SAR, containing the entire or partial sequence of a co-stimulatory receptor, including but not limited to 4-1BB, CD28, OX40 and 2B4. The nucleic acid sequences of the costimulatory receptor chains that can be used in the construction of co-stimulatory SARs are provided in SEQ ID NO: 1573 to 1580 (Table 25). The corresponding amino acid sequences are provided in SEQ ID NO: 3967 to 3974, respectively. The exemplary single chain, double chain and double chain heterodimeric SAR comprising the entire or partial sequence of exemplary costimulatory receptors are provided in Tables 41 and 42 of provisional application.

[0508] In an embodiment, the disclosure provides a single chain 4-1BB SAR comprising a partial or entire region of 4-1BB attached to one or more antigen binding domains. In an embodiment, the disclosure provides a single chain CD28 SAR comprising a partial or entire region of CD28 attached to one or more antigen binding domains. In an embodiment, the disclosure provides a single chain OX40 SAR comprising a partial or entire region of OX40 attached to one or more antigen binding domains. In an embodiment, the disclosure provides a single chain 2B4 SAR comprising a partial or entire region of 2B4 attached to one or more antigen binding domains.

[0509] In an embodiment, the disclosure provides a double chain 4-1BB SAR comprising a partial or entire region of 4-1BB attached to one or more antigen binding domains. In an embodiment, the disclosure provides a double chain CD28 SAR comprising a partial or entire region of CD28 attached to one or more antigen binding domains. In an embodiment, the disclosure provides a double chain OX40 SAR comprising a partial or entire region of OX40 attached to one or more antigen binding domains. In an embodiment, the disclosure provides a double chain 2B4 SAR comprising a partial or entire region of 2B4 attached to one or more antigen binding domains.

[0510] In an embodiment, the disclosure provides a double chain heterodimeric 4-1BB SAR comprising a partial or entire region of 4-1BB attached to one or more antigen binding domains. In an embodiment, the disclosure provides a double chain heterodimeric CD28 SAR comprising a partial or entire region of CD28 attached to one or more antigen binding domains. In an embodiment, the disclosure provides a double chain heterodimeric OX40 SAR comprising a partial or entire region of OX40 attached to one or more antigen binding domains. In an embodiment, the disclosure provides a double chain heterodimeric 2B4 SAR comprising a partial or entire region of 2B4 attached to one or more antigen binding domains.

[0511] It is to be noted that in the case of a double chain heterodimeric SAR, one of the chains may comprise of a co-stimulatory receptor (e.g., 4-1BB, CD28, OX40, 2B4 etc.) while the other chain may comprise of a receptor that is capable of delivering an activation signal (e.g., CD16).

[0512] It is to be understood that the different costimulatory receptor domains that may be used in the construction of the SAR may comprise their entire sequence or a deletion mutant or a variant as long as the domain retains at least some of its functional property.

[0513] In an embodiment, the antigen binding domain of the co-stimulatory SAR comprises a scFv, a vL, vH, Fv, vHH, FHVH, a single domain antibody, a non-immunoglobulin antigen binding scaffold, a ligand or a receptor. The chain of a single chain SAR may bind to one antigen or more than one antigen (e.g., two, three, four etc.). The chain of a single chain co-stimulatory receptor SAR may further comprise one or more adaptors (e.g., RZIP, EZIP, NKG2D-YA, NKG2D-FA etc.).

[0514] In some embodiments, the co-stimulatory SAR of the disclosure comprises a molecule of the general formula: AABD(n)-co-stimulatory receptor hinge domain-co-stimulatory receptor transmembrane domain-co-stimulatory receptor-intracellular signaling domain-optional activation domain wherein n is 1 or more. In one embodiment, n is at least 2, for example 2, 3, 4 or 5. The AABD (autonomous antigen binding domain) forms the antigen binding domain and is located at the extracellular side when expressed in a cell.

[0515] In an embodiment, the AABD is a fully human vH domain or a humanized vH domain. In an embodiment, the AABD is a fully human single VH (SVH) domain or a humanized SVH domain. An SVH domain, also known as an autonomous vH domain, can bind to a target in the absence of a vL domain.

[0516] In an embodiment, the AABD is a fully human vHH domain or a humanized vHH domain.

[0517] The vector encoding SAR generally have a limited capacity to encode a SAR. For example, the size of a SAR polynucleotide affects the titer of the lentiviral or retroviral vector. As such, a SAR that is small in size is desirable. In one aspect, the disclosure describes a unispecific double chain SAR inclusive of two signal peptides and an intervening 2A linker that is less than 1765 nucleotide, less than 1770 nucleotide, less than 1780 nucleotide, less than 1790 nucleotide, less than 1800 nucleotide, less than 1820 nucleotide in size. In one aspect, the disclosure describes a unispecific double chain SAR where one of the chains without the signal sequence is no longer than 815 nucleotide, 820 nucleotide, 825 nucleotides or 850 nucleotides and the second chain without the signal sequence is no longer than 790 nucleotides, 800 nucleotides, 810 nucleotides, 815 nucleotides, 820 nucleotides, 825 nucleotides or 850 nucleotides. In one aspect the SAR has the backbone of a SIR, cTCR, Ab-TCR, AABD-TCR, εTFP, γTFP, δTFP, αPTFP, γδTFP or a TCR. In one aspect the SAR has the backbone of a SIR. In one aspect the SAR has the backbone of a SIR, cTCR, Ab-TCR, AABD-TCR, αPTFP, γδTFP or a TCR with TCRα and TCRβ constant chains. In one aspect the SAR has the backbone of a SIR, cTCR, Ab-TCR, AABD-TCR, αβTFP, γδTFP or a TCR with TCRγ and TCRδ constant chains.

[0518] The disclosure also provides novel deletion mutants of the constant chains of TCRα (SEQ ID Nos (DNA): 7172-7271; SEQ ID Nos (PRT): 7863-7963), TCRβ (SEQ ID NO (DNA): 7273-7398; SEQ ID NO: (PRT): 7965-8090), TCRγ (SEQ ID NO (DNA): 7400-7499; SEQ ID NO (PRT):8092-8191) and TCRδ (SEQ ID NO (DNA): 7501-7600; SEQ ID NO (PRT):8193-8292) (Table 45) that can be used in the construction of SIRs and cTCR and SARs based on the SIR and cTCR backbones. Use of the deletion mutants of the constant chains of TCRα, TCRβ, TCRγ and TCRδ help to reduce the size of the SIR/SAR constructs, improve their packaging into viral vectors and thereby improve viral vector titer and transduction efficiency. The deletion mutants of the constant chains of TCRα, TCRβ (β1 or β2), TCRγ and TCRδ chains described here can be used to constructs SARs with diverse expression, binding affinity and activity as compared to SARs composed of full-length constant chains. For example, the deletion mutants of the constant chains of TCRα, TCRβ (β1 or β2), TCRγ and TCRδ chains described here can be used to constructs SARs with increased expression, binding affinity, signaling activity, cytokine production and/or cytotoxicity as compared to SARs composed of full-length constant chains. Alternatively, the deletion mutants of the constant chains of TCRα, TCRβ (β1 or β2), TCRγ and TCRδ chains described here can be used to constructs SARs with decreased expression, binding affinity, signaling activity, cytokine production and/or cytotoxicity as compared to SARs composed of full-length constant chains. The SAR constructs with increased expression, binding affinity, signaling activity, cytokine production and/or cytotoxicity as compared to SARs composed of full-length constant chains may be useful to target diseased cells (e.g., tumor cells) with low level expression of the target antigens. The SAR constructs with decreased expression, binding affinity, signaling activity, cytokine production and/or cytotoxicity as compared to SARs composed of full-length constant chains may be useful to selectively target tumor cells with high level expression of the target antigen(s) while sparing normal healthy cells expressing low level expression of the target antigens.

[0519] In one aspect, the disclosure describes a double chain SAR where the TCRα constant chain fragment is less than 370, 380, 390, 400, 410 or 421 nucleotides in length and TCRβ constant chain fragment is less than 490 nucleotides, less than 500 nucleotides, less than 510 nucleotides, less than 520 nucleotides, less than 530 nucleotides or less than 540 nucleotides in length. In one aspect the SAR has the backbone of a SIR, cTCR, Ab-TCR, AABD-TCR, αβTFP, or a TCR. In one aspect the SAR has the backbone of a SIR. In one aspect the SAR has the backbone of a SIR with TCRα and TCRβ constant chains or TCRγ and TCRδ constant chains. In one aspect the SAR has the backbone of a cTCR with TCRα and TCRβ constant chains or TCRγ and TCRδ constant chains. In one aspect the TCRα and TCRβ constant chain fragments carry mutations that enhance their chain-pairing and reduce chain pairing with the endogenous TCRαβ chains. In one aspect the TCRα and TCRβ constant chain fragments carry mutations that result in an extra cysteine bond (double bond) between the two chains.

[0520] In one aspect the disclosure provides SARs comprising a TCRα constant chain deletion mutant selected from any of TCRα constant chains represented by SEQ ID NO: 7864-7963 or a variant with at least 70%, 75%, 80%, 85%, 90%, 95%, 98%, 99%, 99.9% homology to the amino acid sequence represented by SEQ ID NO: 7864-7963. In one aspect the disclosure provides SARs comprising a TCRα constant chain fragments comprising any of the SEQ ID NO: 7864-7963 or their deletion mutants or functional variants which retains the ability to pair with the complementary TCRβ constant chain. In one aspect the disclosure provides SARs comprising a TCRα constant chain fragment comprising any of the SEQ ID NO: 7864-7963 or their deletion mutants or functional variants which retains the ability to incorporate into the TCR/CD3 complex, recruit a TCR signaling module and/or induce T cell signaling upon engagement of target antigen. Additional TCRα constant chain deletion mutants and functional variants that can be used in the construction of the SARs.

[0521] In one aspect the disclosure provides SARs comprising a TCRβ constant chain deletion mutant selected from any of TCRβ constant chains represented by SEQ ID NO: 7965-8090 or a variant with at least 70%, 75%, 80%, 85%, 90%, 95%, 98%, 99%, 99.9% homology to the amino acid sequence represented by SEQ ID NO: 7965-8090. In one aspect the disclosure provides SARs comprising a TCRβ constant chain fragments comprising any of the SEQ ID NO: 7965-8090 or their deletion mutants or functional variants which retains the ability to pair with the complementary TCRα constant chain. In one aspect the disclosure provides SARs comprising a TCRβ constant chain fragment comprising any of the SEQ ID NO: 7965-8090 or their deletion mutants or functional variants which retains the ability to incorporate into the TCR/CD3 complex, recruit a TCR signaling module and/or induce T cell signaling upon engagement of target antigen. Additional TCRβ constant chain deletion mutants and functional variants that can be used in the construction of the SARs.

[0522] In one aspect the disclosure provides SARs comprising a TCRγ constant chain deletion mutant selected from any of TCRγ constant chains represented by SEQ ID NO: 8092-8191 or a variant with at least 70%, 75%, 80%, 85%, 90%, 95%, 98%, 99%, 99.9% homology to the amino acid sequence represented by SEQ ID NO: 8092-8191. In one aspect the disclosure provides SARs comprising a TCRγ constant chain fragments comprising any of the SEQ ID NO: 8092-8191 or their deletion mutants or functional variants which retains the ability to pair with the complementary TCRS constant chain. In one aspect the disclosure provides SARs comprising a TCRγ constant chain fragment comprising any of the SEQ ID NO: 8092-8191 or their deletion mutants or functional variants which retains the ability to incorporate into the TCR/CD3 complex, recruit a TCR signaling module and/or induce T cell signaling upon engagement of target antigen. Additional TCRγ constant chain deletion mutants and functional variants that can be used in the construction of the SARs.

[0523] In one aspect the disclosure provides SARs comprising a TCRS constant chain deletion mutant selected from any of TCRS constant chains represented by SEQ ID NO: 8193-8292 or a variant with at least 70%, 75%, 80%, 85%, 90%, 95%, 98%, 99%, 99.9% homology to the amino acid sequence represented by SEQ ID NO: 8193-8292. In one aspect the disclosure provides SARs comprising a TCRS constant chain fragments comprising any of the SEQ ID NO: 8193-8292 or their deletion mutants or functional variants which retains the ability to pair with the complementary TCRγ constant chain. In one aspect the disclosure provides SARs comprising a TCRS constant chain fragment comprising any of the SEQ ID NO: 8193-8292 or their deletion mutants or functional variants which retains the ability to incorporate into the TCR/CD3 complex, recruit a TCR signaling module and/or induce T cell signaling upon engagement of target antigen. Additional TCRS constant chain deletion mutants and functional variants that can be used in the construction of the SARs.

[0524] In some embodiments of any of the SARs described herein, the heterologous antigen-binding domain is selected from the group of: an antibody, an antibody fragment (vL, vH, Fab etc.) a scFv, a (scFv)2, a VHH domain, FHVH (a fully human vH domain), a single domain antibody, a non-immunoglobulin antigen binding scaffold (e.g., Centyrin, affibody, ZIP domain, an adaptor etc.), a VNAR domain, a ligand, a TCR, variable domain (Va, Vb, Vg, Vd) of a TCR and a receptor. In some embodiments of any of the SARs described herein, the heterologous antigen-binding domain comprises a scFv.

[0525] The antigen binding domain of SAR of the disclosure may an HLA-independent TCR, a single domain TCR, a ligand binding domain of a receptor, a receptor binding domain of a ligand, a non-immunoglobulin antigen binding scaffold, an adaptor or a fragment thereof.

[0526] In one aspect, the disclosure provides novel compositions of synthetic antigen receptor (SARs). In another aspect, the disclosure provides novel configuration/architectures of SARs. In another aspect, the disclosure provides SARs with useful biological properties (e.g., expression, binding affinity, effector functions etc.). In another aspect, the disclosure provides SARs capable of binding to one or more than one antigen. In another aspect, the disclosure provides SARs capable of binding to one or more than one epitope of an antigen.

[0527] In one aspect, the disclosure provides a synthetic antigen receptor (SAR) comprising more than one (i.e., 2, 3, 4, 5 or more) antigen binding domains. In another aspect, the disclosure provides a SAR capable of binding to and/or responding to more than one antigen or more than one epitope of an antigen. In another aspect, the disclosure provides a bispecific and/or a multispecific SAR capable of binding to and/or responding to more than one antigen or more than one epitope of an antigen. In another aspect, the disclosure provides useful antigen binding domains for construction of a bispecific and/or a multispecific SAR. In another aspect, the disclosure provides useful configurations (i.e., the location of different domains) for a bispecific and/or a multispecific SAR. The bispecific and multispecific SAR of disclosure when expressed in an immune effector cell (e.g., a T cell, NKT cell or NK cell etc.) confers on it the ability to bind to and/or respond to more than one antigen or more than one epitope of an antigen with nearly equal efficacy or greater efficacy as compared to two or more unispecific SAR targeting those same antigens or same epitopes of those antigens.

[0528] The presence of two or more antigen binding domains in a bispecific or multi-specific SAR may result in steric hinderance, non-specific aggregation, poor expression, protein unfolding, and/or interference with antigen binding. In addition, the location of the antigen binding domain(s) relative to the transmembrane domain of SARs needs to be optimized in order to optimize signal transduction by the resulting receptor. Bispecific and multispecific CARs incorporating two or more scFv have been described in the art. However, the disclosure identifies that presence of more than one scFv (i.e., 2, 3, 4 or more) in a SAR often results in steric hinderance, non-specific aggregation, tonic-signaling, poor expression, protein unfolding, and/or interference with antigen binding resulting in poor signaling and effector function (e.g., cytokine production, cytotoxicity etc.). Therefore, a major challenge in the generation of bispecific and multi-specific SARs comprising two or more antigen binding domains is to determine useful antigen binding domains (e.g., scFv, Fv, Fab, vHH, FHVH, Centyrin, affibody, cytokine, receptor, svd-TCR, etc.) that should be incorporated in such SARs so as to reduce steric hinderance, non-specific aggregation, tonic-signaling, poor expression, protein unfolding, and/or interference with antigen binding that can lead to poor signaling and effector function (e.g., cytokine production, cytotoxicity etc.).

[0529] A second challenge is to determine a useful configuration of the various antigen binding domains that comprise the bispecific and multi-specific SARs. For example, the optimal order of various antigen binding domains with respect to each other and with respect to other components of the SAR (e.g., hinge domain, transmembrane domain etc.) needs to be determined to reduce non-specific aggregation, tonic-signaling, poor expression, protein unfolding, and/or interference with antigen binding resulting in poor signaling and effector function (e.g., cytokine production, cytotoxicity etc.). This is a significant challenge for all SARs and particularly for multichain SARs, such as those described in this disclosure (e.g., double chain CD16 SAR, double chain Dap10 SAR, double chain NKp30 SAR etc.) whose antigen binding domain is composed of two different fragments (e.g., vL and vH, Va and Vb or Vg and Vd etc.). For example, the attachment of a second antigen binding domain (e.g., scFv or a vHH domain) to a double chain SAR which binds to CD19 through a vL and vH fragments that are operably linked to two separate CD16 chains but join to form a Fv that binds to CD19 could potentially interfere with the interaction between the vL and vH fragments resulting in their inability to form a functional Fv that can bind CD19.

[0530] The length of the hinge domain, which determines the distance between the antigen binding domain and the cell membrane, may influence the signaling via a chimeric antigen receptor. Therefore, another challenge in the field is that it is not known at the present whether attachment of multiple antigen binding domains may adversely affect the formation of an effective immunological synapse and signaling via a SAR by increasing the distance between the target antigen and the cell membrane.

[0531] Fusion of multiple antigen binding domains in a SAR could result in steric hinderance and improper folding. Another challenge in the field is that it is not known at the present whether linker domains are needed between the different antigen binding domains of a bispecific/multispecific SAR. The length and nature of the linker domains is also not known. This is of particular importance in case of double chain SAR (e.g., double chain CD16 SAR, double chain NKp30 SAR, double chain NKp44 SAR, double chain Dap10 SAR etc.) as the addition of an improper linker could potentially interfere with the interaction between the two chains or formation of a functional Fv. Additionally, linker(s) could adversely affect the formation of an effective immunological synapse and signaling via a SAR by increasing the distance between the target antigen and the cell membrane.

[0532] In one aspect, the disclosure offers solution to the above problems.

[0533] In one aspect, the disclosure provides SARs with one or more antigen binding domains and one or more transmembrane domains. In an embodiment, the disclosure provides useful antigen binding domains for construction of bispecific and multispecific SARs.

[0534] The disclosure provides several exemplary SARs comprising different antigen binding domains, hinge domains, linker domains, connecting peptides, transmembrane domains, activation domains, costimulatory domains, accessory modules and therapeutic controls etc. The nucleic acid and amino acid sequences of several exemplary SARs of the disclosure are provided in SEQ ID NO (DNA): 1600-2328, 4851-5129, 5451-6282, 7160-7170, 7601-7747, 8768-9602, 10817-10830 and SEQ ID NO (PRT): 3994-4722, 5151-5429, 6283-7114, 7852-7862, 8293-8439, 9860-10694. The names and configuration of the exemplary SARs of the disclosure are provided in Tables 32-34 and 36-42 of the provisional application which is incorporated in its entirety by reference herein. The SEQ ID (DNA) and SEQ ID (PRT) of exemplary components that can be used in the construction of the SAR are provided in SEQ ID NO (DNA):31-1243, 1308-1572 and 8535 to 8767 and SEQ ID NO (PRT):2425-3637, 3702-3966 and 9627-9859, 10832-10841, and 12304-12311. The names of the different SAR components and accessory reagents that can be used in the construction of SARs of the disclosure are provided in Tables 1-31 of the provisional application which is incorporated in its entirety by reference herein. The target antigen(s), configuration and composition of the SARs can be deduced from their nucleic acid sequences and amino-acid sequences provided in this disclosure by performing sequence homology search for their component modules using programs such as BLAST. Alternatively, softwares, such as ApE ([https://]jorgensen.biology.utah.edu/wayned/ape/), can be used to determine the composition of the different SAR constructs whose nucleic acid sequences are provided in this disclosure. Finally, the configuration and composition of the different SARs of the disclosure can be deduced from their names by those skilled in the art.

[0535] In an embodiment, the disclosure provides a novel SAR with the architecture and/or configuration represented by any of the exemplary SARs provided herein. In an embodiment, the disclosure provides a novel SAR with the composition of any of the exemplary SARs provided herein or a functional variant thereof. In an embodiment, the disclosure provides a novel SAR with at least 70% homology (e.g., 70%, 75%, 80%, 85%, 90%, 95%, 98%, 99% homology) to the amino acid sequence of any of the exemplary SARs provided herein. In an embodiment, the disclosure provides a novel SAR with at least 70% homology (e.g., 70%, 75%, 80%, 85%, 90%, 95%, 98%, 99% homology) to the amino acid sequence of any of the exemplary SARs provided herein excluding the optional accessory modules. In an embodiment, the disclosure provides a novel SAR with at least 70% homology (e.g., 70%, 75%, 80%, 85%, 90%, 95%, 98%, 99% homology) to the amino acid sequence of any of the exemplary SARs provided herein in the regions comprising their antigen binding domain(s) and signaling chain(s) (e.g., CD16 chains).

[0536] In one aspect, the disclosure relates to the use of autonomous antigen binding domains (AABD) including human VH domains, typically multiple human VH domains, as building blocks to make SARs with advantageous antigen binding domains.

[0537] The disclosure relates in one aspect to an autonomous antigen binding domain (AABD), methods of generating the same and uses of such domains for construction of synthetic antigen receptors and potentially antibody therapeutics. In one embodiment, the AABD domain has improved stability. In another embodiment, the AABD domain has improved thermal stability. In another embodiment, the AABD domain has improved solubility. In another embodiment, the AABD domain has less tendency for self-aggregation. In another embodiment, the AABD domain has improved ability to be secreted in the extracellular space when expressed in a mammalian cell with an N-terminal signal peptide.

[0538] In one aspect the AABD is a single domain antibody or antibody fragment. In one aspect, an AABD is a single variable heavy chain (VH or vH) domain (SVH domain) or a fragment thereof that is capable of binding the antigen in the absence of a variable light chain (VL or vL) domain. In another aspect, the AABD is a single variable heavy chain (VH) domain (or a SVH domain) of a fragment thereof that can be expressed as a soluble protein in the absence of a vL domain. In another aspect, the AABD is a single variable heavy chain (VH) domain (or a SVH domain) or a fragment thereof that can be expressed as a secreted protein in the absence of a vL domain when joined to an N-terminal secretory signal. Certain embodiments of disclosure relate to a SAR comprising a first AABD, the first AABD specifically binding to an antigen in the absence of a second domain.

[0539] In one aspect the AABD is a single variable light chain (VL or vL) domain or a SVL domain or a fragment thereof that is capable of binding the antigen in the absence of a variable heavy chain (VH or vH) domain. In another aspect, the AABD is a single variable light chain (VL) domain (or a SVL domain) or a fragment thereof that can be expressed as a soluble protein in the absence of a vH domain. In another aspect, the AABD is a single variable light chain (VL) domain (or a SVL domain) or a fragment thereof that can be expressed as a secreted protein in the absence of a vH domain when joined to an N-terminal secretory signal.

[0540] In some embodiment, an AABD is a non-scFv based antigen binding domain, a camelid vHH domain, a humanized vHH domain, a non-immunoglobulin antigen binding scaffold, the receptor binding domain of cytokine or a ligand, the ligand binding domain of a receptor, a single variable domain T cell receptor (TCR), an autoantigen or a fragment thereof.

[0541] In an embodiment, an AABD is an adaptor domain, an adaptor binding domain or a fragment thereof. Exemplary adaptors and adaptor binding domain include but are not limited to: RZIP, EZIP, E4, K4, NKG2D-YA, NKG2D-AF, D domains and the like.

[0542] The terms “single domain antibody, variable single domain or immunoglobulin single variable domain (ISV)” are all well known in the art and describe the single variable fragment of an antibody that binds to a target antigen. These terms are used interchangeably herein. As explained below, embodiments of the various aspects of the disclosure relate to SARs comprising single heavy chain variable domain antibodies/immunoglobulin heavy chain single variable domains, designated SVH domains, which bind to different antigens, such as CD19, CD20, CD22, BCMA, CD3ε, MPL, CD123, CD33, Mesothelin, Her2, CS1/SLAMF7, CD30, GD2, GD3, FLT3, ROR1, CD79b, Lym1, Lym2, PSCA, PSMA, ALK, CD138, CEA, FAP, TAJ, CD229, IL13Ra2, CD32b, GPC3, Muc16 and KIR3DL2 in the absence of light chain. Human heavy chain single variable domain antibodies are typically used.

[0543] Thus, in some embodiments, the SARs of the disclosure comprise a binding domain that comprises or consist of a single domain antibody wherein said domain is a single human heavy chain variable domain (SVH). Thus, in some aspect, the SARs of the disclosure comprise one or more binding domain that is devoid of VL domains.

[0544] Thus, in some embodiments, the SARs of the disclosure comprise a binding domain that comprises or consist of a single domain antibody wherein said domain is a camelid vHH (or VHH) domain or humanized vHH domain.

[0545] As used herein, the VH domain is a human VH domain or a non-human VH domain.

[0546] The SVH domains are small molecules of 12-14 kDa which can be combined into different formats to give multivalent or multispecific antigen binding domains of a SAR. SVH domains are robust and are characterized by high affinity and stability in serum. SVH domains are also characterized by high solubility in serum and lack of aggregation.

[0547] Each single VH domain (SVH) antibody comprises three CDRs and four FRs, arranged from amino-terminus to carboxy-terminus in the following order: FR1-CDR1-FR2-CDR2-FR3-CDR3-FR4. Thus, in one embodiment of the disclosure, the domain is a human variable heavy chain (VH) domain with the following formula FR1-CDR1-FR2-CDR2-FR3-CDR3-FR4.

[0548] In an embodiment, the disclosure provides single-chain and multichain SARs (e.g., CD16, NKp30, NKp44, NKp46, Dap10 etc.) that can be constructed using SVH domains having a W103R substitution according to Kabat system. An exemplary SVH targeting CD19 with W103R substitution is CD19-FHVH-354 and is represented by SEQ ID NO (DNA): 836 and SEQ ID NO (PRT): 3230. In another embodiment, the disclosure provides multichain SARs having bispecific, bivalent or biparatopic antigen binding moieties that comprise SVH domains having a W103R substitution according to Kabat system.

[0549] In another embodiment, the disclosure provides multichain SARs having multispecific, multivalent or multiparatopic antigen binding moieties that comprise SVH domains having a W103R substitution according to Kabat system. As AABD are modular in nature, an AABD can be substituted by other AABD targeting different antigens to develop SARs targeting those antigens.

[0550] In another embodiment, the disclosure provides single chain SARs having bispecific, bivalent or biparatopic antigen binding moieties that comprise SVH having a W103R substitution according to Kabat system.

[0551] In an embodiment, the disclosure provides that single chain and multi-chain SARs can be constructed using SVH stabilized by the introduction of non-canonical cysteines, which are capable of forming disulfide bonds and/or form disulfide bridges under suitable conditions. An exemplary SVH comprising non-canonical cysteins is CEA-300-aVH and is provided in SEQ ID NO (DNA): 954 and SEQ ID NO (PRT): 3348. Additional exemplary such SVH are provided in WO2019149715, which is incorporated in its entirety by reference herein.

[0552] In one embodiment, the disclosure is aimed at mitigating the shortcomings of existing adoptive cellular therapies by providing single chain SARs comprising SVH where the SVH domains contains the substitution cysteines in positions (i) 52a and 71 or (ii) 33 and 52 according to Kabat numbering, wherein said cysteines are capable of forming a disulfide bond and/or form a disulfide bond under suitable conditions.

[0553] In an embodiment of the disclosure, the SVH domain used to make a SAR comprises a substitution selected from the group consisting of 44E, 45E, 45 R, (101-1)Y and 101D according to Kabat numbering. Particularly, the SVH comprises the substitutions 44E, 45E or 45R, (101-1)Y and 101D according to Kabat numbering. In an embodiment, the SVH domain comprises a substitution selected from the group consisting of G44E, T45E, T45 R, F(101-1)Y and A101D according to Kabat numbering. In an embodiment, the SVH domain comprises the substitutions G44E, T45E, T45 R, F(101-1)Y and A101D according to Kabat numbering.

[0554] In an embodiment of the disclosure, the SAR comprises an SVH with substitution selected from the group consisting of 44E, 45E and (101-1)Y according to Kabat numbering. In an embodiment, the SAR comprises an SVH domain with the substitutions 44E, 45E, and (101-1)Y according to Kabat numbering. In an embodiment, the SVH domain comprises a substitution selected from the group consisting of G44E, T45E and F(101-1)Y according to Kabat numbering, if present in the SVH domain. In an embodiment, the SAR comprises an SVH domain comprising the substitutions G44E, T45E, and F(101-1)Y according to Kabat numbering.

[0555] In an embodiment, the SVH domain of the SAR comprises a vH framework comprising a FR1, FR2, FR3 and FR4 with at least 85% sequence identity to the amino acid sequence of SEQ ID NOs: 21411, 21412, 21413 and 21414, respectively.

[0556] In an embodiment, the SVH domain of the SAR comprises a vH framework comprising a FR1, FR2, FR3 and FR4 with at least 85% sequence identity to the amino acid sequence of SEQ ID NO: 4819-4822, respectively.

[0557] In an embodiment, the SVH domain of the SAR comprises a vH framework comprising a FR1, FR2, FR3 and FR4 with at least 85% sequence identity to the amino acid sequence of SEQ ID NO: 4823-4826, respectively.

[0558] In an embodiment of the disclosure, the SVH domain of the SAR comprises a vH framework comprising a FR1, FR2, FR3 and FR4 with at least 85% sequence identity to the amino acid sequence of SEQ ID NO: 4827-4830, respectively.

[0559] In an embodiment of the disclosure, the SVH domain comprises a vH framework comprising a FR1, FR2, FR3 and FR4 with at least 85% sequence identity to the amino acid sequence of SEQ ID NO: 4831-4834, respectively.

[0560] In an embodiment of the disclosure, the SVH domain comprises a vH framework comprising a FR1, FR2, FR3 and FR4 with at least 85% sequence identity to the amino acid sequence of SEQ ID NO: 4835-4838, respectively.

[0561] In an embodiment, the SVH domain comprises a vH framework comprising a FR1, FR2, FR3 and FR4 with at least 85% sequence identity to the amino acid sequence of SEQ ID NO: 4839-4842, respectively.

[0562] In an embodiment, the SVH domain comprises a vH framework comprising a FR1, FR2, FR3 and FR4 with at least 85% sequence identity to the amino acid sequence of SEQ ID NO: 4843-4846, respectively.

[0563] The SVH domain is particularly useful for construction of a SAR, as FRI-4 according to SEQ ID NOs 4819-4650 are not immunogenic in humans.

[0564] In some embodiments, the SAR constructs described herein include a human SVL domain (typically multiple human SVL domains) that recognizes a target protein of interest, e.g., a protein expressed on a tumor cell, such as an antigen. The term SVL domain as used herein refers to a single human VL domain antibody (VL sdAb). These terms are thus used interchangeably. The term SVL is also used interchangeably with independent vL domains or autonomous vL domains. An SVL is a type of AABD.

[0565] In one aspect, the AABD of a SAR is a camelid vHH domain. The disclosure also relates to a SAR comprising multiple vHH domains. The disclosure also relates to a SAR comprising humanized vHH domains. Exemplary vHH domains that can be used in the construction of the SAR of the disclosure and their target antigens are presented in Table 5.

[0566] In one aspect, the AABD of a SAR is a non-immunoglobulin antigen binding scaffold, such as DARPIN, an affibody, an affilin, an adnectin, an affitin, an obodies, a repebody, a fynomer, an alphabody, an avimer, an atrimer, a centyrin, a pronectin, an anticalin, a kunitz domain, an Armadillo repeat protein, D domain, or a fragment thereof. The disclosure also relates to a SAR comprising multiple non-immunoglobulin antigen binding scaffold. Exemplary non-immunoglobulin antigen binding scaffold that can be used in the construction of the SARs of the disclosure and their target antigens are presented in Table 7-9.

[0567] In one aspect, the AABD of a SAR is an adaptor binding domain (e.g., RZIP, EZIP, E4, K4, NKG2D-AF, NKG2D-YA, or D domain etc.). The disclosure also includes SARs that bind to multiple adaptors. In an embodiment, an adaptor binding domain is a leucine zipper domain. In one aspect, the AABD of a SAR binds to an adaptor (e.g., RZIP, EZIP, E4, K4, D domain, Streptag, FITC, Biotin, ULBP2R, ULBP2-S3 etc.). It is understood by those skilled in the art that an adaptor and an adaptor binding protein can be substituted for each other. Thus, a SAR can comprise an RZIP module that binds to a SAR adaptor comprising an EZIP module. Alternatively, the SAR may comprise an EZIP module while the SAR adaptor may comprise an RZIP module. The disclosure also includes SARs that bind to multiple adaptors.

[0568] In one aspect, the AABD of a SAR is the extracellular ligand-binding domain of a receptor or a fragment thereof. The disclosure also includes SARs that comprise multiple extracellular ligand binding domains of receptors.

[0569] In one aspect, the AABD of a SAR is the extracellular receptor-binding domain of a ligand or a cytokine or a fragment thereof. The disclosure also includes SARs that comprise multiple extracellular receptor binding domains of ligands or cytokines.

[0570] In one aspect, the AABD of a SAR is an autoantigen. The disclosure also includes SARs that comprise multiple auto-antigens. An exemplary auto-antigen that can be used in the construction of a SAR is Dsg3 or a fragment thereof.

[0571] In one aspect, the AABD of a SAR is a single variable domain of a T cell receptor (svd-TCR). The disclosure also includes SARs that comprise multiple single variable domains of T cell receptors. Exemplary polynucleotides comprising svd-TCR domains are provided in SEQ ID NO (DNA): 21563-21564 of PCT/US2021/022641 and in WO2021030182 which are incorporated in its entirety by reference herein.

[0572] In one aspect, the AABD of a SAR is any single domain protein that can bind to an antigen expressed on the surface of a cell.

[0573] The multiple AABD in a SAR could be present in different combinations (e.g., two Centyrins, one Centyrin and one vHH domain, vHH domain and a SVH domain and a Centyrin etc.)

[0574] In one aspect, the AABD of a SAR is a Centyrin. The disclosure also relates to a SAR comprising multiple Centyrins. In one aspect, the AABD of a SAR is a DARPINS. The disclosure also relates to a SAR comprising multiple DARPINs. Similarly, the disclosure relates to SARs containing multiple non-immunoglobulin antigen binding domains such as affibodies, affilins, adnectins, affitins, obodies, repebodies, fynomers, alphabodies, avimers, atrimers, pronectins, anticalins, kunitz domains, Armadillo repeat proteins.

[0575] In some embodiments, the SAR contains multiple AABDs. In an embodiment, the first AABD is linked to a second AABD, wherein the first and second AABD specifically bind antigens. In an embodiment, the antigens recognized by the SAR are peptide antigens that are bound to MHC complex. In some embodiments, the two or more AABD of a SAR recognize the same antigen. In other embodiments, the two or more AABD of the SAR recognize different antigens.

[0576] Whilst scFv typically used in SARs, such as 2nd generation CARs, have the potential for unwanted aggregation, cluster formation and immunogenicity, the use of Autonomous Antigen Binding Domains (AABD) provides a stable format with substantially reduced potential for immunogenicity, non-specific-aggregation or unfolding. This is particularly useful when designing SARs having bispecific, bivalent or biparatopic antigen binding moieties. As demonstrated by the inventors herein, multiple AABD domains can readily be used in such multimeric format thus facilitating the generation of multispecific SARs that enable simultaneous targeting of more than one target antigen or more than one epitope of an antigen.

[0577] In an embodiment, the disclosure provides a SAR that can target one or more than 1 antigen (e.g., 1, 2, 3, 4, 5, 6 or more antigens). In an embodiment, the disclosure provides a SAR that can target one or more than 1 epitope (e.g., 1, 2, 3, 4, 5, 6 or more epitopes). In an embodiment, the disclosure provides a SAR that comprise one or more than 1 antigen binding domains (e.g., 1, 2, 3, 4, 5, 6 or more antigen-binding domains).

[0578] In an embodiment, the disclosure provides a SAR that comprises one or more than one chain with each chain comprising zero, one or more antigen binding domains operably linked to a transmembrane domain, an optional activation domain and an optional co-stimulatory domain. In an embodiment, the activation domain encodes for one or more ITAM motifs.

[0579] In an embodiment, the disclosure provides a synthetic antigen receptor, comprising (a) one or more antigen-specific targeting regions, (b) at least one extracellular linker domain, (c) at least one transmembrane domain, (d) an optional co-stimulatory domain and (e) an optional intracellular signaling domain, wherein one antigen-specific targeting region comprises an antigen-specific single chain Fv (scFv) fragment, and a second antigen specific targeting domain comprises an AABD. In an exemplary embodiment, the AABD is a non-scFv antigen binding module (e.g., a SVH, vHH, FHVH, SVL, svd-TCR, Centyrin, DARPIN, CD16A, CD64, CD32, NKG2D, NKG2D-AF, NKG2D-YA, RZIP, EZIP, E4, K4, D domain etc.).

[0580] In an embodiment, the disclosure provides a bispecific or a multispecific synthetic antigen receptor comprising (a) at least two antigen-specific targeting regions, (b) at least one extracellular linker domain, (c) at least one transmembrane domain, (d) an optional co-stimulatory domain and (e) an optional intracellular signaling domain, wherein one antigen-specific targeting region comprises an antigen-specific single chain Fv (scFv) fragment, and a second antigen specific targeting domain comprises an AABD. In an exemplary embodiment, the AABD is a non-scFv antigen binding module (e.g., a SVH, vHH, FHVH, SVL, svd-TCR, Centyrin, DARPIN, CD16A, CD64, CD32, NKG2D, NKG2D-AF, NKG2D-YA, RZIP, EZIP, E4, K4, D domain etc.). An exemplary bispecific SAR comprising two AABD and targeting CD38 and BCMA is CD8SP-CD38-717-vHH-Ecoil-BCMA-346-vHH-CD16A-F158V-S197P-FL-v3 (SEQ ID NO (DNA): 5100; SEQ ID NO (PRT):5400) In an embodiment, the disclosure provides a bispecific or a multispecific synthetic antigen receptor having the general formula: (AABD)n-optional linker domain-scFv-hinge domain-transmembrane domain-optional one or more costimulatory domains—an activation domain; where n=0, 1, 2, 3, 4, 5 or more and where the activation domain may contain one or more ITAM motifs. An exemplary such SAR is represented by IgSP-Apa-CD20-USC1-vHH-2HCD26-G4Sx3v2-hu-mROO5-1-scFv-CD16-F158V-S197P-FL-TMCP-v3 (SEQ ID NO (DNA): 7160 and SEQ ID NO (PRT): 7853). This SAR has one antigen binding domain represented by humanized hu-mROO5-1 scFv that targets CD19 and a second antigen binding domain represented by CD20-vHH-2HCD26 that targets CD20. The two antigen binding domains are linked via a Gly-Ser (G4Sx3v2) flexible linker. This SAR construct also comprise a CD16 extracellular domain (including CD16 D1 and D2 domains), a CD16 hinge and transmembrane domains and a CD16 cytosolic domain. Other exemplary bispecific SARs are represented by SEQ ID NO:7161-7170.

[0581] Another exemplary bispecific SAR is represented by IgSP-Apa-CD20-USC1-vHH-2HCD26-G4Sx3v2-hu-mROO5-1-scFv-CD28-Hinge-CD16-F158V-S197P-Hinge-TM-CP-v3 (SEQ ID NO: 7164). This construct is similar to the construct with SEQ ID NO: 7160 described above except it lacks the CD16 D1 and D2 domain and comprise a CD28 hinge domain.

[0582] In an embodiment, the disclosure provides a SAR that comprises one or more than one chain with each chain comprising zero, one, two or more antigen binding domains operably linked to a transmembrane domain but lacking an activation domain. Although such a SAR lacks an activation domain of its own, it is capable of signal transduction by recruitment of a signaling module comprising protein(s) that encode an activation domain. Examples of signaling proteins can be recruited by such a SAR include CD3z, DAP10 or DAP12. An exemplary such a SAR is based on the backbone of a CD16 SAR, NKp30 SAR, NKp44 SAR or NKp46 SAR. In an exemplary embodiment, the disclosure provides a SAR in which one or more AABD are attached to the N-terminus or near the N-terminus of one or both chains of a double chain SAR. In an exemplary embodiment, the disclosure provides a SAR in which one or more AABD are attached to the N-terminus or near the N-terminus of the vL or vH fragments comprising one or both chains of a SAR. In an exemplary embodiment, the disclosure provides a SAR in which one or more AABD are attached to the N-terminus or near the N-terminus of the Va, Vb, Vg or Vd fragments comprising one or both chains of a TCR. In an exemplary embodiment, the AABD is a non-scFv antigen binding module (e.g., a SVH, vHH, FHVH, SVL, svd-TCR, Centyrin, DARPIN, CD16A, CD64, CD32, NKG2D, NKG2D-AF, NKG2D-YA, RZIP, EZIP, E4, K4, D domain etc.).

[0583] In an embodiment, the disclosure provides a one and a half chain SAR or a double chain SAR comprising one chain that has the general formula: (AABD)n-optional linker domain-scFv-optional linker-TCR constant chain; and the second chain that has the general formula (AABD)n-optional linker domain-CD16/NKp30/NKp44/Nkp46 constant chain where n=0, 1, 2, 3, 4, 5 or more. The CD16/NKp30/NKp44/Nkp46 constant chain comprise the full-length CD16/NKp30/NKp44/Nkp46 polypeptide or fragment or a mutant or a variant thereof that is either capable of directly transmitting a signal to an immune cell (e.g., T cell or an NK cell etc.) or is capable of recruiting one or more signaling proteins that are capable of transmitting a signal to an immune cell. The transmitted signal may comprise a signal to stimulate cell proliferation, activation, cytokine secretion and/or cytotoxicity.

[0584] In an embodiment, the disclosure provides a double chain bispecific synthetic antigen receptor comprising two chains, each chain comprising (a) one or more heterologous antigen-specific targeting regions, (b) at least one extracellular linker domain, (c) at least one transmembrane domain, (d) an optional co-stimulatory domain and (e) an optional intracellular signaling domain, wherein one antigen-specific targeting region comprises a vL and/or a vH fragment that is capable of combining with the vH and/or vL fragment present on the second chain to create a fragment variable (Fv), and the second antigen specific targeting domain comprises an AABD (e.g., a vHH, SVH, Centyrin, affibody etc.). In one embodiment, the Fv binds an antigen. In another embodiment, the Fv does not bind an antigen. In an embodiment, the Fv serves as the scaffold for the attachment of the second antigen specific targeting domain comprising an AABD. In an embodiment, the AABD is a non-scFv antigen binding domain.

[0585] An exemplary double chain bispecific SAR comprising two chains is CD8SP-CD20-VHH-2HC2D6-USC1-Kpn-G4S-EcoR1-hu-mROO5-1-vL-xho-IgCL-Bam-NKp30-ECDTMCP-opt1-F-P2A-SP-hu-mROO5-1-vH-Mlu-IgG1-CH1-Kpn-NKp30-ECDTMCP-opt2-F-F2A-PAC and is represented by SEQ ID NO (DNA): 1605 and SEQ ID NO (PRT): 3999. One chain of the SAR construct comprises the humanized hu-mROO5-1 vL fragment fused to NKp30 extracellular, transmembrane and cytosolic domains via an IgCL linker and the other chain of the SAR comprises the humanized hu-mROO5-1 vH fragment fused to a second chain comprising NKp30 extracellular, transmembrane and cytosolic domains. Via the IgG1-CH1 linker. The hu-mROO5-1 vL and hu-mROO5-1 vH fragments of the SAR together form a Fv targeting CD19. A vHH fragment targeting CD20 (CD20-USC1-vHH-2HCD26; SEQ ID NO: 841) is fused to the N-terminus of the hu-mROO5-1 vH fragment via a Glycine-Serine linker. Thus, the SAR targets CD19 via the hu-mROO5-1 Fv and targets CD20 via CD20-USC1-vHH-2HCD26. It is to be noted that SARs are modular in format. Therefore, it is possible to replace one module of a SAR with another module. For example, the hu-mROO5-1 vL and hu-mROO5-1 vH fragments can be replaced with vL/vH fragment targeting a different antigen. Similarly, the CD20-USC1-vHH-2HCD26 module can replaced by another AABD targeting a different antigen. The IgCL and IgG1-CH1 linker can be replaced by other suitable Ig like linkers provided in SEQ ID NO: 1142-1175 (Table 13). Finally, one of both of the NKp30 fragments can be replaced by one or both polypeptides derived fromNKp44, NKp46, CD16, CD3z or DAP10.

[0586] An exemplary construct in which one of the NKp30 ECDTMCP chains is replaced by a CD16-F158V-S197P-FL-TMCP chain is represented by CD8SP-CD20-VHH-2HC2D6-USC1-Kpn-G4S-EcoR1-hu-mROO5-1-vL-xho-IgCL-Bam-NKp30-ECDTMCP-opt1-F-P2A-SP-hu-mROO5-1-vH-Mlu-IgG1-CH1-Kpn-CD16-F158V-S197P-FL-TMCP-v3-F-F2A-PAC (SEQ ID NO (DNA):1618 an SEQ ID NO (PRT): 4012). Other exemplary unispecific, bispecific and trispecific SAR constructs are provided in Table 32 of provisional application.

[0587] An exemplary trispecific double chain construct targeting CD19, CD20 and BCMA is represented by SEQ ID NO (DNA): 1714 and SEQ ID NO (PRT): 4108. Another exemplary trispecific double chain construct targeting CD19, CD20 and BCMA is represented by SEQ ID NO (DNA): 1619 and SEQ ID NO (PRT): 4013.

[0588] In some embodiments, the SAR of the disclosure comprises one, typically more than one vH (VH) domain, i.e., one or more vH single domain antibody, and is devoid of light chains. In an embodiment, the SAR comprises at least two vH single domain (SVH) antibodies.

[0589] In some embodiments, the SAR of the disclosure comprises one, typically more than one VHH domain, i.e., one or more VHH single domain antibody, and is devoid of light chains. In an embodiment, the SAR comprises at least two VHH single domains.

[0590] In some embodiments, the SAR of the disclosure comprises one, typically more than one non-immunoglobulin antigen binding scaffold, i.e. one or more domains selected from a DARPIN, an affibody, a ZIP domain (e.g., RZIP, EZIP, E4, R4 etc.), an affilin, an adnectin, an affitin, an obodies, a repebody, a fynomer, an alphabody, an avimer, an atrimer, a centyrin, a pronectin, an anticalin, a kunitz domain, an Armadillo repeat protein or a fragment thereof. In an embodiment, the SAR comprises two AABD. In an embodiment, the SAR comprises a Fv (i.e., vL/vH fragment that combine to form a Fv) and at least one AABD.

[0591] In some embodiments, a SAR of the disclosure comprises at least two AABD (e.g., two SVH domains or two VHH domains or one SVH and one VHH domain etc.) which target one or more antigens.

[0592] In some embodiments, the SAR of the disclosure comprises at least two antigen binding domains which target one or more antigens.

[0593] In one embodiment, the antigen binding domains of a SAR of the disclosure comprises two or at least two AABD (e.g., SVH, VHH, Centyrin etc.) that are specific for the same antigen, thus providing a bivalent binding molecule. In one embodiment, the antigen binding domain comprises two or at least two AABD (e.g., SVH, VHH, Centyrin etc.) that are specific for the same antigen but bind to different epitopes on said antigen. In other words, the antigen binding domain comprises a first AABD (e.g., SVH, VHH, Centyrin etc.) that binds to a first epitope and a second AABD (e.g., SVH, VHH, Centyrin etc.) that binds to a second epitope. The epitopes may be overlapping. Thus, the antigen binding domain is biparatopic and the scope of the disclosure includes a biparatopic SAR. In yet another embodiment, the antigen binding domain comprises two AABD (e.g., SVH, VHH, Centyrin etc.) that are specific for the same antigen and bind to the same epitopes on said antigen.

[0594] In one embodiment, the antigen binding domains of a SAR of the disclosure comprises a Fv (e.g., a vL fragment and a vH fragment that are attached to different signaling chains and are not present in a single chain fragment variable format or scFv format) and at least one AABD (e.g., SVH, VHH, Centyrin etc.) that is specific for the same antigen as bound by the Fv, thus providing a bivalent binding molecule. In one embodiment, the antigen binding domain comprises a Fv and at least one AABD (e.g., SVH, VHH, Centyrin etc.) that is specific for the same antigen as the Fv but bind to different epitopes on said antigen. In other words, the antigen binding domain comprises a Fv that binds to a first epitope and a second AABD (e.g., SVH, VHH, Centyrin etc.) that binds to a second epitope. The epitopes may be overlapping. Thus, the antigen binding domain is biparatopic and the scope of the disclosure includes a biparatopic SAR. In yet another embodiment, the antigen binding domain comprises a Fv and at least one AABD (e.g., SVH, VHH, Centyrin etc.) that are specific for the same antigen and bind to the same epitopes on said antigen. In yet another embodiment, the antigen binding domain comprises a Fv and at least one AABD (e.g., SVH, VHH, Centyrin etc.) where the Fv fragment does not bind to any specific antigen with significant affinity or binds with insignificant affinity and merely serves as a scaffold for the attachment of the one or more AABD.

[0595] In one embodiment, the antigen binding domains of a SAR of the disclosure comprises a TCR-Fv (e.g., a Vα/Vβ fragment or Vγ/Vδ fragments that are attached to different signaling chains and are not present in a single chain TCR format or scTCR format) and at least one AABD (e.g., SVH, VHH, Centyrin etc.) that is specific for the same antigen as bound by the TCR-Fv, thus providing a bivalent binding molecule. In one embodiment, the antigen binding domain comprises a TCR-Fv (e.g., Va/Vb or Vg/Vd) and at least one AABD (e.g., SVH, VHH, Centyrin etc.) that is specific for the same antigen as the TCR-Fv but bind to different epitopes on said antigen. In other words, the antigen binding domain comprises a TCR-Fv that binds to a first epitope and a second AABD (e.g., SVH, VHH, Centyrin etc.) that binds to a second epitope. The epitopes may be overlapping. Thus, the antigen binding domain is biparatopic and the scope of the disclosure includes a biparatopic SAR. In yet another embodiment, the antigen binding domain comprises a TCR-Fv and at least one AABD (e.g., SVH, VHH, Centyrin etc.) that are specific for the same antigen and bind to the same epitopes on said antigen. In yet another embodiment, the antigen binding domain comprises a TCR-Fv and at least one AABD (e.g., SVH, VHH, Centyrin etc.) where the TCR-Fv fragment does not bind to any specific antigen with significant affinity or binds with insignificant affinity and merely serves as a scaffold for the attachment of the one or more AABD.

[0596] In another embodiment, the antigen binding domain comprises two AABD (e.g., SVH, VHH, Centyrin etc.) that are specific for two different antigens, thus providing a bispecific antigen binding domain. In other words, the antigen binding domain comprises a first AABD (e.g., SVH, VHH, Centyrin etc.) that binds to a first target and a second AABD (e.g., SVH, VHH, Centyrin etc.) that binds to a second target. Thus, in certain embodiments, the disclosure relates to bispecific SARs.

[0597] As used herein, the term “bispecific SAR” or “bispecific antigen binding domain” thus refers to a polypeptide that comprises a binding molecule as described herein which has a binding site that has binding specificity for a first target antigen, and a second polypeptide domain which has a binding site that has binding specificity for a second antigen target, i.e., the bispecific binding molecule has specificity for two targets. The first target and the second target are not the same, i.e., are different targets, e.g., proteins; both may be present on a cell surface. Accordingly, a bispecific binding molecule as described herein can selectively and specifically bind to a cell that expresses (or displays on its cell surface) the first target and the second target. In another embodiment, the binding molecule comprises more than two antigen-binding domains providing a multispecific binding molecule. A multispecific antigen-binding domain as described herein can in addition to binding a first target bind one or more additional targets, i.e., a multispecific polypeptide can bind at least two, at least three, at least four, at least five, at least six, or more targets, wherein the multispecific polypeptide agent has at least two, at least, at least three, at least four, at least five, at least six, or more target binding sites respectively.

[0598] Antigen binding domains that comprise three or more AABD (e.g., SVH, VHH, Centyrin etc.) are therefore also within the scope of the disclosure.

[0599] In one aspect, the disclosure describes the optimal configuration of a SAR of the disclosure for targeting two or more antigens. In one aspect, the disclosure describes the optimal configuration of a SAR of the disclosure for targeting two or more epitopes of one or more antigens.

[0600] The single chain and double chain SARs of the disclosure can be expressed in T cells in which the expression of the endogenous TCRα, TCRβ, TCR and/or TCRS genes has been reduced or eliminated using methods known in the art. Such T cells in which the expression of endogenous functional TRAC, TRBC, TRGC and/or TRDC chains has been reduced or eliminated can be used for the purpose of allogeneic cell therapy.

[0601] In an embodiment, the single chain and double chain SARs of the disclosure can be targeted to the TRAC, TRBC, TRGC and/or TRDC locus in T cells using methods as described in PCT/US2018/053247 which is incorporated in its entirety by reference herein. Such T cells in which the endogenous TRAC, TRBC, TRGC and/or TRDC loci are disrupted by insertion of SAR can be used for the purpose of allogeneic cell therapy.

[0602] The disclosure also provides compositions and methods for targeting bispecific and multispecific SARs to the TRAC and/or TRBC loci for the purpose of generating allogeneic SAR-T cells.

[0603] In an embodiment, the single-chain and double chain SARs of the disclosure can be targeted to the endogenous loci encoding one or more genes that are expressed in immune cells, e.g., T cells, NK cells, NKT cells, monocytes, macrophages and/or neutrophils etc.

[0604] In an embodiment, the single-chain and double chain SARs of the disclosure can be targeted to the endogenous loci encoding one or more genes that are expressed in NK cells.

[0605] In an embodiment, the single-chain and double chain SARs of the disclosure can be targeted to the endogenous loci encoding one or more genes selected from the group of CD16A, CD16B, NKp30, NKp44, NKp46, KIR2DS4, DAP10, DAP12, FcRγ, CD3z, NKG2D, NKG2A and DNAM1.

[0606] In an embodiment the single-chain and double chain SARs of the disclosure are targeted to the endogenous loci encoding one or more of the CD16A, CD16B NKp30, NKp44, NKp46, KIR2DS4, DAP10, DAP12, FcRγ, CD3z, NKG2D, NKG2C and DNAM1 genes so that the antigen binding domain(s) of the SARs are expressed in frame with the partial or entire extracellular domain, hinge domain, and/or transmembrane domains of the CD16A, CD16B, NKp30, NKp44, NKp46, DAP10, DAP12, FcRγ, CD3z, NKG2D, NKG2C and DNAM1 genes.

[0607] In an embodiment the single-chain and double chain SARs of the disclosure are targeted to the endogenous loci encoding one or more of the CD16A, CD16B, NKp30, NKp44, NKp46, KIR2DS4, DAP10, DAP12, FcRγ, CD3z, and DNAM1 genes so that the antigen binding domain(s) of the SARs are inserted downstream of and in-frame with the signal peptides encoding the CD16A, CD16B, NKp30, NKp44, NKp46, KIR2DS4, DAP10, DAP12, FcRγ, CD3z, and DNAM1 genes.

[0608] Methods for generation of immune cells, including T and NK cells, by directed differentiation of genomic engineered iPSC are known in the art, including in WO2020117526, WO2020210398, WO2019126748, WO2019112899, WO2019018603 and U.S. Ser. No. 10/370,452, which are incorporated in their entirety by reference herein.

[0609] In one aspect the novel antigen binding domain of a SAR binds to an antigen preferentially or exclusively expressed on hematopoietic lineage cells. Exemplary antigens that are preferentially or exclusively expressed on hematopoietic lineage cells are CD19, CD20, CD22, BCMA, CS1, CD33, MPL, CD138, CD38 and CD123. In one aspect the novel antigen binding domain of a SAR binds to an antigen preferentially or exclusively expressed on non-hematopoietic lineage cells. Exemplary antigens that are preferentially or exclusively expressed on non-hematopoietic lineage cells are Mesothelin (MSLN), Her2, EGFR, PSMA, PSCA, GPC3 and the like. In one aspect the SAR expresses two or more novel antigen binding domains where at least one of the novel antigen binding domain binds to an antigen preferentially or exclusively expressed on hematopoietic lineage cells and at least one of the novel antigen domain binds to an antigen expressed on non-hematopoietic lineage cells.

[0610] The disclosure provides that two or more AABD of a SAR (e.g., SVH, VHH, Centyrin etc.) may be connected by a linker, for example a peptide linker. A linker may be also present between the vL and/or vH domain comprising the Fv or TCR-Fv and the AABD. Suitable linkers, for example comprising linker include GS residues such as (Gly₄Ser)ₙ, where n=from 1 to 10, e.g., 1, 2, 3, 4, 5, 6, 7, 8, 9 or 10. Exemplary linkers are provided in SEQ ID NO (DNA): 1024-1028 and SEQ ID NO (PRT): 3418-3422.

[0611] A linker may be also present between the vL and vH domain comprising the Fv or TCR-Fv of a SAR and the TCR constant chain connecting peptide to which the vL and vH domains are attached. In particular, the IgCL (SEQ ID NO (DNA): 1142 and SEQ ID NO (PRT): 3536) and IgCH domains (SEQ ID NO (DNA): 1143-1157 and SEQ ID NO (PRT): 3537-3551) derived from antibodies serve as useful linkers between the vL/vH and signaling chains. Additional Ig like domains are known in the art (e.g., SEQ ID NO (DNA):1168-1175 and SEQ ID NO (PRT):3562-3569) and can serve as useful linkers in alternate embodiment of the disclosure.

[0612] In some embodiments, the one or more AABD comprising the antigen binding domain of the SAR are attached to the signaling chain without the intervening vL/vH fragments. In such constructs, a linker may be also present between the AABD of the SAR and the signaling chain to which the AABD are attached. In an embodiment, one of the AABD of a double chain SAR is attached to the linker IgCL (SEQ ID NO: 1142) and the other AABD is attached to the linker IgG1-CH1 (SEQ ID NO: 1143). In an embodiment, one of the AABD of a double chain SAR is attached to the linker IgCL (SEQ ID NO: 1142) and the other AABD is attached to the linker IgG4-CHI1 (SEQ ID NO: 1152). In an embodiment, one of the AABD of a double chain SAR is attached to the linker TCRa-wt-opt-6ECD (SEQ ID NO: 1158) and the other AABD is attached to the linker TCRb-wt-opt-6ECD (SEQ ID NO: 1160).

[0613] In some embodiments, the antigen binding domain of a SAR polypeptide molecule is derived from or comprises of vL and vH domains of an antibody that are separately attached to the NH2-terminus or near the NH2-terminus of two signaling chains (e.g., CD16A, NKp30, NKp44, NKp46, DAP10, DAP12 etc. or mutants or variant thereof as described herein) to jointly constitute a Fragment variable (Fv) that binds to a specific antigen.

[0614] In some embodiments, the antigen binding domain of a SAR polypeptide molecule is derived from or comprises of Va and Vβ domains of a TCR that are separately attached to the NH2-terminus or near the NH2-terminus of two signaling chains (e.g., CD16A, NKp30, NKp44, NKp46, CD3z, DAP10, DAP12 etc. or mutants or variant thereof as described herein) to jointly constitute a Fragment variable-TCR (TCR-Fv) that binds to a specific peptide antigen in association with an MHC molecule.

[0615] In some embodiments, the antigen binding domain of a SAR polypeptide molecule is derived from or comprises of V_{y} and Vδ domains of a TCR that are separately attached to the NH2-terminus or near the NH2-terminus of two polypeptide chains (e.g., CD16A, NKp30, NKp44, NKp46, CD3z, DAP10, DAP12 etc. or mutants or variant thereof as described herein) to jointly constitute a Fragment variable-TCR (TCR-Fv) that binds to a specific peptide antigen/MHC or a lipid antigen.

[0616] In some embodiments, the SAR polypeptide has an antigen binding domain that is expressed as single chain variable fragments (scFv) and is operationally linked to the NH2-terminus or near the NH2-terminus of a signaling chain (e.g., CD16A, NKp30, NKp44, NKp46, DAP10, DAP12 etc. or mutants or variant thereof as described herein).

[0617] In certain embodiments, the AABDs of the two polypeptide chains of a double chain SAR are similar in structure (e.g., both AABD are SVH or camelid VHH domain or affibodies or Centyrins). In one embodiment, the AABD of the two polypeptide chains of a double chain SAR are not similar in structure (e.g., the first antigen binding domain is a SVH and the second antigen binding domain is a camelid VHH).

[0618] In some embodiments, the antigen binding domain of the encoded SAR polypeptides is encoded by a codon optimized nucleotide sequence of the corresponding wild-type sequence or a non-wild-type sequence antibody, single domain antibodies (SDAB), VH domains, VL domain, camelid VHH domains, or a non-immunoglobulin scaffolds such as DARPINs, affibodies, affilins, adnectins, affitins, obodies, repebodies, fynomers, alphabodies, avimers, atrimers, centyrins, pronectins, anticalins, kunitz domains, Armadillo repeat proteins, autoantigen, receptors or ligands.

[0619] In some embodiments, the encoded one or more antigen binding domains of the SAR polypeptide comprise any one or more of light chain variable domain (vL or VL) amino acid sequences of SEQ ID NO 2440 to 2676 wherein up to 20 amino acid residues but no more than 21 amino acids are replaced by any other amino acid residues, or sequences with 70-99.9% identity to amino acid sequences of SEQ ID NO 2440 to 2676, or sequences with 70-100% identity to the complementarity determining regions (CDR's) of SEQ ID NO: 2440 to 2676, or sequences with up to 3 amino acid substitution in each of the three complementarity determining regions of 10736 to 10972. Table 3 shows the target antigens, names, SEQ ID NO (DNA), SEQ ID NO (PRT), SEQ ID NO (PRT) of scFv of the exemplary vL domains used in this disclosure.

[0620] In some embodiments, the encoded one or more antigen binding domains of the SAR polypeptide comprise any one or more of heavy chain variable domain (vH or VH) amino acid sequences of SEQ ID NO: 2682-2918 wherein up to 20 amino acid residues but no more than 21 amino acids are replaced by any other amino acid residues, or sequences with 70-99.9% identity to amino acid sequences of SEQ ID NO 2682-2918. In some embodiments, the encoded one or more antigen binding domains of the SAR polypeptide comprise any one or more of heavy chain variable domain (vH or VH) amino acid sequences of SEQ ID NO: 2682-2918 wherein up to 20 amino acid residues but no more than 21 amino acids are replaced by any other amino acid residues, or sequences with 70-99.9% identity to amino acid sequences of SEQ ID NO: 2682-2918, or sequences with 70-100% identity to the complementarity determining regions (CDR's) of SEQ ID NO: 2682-2918, or sequences with up to 3 amino acid substitution in any of the three complementarity determining regions of SEQ ID NO: 2682-2918. Table 3 shows the target antigens, names, SEQ ID NO (DNA), SEQ ID NO (PRT), SEQ ID NO (PRT) of scFv of the exemplary vH domains used in this disclosure.

[0621] In some embodiments, the encoded one or more antigen binding domains of the SAR polypeptide comprise any one or more of camelid single domain antibody (vHH or VHH) amino acid sequences of SEQ ID NO:3253-3296 wherein up to 20 amino acid residues but no more than 21 amino acids are replaced by any other amino acid residues, or sequences with 70-99.9% identity to amino acid sequences of SEQ ID NO 3253-3296, or sequences with up to 3 amino acid substitution in any of the three complementarity determining regions (CDR's) of SEQ 3253-3296.

[0622] In some embodiments, the encoded one or more antigen binding domains of the SAR polypeptide comprise any one or more of non-immunoglobulin antigen binding scaffold amino acid sequences of SEQ ID NO: 3366-3377 wherein up to 20 amino acid residues but no more than 21 amino acids are replaced by any other amino acid residues, or sequences with 70-99% identity to amino acid sequences of SEQ ID NO: 3366-3377.

[0623] In some embodiments, the encoded one or more antigen binding domains of the SAR polypeptide comprise any one or more of receptor amino acid sequences of SEQ ID NO 3378-3395 wherein up to 20 amino acid residues but no more than 21 amino acids are replaced by any other amino acid residues, or sequences with 70-99.9% identity to amino acid sequences of SEQ ID NO: 3378-3395.

[0624] In some embodiments, the encoded one or more antigen binding domains of the SAR polypeptide comprise autoantigen amino acid sequences of SEQ ID NO:3391 wherein up to 19 amino acid residues but no more than 20 amino acids are replaced by any other amino acid residues, or sequences with 70-100% identity to amino acid sequences of SEQ ID NO 3391.

[0625] In some embodiments, the encoded one or more antigen binding domains of the SAR molecule comprise any one or more of ligand amino acid sequences of SEQ ID NO: 3396-3406 wherein up to 20 amino acid residues but no more than 21 amino acids are replaced by any other amino acid residues or sequences with 70-100% identity to amino acid sequences of SEQ ID NO: 3396-3406.

[0626] In some embodiments, the encoded one or more antigen binding domains of the SAR polypeptide comprise any one or more of scFv amino acid sequences of SEQ ID NO: 2924-3160 wherein up to 40 amino acid residues but no more than 41 amino acids are replaced by any other amino acid residues, or sequences with 70-100% identity to amino acid sequences of SEQ ID NO 2924-3160 or sequences with 70-100% identity in the six complementarity determining regions (CDR's) in each of SEQ ID NO 2924-3160 or sequences with up to 3 substitution in any of the six complementarity determining regions (CDR's) in each of SEQ ID NO: 2924-3160.

[0627] In some embodiments, the encoded one or more antigen binding domains of the SAR polypeptide comprise any one or more of an antigen binding portions, e.g., CDRs, of vL and vH fragments targeting this antigen or domains with up to 3 amino acid substitutions in any of the CDRs of the vL and vH fragments listed in Table 3. The sequences of the CDR1-3 of the vL and vH fragments listed in Table 3 can be determined by methods known in the art.

[0628] In some embodiments, the encoded one or more antigen binding domains of the SAR polypeptide comprise any one or more of an antigen binding portions, e.g., CDRs, of vHH fragments targeting this antigen.

[0629] In one embodiment, an antigen binding domain of a SAR is an antigen binding portion of a receptor known to bind this target antigen.

[0630] In another embodiment, the disclosure provides SARs that bind to the same epitope on the different targets as any of the SARs of the disclosure (i.e., SARs that have the ability to cross-compete for binding to the different targets with any of the SARs of the disclosure). In some embodiments, the antigen specific domains of these SARs could be determined from vL fragments, vH fragments and/or scFv fragments of the antibodies that were used as the component of the SAR. In some embodiments, the reference antibodies for cross-competition studies to determine the target-epitope recognized by a SAR of the disclosure are vL, vH, scFvs, SVH, vHH, non-immunoglobulin antigen binding domains described herein. In an exemplary embodiment, the reference scFv hu-mROO5-1 represented by SEQ ID NO:3027 can be used in cross-competition studies to determine the target-epitope recognized by hu-mROO5-1-based SARs of the disclosure. In some embodiments, the reference AABD fragments for cross-competition studies to determine the target-epitope recognized by a SAR of the disclosure described are AABD fragments described here. In some embodiments, the reference non-immunoglobulin antigen binding scaffolds for cross-competition studies for cross-competition studies to determine the target-epitope recognized by a SAR of the disclosure described are non-immunoglobulin antigen binding scaffolds-based AABD. In some embodiments, the reference ligands for cross-competition studies to determine the target-epitope recognized by a SAR of the disclosure are ligands.

[0631] In other embodiments described herein, the bispecific SAR of the disclosure shows more than 30% (e.g., more than 40%, 50%, 60%, 70%, 80%, 90%, or 95%, 99% etc.) affinity for each of the target antigens as compared to the affinity of the each of the corresponding unispecific SARs when expressed in an effector cell and compared under similar conditions. The binding affinity can be measured using assays known in the art such as the Topanga Assay.

[0632] In other embodiments described herein, the bispecific SAR of the disclosure shows more than 30% (e.g., more than 40%, 50%, 60%, 70%, 80%, 90%, or 95%, 99% etc.) signaling activity against each of the target antigen expressing cell as compared to the signaling activity of each of the corresponding unispecific SARs when expressed in an effector cell and compared under similar conditions. The signaling activity can be measured using methods known in the art, such as the Jurkat-NFAT-GFP cell assay.

[0633] In other embodiments described herein, the bispecific SAR of the disclosure shows more than 30% (e.g., more than 40%, 50%, 60%, 70%, 80%, 90%, or 95%, 99% etc.) cytokine (e.g., TNFα, IFNγ, IL-2 etc.) production against each of the target antigen expressing cell as compared to the cytokine production of each of the corresponding unispecific SARs when expressed in an effector cell and compared under similar conditions. The cytokine production (e.g., TNFα, IFNγ, IL-2 etc.) can be measured using methods known in the art, such as ELISA.

[0634] In other embodiments described herein, the bispecific SAR of the disclosure shows more than 30% (e.g., 40%, 50%, 60%, 70%, 80%, 90%, or 95%, 99% etc.) of the cytotoxic activity against each of the target antigen expressing cell as compared to the cytotoxic activity of each of the corresponding unispecific SARs when expressed in an effector cell and compared under similar conditions. The cytotoxic activity can be measured using methods known in the art, such as the Matador or radioactive chromium release assay.

[0635] In other embodiments described herein, the bispecific SAR of the disclosure shows more than 30% (e.g., 40%, 50%, 60%, 70%, 80%, 90%, or 95%, 99% etc.) of the in vivo activity against each of the target antigen expressing cell as compared to the in vivo activity of each of the corresponding unispecific SARs when expressed in an effector cell and compared under similar conditions. In an embodiment, the in vivo activity is measured using xenograft model in immunodeficient mice.

[0636] In other embodiments described herein, the multi-specific SAR of the disclosure shows more than 30% (e.g., more than 40%, 50%, 60%, 70%, 80%, 90%, or 95%, 99% etc.) affinity for each of the target antigens as compared to the affinity of the each of the corresponding unispecific SARs when expressed in an effector cell and compared under similar conditions. The binding affinity can be measured using assays known in the art such as the Topanga Assay.

[0637] In other embodiments described herein, the multi-specific SAR of the disclosure shows more than 30% (e.g., more than 40%, 50%, 60%, 70%, 80%, 90%, or 95%, 99% etc.) of the signaling activity against each of the target antigen expressing cell as compared to the signaling activity of each of the corresponding unispecific SARs when expressed in an effector cell and compared under similar conditions. The signaling activity can be measured using methods known in the art, such as the Jurkat-NFAT-GFP cell assay.

[0638] In other embodiments described herein, the multi-specific SAR of the disclosure shows more than 30% (e.g., 40%, 50%, 60%, 70%, 80%, 90%, or 95%, 99% etc.) of the cytotoxic activity against each of the target antigen expressing cell as compared to the cytotoxic activity of each of the corresponding unispecific SARs when expressed in an effector cell and compared under similar conditions. The cytotoxic activity can be measured using methods known in the art, such as the Matador or radioactive chromium release assay.

[0639] In other embodiments described herein, the multispecific SAR of the disclosure shows more than 30% (e.g., more than 40%, 50%, 60%, 70%, 80%, 90%, or 95%, 99% etc.) cytokine (e.g., TNFα, IFNγ, IL-2 etc.) production against each of the target antigen expressing cell as compared to the cytokine production of each of the corresponding unispecific SARs when expressed in an effector cell and compared under similar conditions. The cytokine production (e.g., TNFα, IFNγ, IL-2 etc.) can be measured using methods known in the art, such as ELISA.

[0640] In other embodiments described herein, the multi-specific SAR of the disclosure shows more than 30% (e.g., 40%, 50%, 60%, 70%, 80%, 90%, or 95%, 99% etc.) of the in vivo activity against each of the target antigen expressing cell as compared to the in vivo activity of each of the corresponding unispecific SARs when expressed in an effector cell and compared under similar conditions. In an embodiment, the in vivo activity is measured using xenograft model in immunodeficient mice.

[0641] In some embodiments, when present on the surface of a cell, binding affinity of the antigen binding domain comprised by the Fv or TCR-Fv (i.e., vL/vH, Va/V or Vy/VS fragments) of a bispecific SAR to its cognate antigen is not substantially reduced by one or more AABDs that are attached to the N-terminus region of the vL, vH, Va, VD, Vγ or V6 fragment of the said SAR. In an embodiment, the SAR is a single chain SAR. In an embodiment, the SAR is a double chain SAR.

[0642] In some embodiments, when present on the surface of a cell, the antigen binding affinity of the antigen binding domain comprised by the Fv or TCR-Fv (i.e., vL/vH, Vα/Vβ or Vγ/Vδ fragments) of a bispecific SAR to its cognate antigen comprising one or more AABDs that are attached to the N-terminus region or near the N-terminus of the vL, vH, Vα, Vβ, Vγ and/or Vδ fragments of the said SAR is at least 70%, 80%, 85%, 90%, 95%, 96%, 97%, 98% or 99% of antigen binding affinity of the antigen binding domain of a corresponding unispecific SAR in which one or more AABDs are not attached to the N-terminus region or near the N-terminus region of the vL, vH, Vα, Vβ, Vγ or Vδ fragments.

[0643] In some embodiments, binding of the antigen binding domain of said first chain of SAR to its cognate antigen in the presence of said second chain of SAR is 70%, 80%, 85%, 90%, 95%, 96%, 97%, 98% or 99% of binding of the antigen binding domain of said first chain of SAR to its cognate antigen in the absence of said second chain of SAR to its cognate antigen.

[0644] In some embodiments, binding of the antigen binding domain of said first chain of SAR to its cognate antigen in the presence of said second chain of SAR (or a CAR) is 70%, 80%, 85%, 90%, 95%, 96%, 97%, 98% or 99% of binding of the antigen binding domain of said first chain of SAR to its cognate antigen in the absence of said second chain of SAR (or a CAR) to its cognate antigen.

[0645] In one embodiment, the VH domain is selected from SEQ ID NO: 3210-3252 having one or more amino acid substitutions, deletions, insertions or other modifications compared to SEQ ID NOs: 3210-3252, and which retains a biological function of the single domain antibody.

[0646] In another embodiment, the VH domain is selected from one of the SEQ ID NOs. 3210-3252, but comprises one or more amino acid substitutions, for example 1 to 20, such as 1, 2, 3, 4, 5, 6, 7, 8, 9 or 10 amino acid substitutions. In one embodiment, the one or more amino acid substitution is in one or more of the framework areas. In another embodiment, the one or more amino acid substitution is in one or more of the CDRs. In one embodiment, the amino acid substitutions are in the framework and CDR sequences.

[0647] The disclosure also comprises sequence optimized variants of the single domain antibodies described herein.

[0648] In one embodiment, the binding domain of the SAR of the disclosure provides biparatopic targeting to BCMA. Thus, the binding domain comprises a first AABD (e.g., VH single domain antibody) that binds to a first epitope of BCMA and an AABD (e.g., VH single domain antibody) that binds to a second epitope of BCMA. The first and second epitope may be overlapping.

[0649] In one embodiment, the binding domain of the SAR of the disclosure provides biparatopic targeting to CD22. Thus, the binding domain comprises a first VH single domain antibody that binds to a first epitope of CD22 and a second VH single domain antibody that binds to a second epitope of CD22. The first and second epitope may be overlapping.

[0650] In one embodiment, the binding domain of the SAR of the disclosure provides biparatopic targeting to CD38. Thus, the binding domain comprises a first VH single domain antibody that binds to a first epitope of CD38 and a second VH single domain antibody that binds to a second epitope of CD38. The first and second epitope may be overlapping.

[0651] In one embodiment, the binding domain of the SAR of the disclosure provides biparatopic targeting to CEA. Thus, the binding domain comprises a first VH single domain antibody that binds to a first epitope of CEA and a second VH single domain antibody that binds to a second epitope of CEA. The first and second epitope may be overlapping.

[0652] In one embodiment, the binding domain of the SAR of the disclosure provides biparatopic targeting to PSMA. Thus, the binding domain comprises a first VH single domain antibody that binds to a first epitope of PSMA and a second VH single domain antibody that binds to a second epitope of PSMA. The first and second epitope may be overlapping.

[0653] In one embodiment, the binding domain of the SAR of the disclosure provides bispecific targeting. Thus, the binding domain comprises a VH single domain antibody that binds BCMA and a second binding moiety that targets a second target. The second binding moiety may be an antibody fragment, typically a VH single domain antibody, a centyrin, an affibody or a vHH domain. The second target may be selected from CD19, CD20, CD22, BCMA, PSCA, CS1, GPC3, CSPG4, EGFR, 5T4, L1 CAM, MUC16, ROR1, cKit, ROR1, mesothelin, IL3Ra, c-Met, EGFRvlll, GD-2, NY-ESO-1 TCR or MAGE A3 TCR, HER2, Wilm's tumor gene 1 (WT1), carcinoembryonic antigen (CEA), mucin 16, MUC1, an immuno checkpoint target or combinations thereof. However, a skilled person would understand that other tumor antigens are also potential combination targets within the scope of the disclosure. In the case of a single chain SAR, the two binding domains may be present in either order.

[0654] In one embodiment, the first binding domain of SAR comprises an AABD (e.g., VH single domain antibody or SVH, vHH or Centyrin etc.) that binds BCMA and a second binding moiety that targets CD38. In an embodiment, the SAR further comprises vL/vH fragments that combine to form a Fv targeting a specific antigen. Exemplary vL/vH fragments and their target antigens are provided in Table 3. In an embodiment, the SAR further comprises Va/Vb or Vg/Vd fragments that combine to form a TCR-Fv targeting different antigens. Exemplary Va/Vb or Vg/Vd fragments and their target antigens are provided in Table 4.

[0655] In one embodiment, one binding domain of SAR comprises an AABD (e.g., VH single domain antibody or SVH, vHH or Centyrin etc.) that binds BCMA and a second binding moiety that targets CD19. In an embodiment, the SAR further comprises vL/vH fragments that combine to form a Fv targeting a specific antigen. Exemplary vL/vH fragments and their target antigens are provided in Table 3. In an embodiment, the SAR further comprises Va/Vb or Vg/Vd fragments that combine to form a TCR-Fv targeting different antigens. Exemplary Va/Vb or Vg/Vd fragments and their target antigens are provided in Table 4.

[0656] In one embodiment, the first binding domain of SAR comprises an AABD (e.g., VH single domain antibody or SVH, vHH or Centyrin etc.) that binds BCMA and a second binding moiety that targets CD22. In an embodiment, the SAR further comprises vL/vH fragments that combine to form a Fv targeting a specific antigen. Exemplary vL/vH fragments and their target antigens are provided in Table 3. In an embodiment, the SAR further comprises Va/Vb or Vg/Vd fragments that combine to form a TCR-Fv (or TCR-Fv) targeting different antigens. Exemplary Va/Vb or Vg/Vd fragments and their target antigens are provided in Table 4.

[0657] In one embodiment, the first binding domain of SAR comprises an AABD (e.g., VH single domain antibody or SVH, vHH or Centyrin etc.) that binds BCMA and a second binding moiety that targets CD20. In an embodiment, the SAR further comprises vL/vH fragments that combine to form a Fv targeting a specific antigen.

[0658] In one embodiment, the first binding domain of SAR comprises an AABD that binds CD22 and a second binding moiety that targets CD20.

[0659] In one embodiment, the first binding domain of SAR comprises an AABD that binds CD22 and a second binding moiety that targets CD19. In an embodiment, the SAR further comprises vL/vH fragments that combine to form a Fv targeting a specific antigen. In an embodiment, the SAR further comprises Va/Nb or Vg/Vd fragments that combine to form a TCR-Fv targeting different antigens.

[0660] In one embodiment, the first binding domain of SAR comprises an AABD that binds CD19 and a second binding moiety that targets CD20. In an embodiment, the SAR further comprises vL/vH fragments that combine to form a Fv targeting a specific antigen. In an embodiment, the SAR further comprises Va/Nb or Vg/Vd fragments that combine to form a TCR-Fv targeting different antigens.

[0661] In one embodiment, the first binding domain of SAR comprises an AABD that binds CD19 and a second binding moiety that targets CD38. In an embodiment, the SAR further comprises vL/vH fragments that combine to form a Fv targeting a specific antigen. In an embodiment, the SAR further comprises Va/Nb or Vg/Vd fragments that combine to form a TCR-Fv targeting different antigens.

[0662] In one embodiment, the first binding domain of SAR comprises AABD that binds CD19 and a second binding moiety that targets CD123. In an embodiment, the SAR further comprises vL/vH fragments that combine to form a Fv targeting a specific antigen. In an embodiment, the SAR further comprises Va/Nb or Vg/Vd fragments that combine to form a TCR-Fv targeting different antigens.

[0663] In one embodiment, the first binding domain of SAR comprises AABD that binds CD19 and a second binding moiety that targets BAFF-R. In an embodiment, the SAR further comprises vL/vH fragments that combine to form a Fv targeting a specific antigen. In an embodiment, the SAR further comprises Va/Vb or Vg/Vd fragments that combine to form a TCR-Fv targeting different antigens.

[0664] In addition to a binding domain as described in detail above, the SAR of the disclosure may further comprise one or more signaling chains or fragments and variants thereof. Exemplary signaling chains and fragments are provided in SEQ ID NO (DNA):1349-1584 and 8541 to 8767 (new chains) and SEQ NO (PRT):3743-3966, 3385, 3394, 7818-7822, 9633-9859. The disclosure also provides exemplary components of signaling chains such as extracellular domains, extracellular and transmembrane domains, transmembrane domains, hinge domains (SEQ ID NO (DNA):1535-1549 and SEQ ID NO (PRT):3929-3943), cytosolic domains (SEQ ID NO (DNA):1550-1564 and SEQ ID NO (PRT):3944-3958) and costimulatory domains (SEQ ID NO (DNA):1565-1572 and SEQ ID NO (PRT):3959-3966). In an exemplary embodiment, the signaling chains and fragments for the construction of the SARs comprise of polypeptides represented by SEQ ID NOs: 3743-3966 3385, 3394, 7818-7822, 9633-9859 or fragments with at least 60%, 70%, 80% or 90% homology thereto or functional variants thereof or the equivalent residues (i.e., a homolog) from a non-human species, e.g., mouse, rodent, monkey, ape and the like. It is to be understood that signaling chains and fragments from other mammalian species can be used in the methods of disclosure to make SARs of the disclosure. Furthermore, signaling chains and fragments that are hybrids of signaling chains and fragments derived from human and other mammalian species can be used in the methods of disclosure to make SARs of the disclosure. Finally, alternatively spliced isoforms of the signaling chains and fragments described in can be used in the methods of disclosure to make SARs.

[0665] The SARs of the disclosure comprise one or more transmembrane domains. A “transmembrane domain” (TMD) as used herein refers to the region of the SAR which crosses the plasma membrane and is connected to the endoplasmic signaling domain and the antigen binding domain, in case of the latter optionally via a hinge domain or a connecting peptide. In one embodiment, the transmembrane domain of the SAR of the disclosure is the transmembrane region of a Type I or a Type II transmembrane proteins, or an artificial hydrophobic sequence or a combination thereof. In one embodiment, the transmembrane domain comprises the transmembrane domain derived from CD16, CD64, CD32, KIR2DS4, CD3z, NKp30, NKp44, NKp46, NKG2D, DAP10, DAP12, CD28 and CD8. Other transmembrane domains will be apparent to those of skill in the art and may be used in connection with alternate embodiments of the disclosure. Specifically, within the scope of disclosure are TMD sequences shown in SEQ ID NO: 3914-3928.

[0666] The SAR of the disclosure further comprises an intracellular signaling domain. An “intracellular signaling domain”, “cytoplasmic domain” or “endodomain” is the domain that transmits activation signals to T cells and directs the cell to perform its specialized function. Specifically within the scope of disclosure is intracellular signaling domain sequences shown in SEQ ID NO: 3944-3958.

[0667] In one embodiment, the SAR of the disclosure further comprises one or more co-stimulatory domains to enhance SAR-T cell activity after antigen specific engagement. Multiple co-stimulatory domains can be included in a single SAR to recruit multiple signaling pathways. Specifically within the scope of disclosure are co-stimulatory domains sequences with SEQ ID NO: 3959-3966.

[0668] In one embodiment, the SAR of the disclosure further comprises a hinge or spacer region which connects the extracellular antigen binding domain and the transmembrane domain. This hinge or spacer region can be used to achieve different lengths and flexibility of the resulting SAR. Examples of a hinge or spacer region that can be used according to the disclosure include, but are not limited to, Fc fragments of antibodies or fragments or derivatives thereof, hinge regions of antibodies, or fragments or derivatives thereof, C_{H}2 regions of antibodies, C_{H}3 regions of antibodies, CD8A hinge domain, CD28 hinge domain, CD16 hinge domain, NKp30 hinge domain, NKp44 hinge domain, NKp46 hinge domain and artificial spacer sequences, for example peptide sequences, or combinations thereof. Other hinge or spacer region will be apparent to those of skill in the art and may be used in connection with alternate embodiments of the disclosure. Specifically, within the scope of disclosure are hinge sequences shown in SEQ ID NO: 3592-3598 and 3929-3943. The TCR connecting peptides (SEQ ID NO: 3571-3579) can also serve as the hinge domains.

[0669] In one embodiment, the SAR of the disclosure further comprises a “linker domain” or “linker region” that connects different domains of the SAR. This domain includes an oligo- or polypeptide region from about 1 to 500 amino acids in length. Suitable linkers will be apparent to those of skill in the art and may be used in connection with alternate embodiments of the disclosure.

[0670] In one embodiment, the SAR of the disclosure further comprises a “leader sequence”. In one embodiment, the leader sequence is a CD8A domain. Specifically, within the scope of disclosure are leader sequences with SEQ ID NO: 2425-2430.

[0671] In some aspects, the SAR of the disclosure includes an antigen binding domain that transmits an inhibitory signal.

[0672] In some aspects, the SAR of the disclosure includes an adaptor binding domain that allows it to bind to a soluble polypeptide adaptor or a tag. Exemplary adaptors and adaptor binding domains are provided in SEQ ID NO: 3407-3435. In an exemplary embodiment, a RZIP encoding SAR can be used in conjunction with an EZIP encoding polypeptide (SEQ ID NO: 3409) containing an antigen binding domain targeting CD19 to target a CD19-expressing cell. Similarly, a NKG2D-AF-G4Sx3-NKG2D-AF encoding SAR (e.g., SEQ ID NO: 5481) can be used in combination with a ULBP2R encoding polypeptide (e.g., CD8SP-BCMA-FHVH93-GS-ULBP2R, SEQ ID NO: 5131) to target BCMA. In an alternate embodiment, a NKG2D-YA-G4Sx3-NKG2D-YA encoding SAR (e.g., SEQ ID NO: 5482) can be used in combination with a ULBP2-S3 encoding polypeptide (e.g., CD8SP-BCMA-FHVH93-GS-ULBP2-S3, SEQ ID NO: 5132) to target BCMA. Similarly, a SAR encoding an antigen binding domain targeting Streptag (SEQ ID NO: 4970) or FITC (e.g., SEQ ID NO: 4963-4964) can be used in combination with a Streptag-labelled or FITC-labelled antibody/antibody fragment to target an antigen bound by the latter. Other adaptors are known in the art (e.g., WO2019099440 and Diana Darowski et al, MABS, 2019, VOL. 11, NO. 4, 621-631) and can be used in alternate embodiment of the disclosure.

[0673] The SAR may further include a label, for example a label that facilitates imaging, such as a fluorescent label or other tag. This can, for example be used in methods for imaging tumor binding. The label may be conjugated to the antigen binding domain.

[0674] The SARs described herein may be synthesized as single polypeptide chains. In this embodiment, the antigen-specific targeting regions are at the N-terminus, arranged in tandem and are separated by a linker peptide.

[0675] In another aspect, the disclosure provides an isolated SAR polypeptide molecule comprising one or more antigen binding domains (e.g., antibody or antibody fragment, a ligand or a receptor) that bind to antigens as described herein, and are jointed to one or more signaling chains.

[0676] In some embodiments, a SAR may comprise or consist of a single polypeptide that contains a single antigen binding domain joined to the NH2-terminus of a single signaling chain (Class 1).

[0677] In some embodiments, a SAR comprises or consists of two polypeptides that assemble to make a functional SAR (Class 2). Each of the polypeptides of such dual chain Class 2 SAR contains a signaling chain and contains (as in Class 2A) or does not contain (as in Class 2B) one or more antigen binding domains. In Class 2A SARs, each of the antigen binding domains is joined to the N-terminus of a separate signaling chain. For example, antigen binding domain 1 (e.g., vL fragment of an antibody) is joined to one DAP10 chain to constitute functional polypeptide unit 1 and antigen binding domain 2 (vH fragment of an antibody) is joined to the second DAP10 chain to constitute functional polypeptide unit 2. The two functional polypeptide units of such SAR are coexpressed in the same cell and pair with each other to become functionally active. It should be noted that each of the antigen binding domains may in turn be bispecific or multispecific, thereby allowing the Class 2 SARs to target more than 2 antigens.

[0678] In some embodiments, the two functional polypeptide units of Class 2 SARs are coexpressed in a cell using different vectors. In some embodiments, the two functional polypeptide units of the Class 2 SARs are coexpressed in a cell using a single vector which employs two separate regulatory elements (e.g., promoters) to encode for two polynucleotides encoding the two functional polypeptide units of Class 2 SARs. The disclosure provides that small promoters that can be used to express the second polypeptide unit or a third accessory module is EFS promoter, EFS2 promoter or an RSV promoter. In some embodiments, the two functional polypeptide units of the Class 2 SARs are coexpressed in a cell using a single vector which employs a single promoter to express a polynucleotide containing an IRES sequence that separates the nucleotide fragments encoding the two polypeptides of the SAR. In some embodiments, the two functional polypeptide units of the Class 2 SARs are coexpressed in a cell using a single vector which employs a single promoter to express a polynucleotide encoding for a single polypeptide containing a cleavable linker (e.g., F2A, T2A, E2A, P2A etc.). The resulting mRNA encodes a single polypeptide which subsequently generates the two functional polypeptide units of the SAR. In some embodiments, the two functional polypeptide units of the Class 2 SARs are coexpressed using transfection of a single mRNA sequence that encodes for both functional polypeptide units, while in other embodiments the two functional polypeptide units are coexpressed by transfection of two different mRNA sequences, each encoding for one functional polypeptide unit. In some embodiments, the vector or mRNA encoding the SAR may encode for additional genes/proteins (therapeutic controls, inhibitory molecules, accessory modules etc.), which may be separated from the SAR encoding sequences by IRES or cleavable linkers expressed using separate promoters (e.g., EFS, EFS2 or RSV promoter) or combination thereof. In another embodiment, a therapeutic control or accessory module or both could be expressed in the cell in which SAR is expressed using a separate vector or mRNA. It is to be understood that therapeutic controls or accessory modules are not essential for the function of a SAR and any of the SAR of the embodiment can be used without therapeutic control or the accessory modules. For example, the antibiotic resistance cassette, such as PAC (puromycin resistance gene), can be removed from the SAR-encoding vectors of this disclosure without compromising the functionality of the SAR.

[0679] Also provided are functional variants of the SARs described herein, which have substantial or significant sequence identity or similarity to a parent SAR, which functional variant retains the biological activity of the SAR of which it is a variant. Functional variants encompass, for example, those variants of the SAR described herein (the parent SAR) that retain the ability to recognize target cells to a similar extent, the same extent, or to a higher extent, as the parent SAR. In reference to the parent SAR, the functional variant can, for instance, be at least about 30%, about 50%, about 75%, about 80%, about 85%, about 90%, about 91%, about 92%, about 93%, about 94%, about 95%, about 96%), about 97%, about 98%, about 99% or more identical in amino acid sequence to the parent SAR.

[0680] A functional variant can, for example, comprise the amino acid sequence of the parent SAR with at least one conservative amino acid substitution. Alternatively or additionally, the functional variants can comprise the amino acid sequence of the parent SAR with at least one non-conservative amino acid substitution. In this case, it is common for the non-conservative amino acid substitution to not interfere with or inhibit the biological activity of the functional variant. The non-conservative amino acid substitution may enhance the biological activity of the functional variant, such that the biological activity of the functional variant is increased as compared to the parent CAR.

[0681] The SARs (including functional portions and functional variants) can be of any length, i.e., can comprise any number of amino acids, provided that the SARs (or functional portions or functional variants thereof) retain their biological activity, e.g., the ability to specifically bind to antigen, detect diseased cells in a mammal, or treat or prevent disease in a mammal, etc. For example, the SAR can be about 300 to about 5000 amino acids long, such as 300, 400, 500, 600, 700, 800, 900, 1000 or more amino acids in length.

[0682] In another aspect, the disclosure relates to an isolated nucleic acid construct comprising at least one nucleic acid encoding a SAR as defined above. In one embodiment, the nucleic acid encodes a protein that targets one of the targets listed in Table B.

[0683] Also within the scope of the disclosure are sequences with at least 60%, 70%, 80% or 90% homology to any SAR polypeptide described herein. As SARs are modular in design, additional SAR can be generated by replacing one or more of the modules of the SARs described herein with different modules. For example, the antigen binding domains (i.e., vL, vH, scFv, vHH, FHVH, centyrins etc.) of the SARs can be replaced by antigen binding domains targeting other antigens.

[0684] The term “nucleic acid,” “polynucleotide,” or “nucleic acid molecule” refers to deoxyribonucleic acid (DNA) or ribonucleic acid (RNA), or a combination of a DNA or RNA. RNA includes in vitro transcribed RNA or synthetic RNA; an mRNA sequence encoding a SAR polypeptide as described herein). The nucleic acid may further comprise a suicide gene. The construct may be in the form of a plasmid, vector, transcription or expression cassette.

[0685] In one embodiment, the vector is an in vitro transcribed vector, e.g., a vector that transcribes RNA of a nucleic acid molecule described herein. The expression vector may be provided to a cell in the form of a viral vector. Viral vector technology is well known in the art and is described, for example, in Sambrook et al. (Molecular Cloning: A Laboratory Manual, Cold Spring Harbor Laboratory, New York, 2013). A number of viral based systems have been developed for gene transfer into mammalian cells. For example, retroviruses such as, adenovirus vectors are used. In one embodiment, a lentivirus vector is used. This is demonstrated in the examples. The disclosure also relates to a virus comprising a SAR described above.

[0686] The disclosure also includes an RNA construct that can be directly transfected into a cell. A method for generating mRNA for use in transfection involves in vitro transcription (IVT) of a template with specially designed primers, followed by poly A addition, to produce a construct containing 3′ and 5′ untranslated sequence (“UTR”) (e.g., a 3′ and/or 5′ UTR described herein), a 5′ cap (e.g., a 5′ cap described herein) and/or Internal Ribosome Entry Site (IRES) (e.g., an IRES described herein), the nucleic acid to be expressed, and a poly A tail, typically 50-2000 bases in length (SEQ ID NO: 13-16). RNA so produced can efficiently transfect different kinds of cells. In one embodiment, the template includes sequences for the SAR. In one embodiment, an RNA SAR vector is transduced into a cell, e.g., a T cell, an NK cell or an iPSC, by electroporation. In another embodiment, an RNA SAR vector is transduced into a cell, e.g., a T cell or a NK cell, by causing transient perturbations in cell membrane using a microfluid device. The different chains (or functional polypeptide units) of a SAR can be also introduced in a cell using one or more than one vector a combination of different vectors or techniques.

[0687] In another embodiment, one chain or functional polypeptide unit of SAR can be introduced using a retroviral vector while the other functional polypeptide unit is introduced using a lentiviral vector. In another aspect, one functional polypeptide unit is introduced using a lentiviral vector while the other functional polypeptide unit is introduced using a sleeping beauty transposon. In yet another aspect, one functional polypeptide unit is introduced using a lentiviral vector while the other functional polypeptide unit is introduced using RNA transfection. In yet another aspect, one functional polypeptide units is produced in a cell by genetic recombination at the endogeneous TCR chain loci using gene targeting techniques known in the art while the other functional polypeptide unit is introduced using a lentiviral or a retroviral vector.

[0688] RNA can be introduced into target cells using any of a number of different methods, for instance, commercially available methods which include, but are not limited to, electroporation, cationic liposome mediated transfection using lipofection, polymer encapsulation, peptide mediated transfection, or biolistic particle delivery systems such as “gene guns” (see, for example, Nishikawa, et al. Hum Gene Ther., 12(8):861-70 (2001) or by causing transient perturbations in cell membranes using a microfluidic device (see, for example, patent applications WO 2013/059343 A1 and PCT/US2012/060646).

[0689] In some embodiments, the non-viral method includes the use of a transposon (also called a transposable element).

[0690] Exemplary methods of nucleic acid delivery using a transposon include a Sleeping Beauty transposon system (SBTS) and a piggyBac (PB) transposon system.

[0691] In some embodiments, cells, e.g., T, NK, NKT, stem cells or iPSC or synthetic T cell, are generated that express a SAR described herein by using a combination of gene insertion using the SBTS and genetic editing using a nuclease (e.g., Zinc finger nucleases (ZFNs), Transcription Activator-Like Effector Nucleases (TALENs), the CRISPR/Cas system, or engineered meganuclease reengineered homing endonucleases).

[0692] In some embodiments, use of a non-viral method of delivery permits reprogramming of cells, e.g., T, NK, NKT, stem cells or iPSC or synthetic T cell, and direct infusion of the cells into a subject.

[0693] In a further aspect, the disclosure also relates to an isolated cell or cell population comprising one or more nucleic acid construct as described above. The cell has thus been genetically modified to express a SAR nucleic acid construct of the disclosure. Thus, the disclosure provides genetically engineered cells which comprise and stably express a SAR nucleic acid construct of the disclosure. In one embodiment, the cell is selected from the group consisting of a T cell, a Natural Killer (NK) cell, macrophage, granulocyte, dendritic cell, a cytotoxic T lymphocyte (CTL), a regulatory T cell, hematopoietic stem cells and/or pluripotent embryonic/induced stem cells. T cells may be isolated from a patient for transfection with a SAR nucleic acid construct of the disclosure.

[0694] For example, cells can be transfected with the nucleic acid of the disclosure ex vivo. Various methods produce stable transfectants which express a SARs of the disclosure. In one embodiment, a method of stably transfecting and re-directing cells is by electroporation using naked DNA. Additional methods to genetically engineer cells using naked DNA encoding a SAR of the disclosure include but are not limited to chemical transformation methods (e.g., using calcium phosphate, dendrimers, liposomes and/or cationic polymers), non-chemical transformation methods (e.g., electroporation, optical transformation, gene electrotransfer and/or hydrodynamic delivery) and/or particle-based methods (e.g., impalefection, using a gene gun and/or magnetofection). The transfected cells demonstrating presence of an integrated un-rearranged vector and expression of the SAR may be expanded ex vivo. Viral transduction methods may also be used to generate redirected cells which express the SAR of the disclosure.

[0695] In some embodiments, a vector of the disclosure can further comprise a promoter. Non-limiting examples of a promoter include, for example, an EF-1 promoter, a CMV IE gene promoter, an EF-1α promoter, MNDU3 promoter, an ubiquitin C promoter, a core-promoter or a phosphoglycerate kinase (PGK) promoter. In some embodiments, the promoter is an EF-1 promoter. In further embodiments, the EF-1 promoter comprises SEQ ID NO: 7. In some embodiments, the vector is an RNA nucleic acid. In some embodiments, the vector comprises a poly(A) tail.

[0696] In another aspect, the disclosure provides a method of making a cell (e.g., an immune effector cell or population thereof) comprising introducing into (e.g., transducing) a cell, e.g., T, NK, NK cell line, macrophage, NKT, stem cells, iPSC or synthetic T cell described herein, with a vector comprising a nucleic acid encoding a SAR, e.g., a SAR described herein; or a nucleic acid encoding a SAR molecule e.g., a SAR described herein.

[0697] The cell can be an immune effector cell (e.g., a T cell, NK cells or a NKT cell, or a combination thereof) or a stem/progenitor cell that can give rise to an immune effector cell or a synthetic T cell. In some embodiment, the cell is an immortalized cell line, such as NK92, NK92MI or a derivative thereof. In some embodiments, the cell in the methods is deficient in constant chains of endogenous T cell receptor α, β1, β2, pre-TCRα, γ or δ or combination thereof. In some embodiments, the cell in the methods is deficient in HLA antigens. In some embodiments, the cell in the methods is deficient in β2 microglobulin. In some embodiments, the cell in the methods is deficient in expression of the target antigen of SAR. For example, the SAR expressing T cell is deficient in endogenous CD5 in case the SAR is directed against CD5 or is deficient in TCR-beta1constant chain in case the SAR is directed against TCR-beta1 constant chain or is deficient in TCR-beta2 constant chain in case the SAR is directed against TCR-beta2 or is deficient in CS1 in case the SAR is directed against CS1.

[0698] In some embodiment, the introducing the nucleic acid molecule encoding a SAR comprises transducing a vector comprising the nucleic acid molecule encoding a SAR, or transfecting the nucleic acid molecule encoding a SAR, wherein the nucleic acid molecule is an in vitro transcribed RNA. In some embodiments, the nucleic acid molecule encodes two or more components of a SAR, are introduced by transducing a cell with more than one vector or transfecting with two or more nucleic acid molecules encoding the different subunits of a SAR. For example, a cell may be transduced with two separate vectors each encoding one of the two functional polypeptide units of a SAR. Similarly, a cell may be transduced with two separate in vitro transcribed RNAs each encoding one of the two functional polypeptide units of a SAR. In addition to the functional polypeptide units of the SAR, each of the RNAs may carry a different selection marker or reporter (e.g., tEGFR, tBCMA, or CD34 or CNB30 or mutant DHFR) that can be used to select the cells transduced with both the RNAs and thus expressing both the functional polypeptide units of the SAR.

[0699] In an embodiment, a SAR of the disclosure can be expressed using the regulatory elements of an endogenous gene. In an embodiment, the expression cassette encoding the one or more heterologous antigen binding domains of a SAR are targeted to the genetic locus of a naturally occurring signaling receptor or a signaling adaptor. In an embodiment, the one or more heterologous antigen binding domains of a SAR are transcribed in fusion with a mRNA encoding the entire or partial extracellular domain, hinge domain, transmembrane domain and cytosolic domain of the native receptor or signaling adaptor. In an embodiment, the one or more heterologous antigen binding domains of a SAR are transcribed in fusion with a mRNA encoding the hinge domain and cytosolic domain of the native receptor or signaling adaptor. In an embodiment, the one or more heterologous antigen binding domains of a SAR are transcribed in fusion with a mRNA encoding the transmembrane and cytosolic domain of the native receptor or signaling adaptor. In an embodiment, the SAR is expressed under the promoter and transcription regulatory elements of a naturally occurring receptor or a signaling adaptor. In an embodiment, the targeting of SAR to the genetic locus of an endogenous results in disruption of expression of the naturally occurring receptor or signaling adaptor.

[0700] Methods to target genes to any specific genetic locus are known in the art. In an embodiment the method involves the use of CRISP/Cas9 or Zn finger nucleases or TALENs. In an embodiment, a SAR expression cassette is targeted to the genetic locus of a native receptor selected from the group of CD16A, CD16B, CD64, CD32, NKp30, NKp44, NKp46, KIR2DL1, KIR2DL2, KIR2DL3, KIR2DL5A, KIR2DL5B, KIR3DL1, KIR3DL2, KIR3DL4, KIR2DL4, KIR2DS1, KIR2DS2, KIR2DS3, KIR2DS4, KIR2DS5, KIR3DS1, NKG2D, NKG2C, NKG2A, NKG2E, NKG2F, DNAM-1, 2B4, OX40, CD28, 4-1BB, CD27, CD81, CD2, CD5, TNFR-I, TNFR-II, Fas, CD30, CD40, CRTAM, TIGIT, CD96, SLAMF6, SLAMF7, CD100, CD160, CEACAM, ILT2, KLRG1, LAIR1 and CD161. In an embodiment, a SAR expression cassette is targeted to the genetic locus of CD3, FcRγ, DAP10 or DAP12. In an embodiment, a SAR expression cassette is targeted to the genetic locus of TAP1, TAP2, tapasin, NLRC5, CIITA, RFXANK, CIITA, RFX5, RFXAP, TCRα or R constant region, NKG2A, NKG2D, CD3ε, CD5, CD52, CD33, CD123, CLL-1, CIS, CBL-B, SOCS2, PD1, CTLA4, LAG3, TIM3, TIGIT, or any gene in the chromosome 6p21 region.

[0701] In some embodiments, the method further comprises: a) providing a population of immune effector cells (e.g., T cells or NK cells); and b) removing T regulatory cells from the population, thereby providing a population of T regulatory-depleted cells; wherein steps a) and b) are performed before introducing the nucleic acid encoding the SAR to the population.

[0702] In one embodiment, the cell is a human T cell, NK cell, macrophage or dendritic cell. In some embodiments, the cell is a dog cell.

[0703] In one embodiment, the cell is a T cell and the T cell is deficient in one or more of endogenous T cell receptor chains. T cells stably lacking expression of a functional TCR according to the disclosure may be produced using a variety of approaches such as use of Zn finger nucleases (ZFN), CRISP/Cas9 and shRNA targeting the endogenous T cell receptor chains.

[0704] A T cell lacking a functional endogenous TCR can be, e.g., engineered such that it does not express any functional endogenous TCR on its surface, engineered such that it does not express one or more subunits (e.g., constant chains of endogenous TCRα, TCRβ1, TCRβ2, TCRγ, TCRδ or pre-TCRα) that comprise a functional endogenous TCR or engineered such that it produces very little functional endogenous TCR on its surface. Alternatively, the T cell can express a substantially impaired endogenous TCR, e.g., by expression of mutated or truncated forms of one or more of the subunits of the TCR. The term “substantially impaired TCR” means that this TCR will not elicit an adverse immune reaction in a host.

[0705] The disclosure provides SARs based on novel chains (e.g., NKp30, NKp44, NKp46, DAP10, CD3z, NKG2D and CD16 etc.) that are not only expressed and show signaling activity in NK cells but can be also expressed and show signaling activity in T cells and other immune lineages, including monocytes/macrophages, neutrophils and dendritic cells. The disclosure provides a universal method of on a non-T cell, TCR like binding properties, i.e., ability to bind to a peptide/MHC complex. Thus, the disclosure provides a non-T cell with TCR like binding properties. In the embodiment, the disclosure provides that a cell that is not a T cell can be endowed with TCR like binding properties by expressing a SAR of the disclosure where the SAR is a uTCR-SAR comprising variable domains of TCR but lacking a TCR module. In the embodiment, the disclosure provides a simple one step method of conferring TCR like binding properties on any cell without the need of multiple genetic manipulations. In an embodiment, the method involves ectopic expression of a uTCR-SAR in a cell and does not require the additional steps and time expenditure required for ectopic expression of multiple CD3 subunits and selection of high expressing clones. Thus, the method is suitable for conferring T cell like binding and signaling to any cell, including a primary cell, such as a primary NK cell, a hematopoietic stem cell or an iPSC. The method can be also used to confer T cell like binding (i.e., HLA-dependent binding to a peptide antigen) to an antigen and/or TCR like signaling and cytotoxicity on immortalized cell lines, such as NK cell lines (e.g., NK92, NK92MI, NKG and YTS cell lines).

[0706] As the SAR (e.g., uTCR-SAR, CD16-SAR etc.) of the disclosure can be expressed in any cell, including a non-T cell, the method of the disclosure has a distinct advantage over other next generation CAR platforms, such as SIR, AbTCR etc., that rely on signaling via the physiological T cell receptor complex. The disclosure provides a SAR that is expressed under a promoter (e.g., EFlu, MNDU3, ubiquitin etc.) that is active in multiple tissues and lineages. The disclosure provides that a SAR of the disclosure can be expressed in a stem cell (e.g., hematopoietic stem cell or iPSC) and differentiation of the stem cell would result in the functional expression of the SAR in multiple lineages, including NK, T, macrophage, basophils, neutrophils, B cell, granulocytes, and dendritic cells, thereby resulting in a strong immune response against the antigen targeted by the SAR. In an embodiment, the SAR is expressed in a hematopoietic stem cell in vivo and the differentiation into different blood lineages occur in vivo. In alternate embodiment of the disclosure, the SAR is expressed in a stem cell (e.g., iPSC) in vitro and the differentiation into different blood lineages occur in vitro. The in vitro differentiated and expanded blood cells of multiple lineages are then administered to a subject.

[0707] In some embodiment, the disclosure provides a non-T cell selected from the group of a primary cell (e.g., primary NK cell, g-NK cell, CIK, memory like NK cell, macrophage, dendritic cell, neutrophile, B cell, granulocyte etc.), a cell line, a hematopoietic stem cell, an iPSC cell, an HLA-deficient iPSC cell, an HLA-deficient NK cell, an HLA-deficient NK cell line etc. with TCR like binding properties and/or signaling activities.

[0708] In light of the above, the present application provides an iPSC, an iPS cell line cell, or a derivative cell therefrom comprising at least one SAR, wherein the derivative cells are functional effector cells obtained from differentiation of the iPSC comprising SAR. In some embodiments, the derivative cells are hematopoietic cells include, but are not limited to, mesodermal cells with definitive hemogenic endothelium (HE) potential, definitive HE, CD34 hematopoietic cells, hematopoietic stem and progenitor cells, hematopoietic multipotent progenitors (MPP), T cell progenitors, NK cell progenitors, myeloid cells, neutrophil progenitors, T cells, NKT cells, NK cells, B cells, neutrophils, dendritic cells, and macrophages. In some embodiments, the functional derivative hematopoietic cells comprise effector cells such as T, NK, and regulatory cells.

[0709] In another embodiment, an iPSC or a derivative cell therefrom comprising SAR, further comprises an exogenous cytokine and/or cytokine receptor comprising at least one of IL2, IL4, IL6, IL7, IL9, IL10, IL11, IL12, IL15, IL18 and IL21.

[0710] Additionally provided is an iPSC, an iPS cell line cell, or a derivative cell therefrom comprising at least a SAR expression, may further comprises a polynucleotide encoding at least one exogenous cytokine and/or its receptor (IL) to enable cytokine signaling contributing to cell activation, survival, persistence and/or expansion, wherein the iPSC line is capable of directed differentiation to produce functional derivative hematopoietic cells having improved activation, survival, persistency, expansion, and effector cell function. The exogenously introduced cytokine signaling(s) comprise the signaling of any one, or two, or more of IL2, IL4, IL6, IL7, IL9, IL10, IL11, IL12, IL15, IL18, and IL21. In some embodiments, the cytokine signaling is constitutively activated. In some embodiments, the activation of the cytokine signaling is inducible. In some embodiments, the activation of the cytokine signaling is transient and/or temporal. In some embodiments, the transient/temporal expression of a cell surface cytokine/cytokine receptor is through a retrovirus, Sendai virus, an adenovirus, an episome, mini-circle, or RNAs including mRNA. In some embodiments, the exogenous cell surface cytokine and/or receptor comprised in the SAR overexpressed iPSC or derivative cells thereof enables IL7, IL10, IL15, IL18 or IL21 signaling. In some embodiment, the cytokine is membrane anchored form of IL2, IL15, IL7 etc. An exemplary construct encoding membrane anchored form of hIL2 is represented by SEQ ID NO: 1330. In some embodiments, the cytokine is part of a multipurpose switch.

[0711] Also provided is an iPSC, modified HLA-deficient iPCS, an iPS cell line cell, or a derivative cell therefrom comprising a SAR and overexpressed NKG2C, CD94, DAP12, DAP10, BiKE, TriKE, hnCD16, CAR, an IL, a B2M knockout and/or a CITA knockout; and optionally, a polynucleotide encoding HLA-G, wherein the iPSC is capable of directed differentiation to produce functional derivative hematopoietic cells. In one embodiment of the iPSC and its derivative NK or T cell, the cells comprise B2M−/− CIITA−/−, among other genomic editings, and are both HLA-I and HLA-II deficient, wherein the iPSC and its derivative effector cell have improved persistence and/or survival. In some embodiments, the effector cell has increased persistence and/or survival in vivo.

[0712] As such, provided herein include an iPSC comprising a SAR, an exogenous cytokine/receptor, a B2M knockout, and a CIITA knockout; wherein when B2M is knocked out, a polynucleotide encoding HLA-G is optionally introduced, and wherein the iPSC is capable of directed differentiation to produce functional derivative hematopoietic cells. Also included in this application are functional iPSC derivative hematopoietic cells comprising overexpressed SAR, an exogenous cytokine/receptor, a B2M knockout, and a CIITA knockout; wherein when B2M is knocked out, a polynucleotide encoding HLA-G is optionally introduced, and wherein the derivative hematopoietic cells include, but are not limited to, mesodermal cells with definitive hemogenic endothelium (HE) potential, definitive HE, CD34 hematopoietic cells, hematopoietic stem and progenitor cells, hematopoietic multipotent progenitors (MPP), T cell progenitors, NK cell progenitors, myeloid cells, neutrophil progenitors, T cells, NKT cells, NK cells, B cells, neutrophils, dendritic cells, and macrophages.

[0713] In one embodiment of the cell or the population of the cells comprising said one or more exogenous polynucleotides comprising a SAR, the cell further comprises one or more of the followings: (i) a BiKE or a TriKE; (ii) B2M null or low; (iii) CIITA null or low; (iv) introduced expression of HLA-G or non-cleavable HLA-G; (v) a chimeric antigen receptor (CAR); (vi) a partial or full peptide of a cell surface expressed exogenous cytokine or a receptor thereof, (vii) an accessory module encoding multi-purpose switch; (viii) deletion or reduced expression in at least one of B2M, TAP1, TAP2, tapasin, NLRC5, CIITA, RFXANK, CIITA, RFX5, RFXAP, TCRα or β constant region, NKG2A, NKG2D, CD3ε, CD5, CD52, CD33, CD123, CLL-1, CIS, CBL-B, SOCS2, PD1, CTLA4, LAG3, TIM3, TIGIT, or any gene in the chromosome 6p21 region; and (ix) introduced or increased expression in at least one of HLA-E, 41BBL, CD3ε, CD3γ, CD36, CD3ƒ, FcRγ, DAP10, DAP12, CD4, CD8, CD16, CD47, CD94, CD113, CD131, CD137, CD80, PDL1, A2AR, Fc receptor, an engager, or surface triggering receptor for coupling with bi- or multi-specific or universal engagers.

[0714] In an alternate approach to uTCR-SAR, the disclosure also provides a method of expressing a SAR on the SIR, AbTCR, cTCR and other similar platforms that rely on endogenous TCR signaling to be expressed in a non-T cell, such as a NK cell or an NK cell line. In one embodiment, the cell is an immune cell (e.g., NK, monocyte, macrophage, neutrophil, NK92 cell line etc.) or a stem cell (e.g., iPSC) and the immune cell or the stem cell is engineered to ectopically express one or more of CD3ε, CD3γ, CD3δ and CD3ƒ or variants thereof. In one embodiment, the cell is an immune cell or a stem cell (e.g., iPSC) and the immune cell (e.g., NK, monocyte, macrophage, neutrophil etc.) or the stem cell (e.g., iPSC) is engineered to ectopically express one or more CD3ε, CD3γ, and CD3δ or variants thereof. In an embodiment, the cells engineered to ectopically express the CD3ε, CD3γ, CD3δ and CD3ƒ also express one or more SARs of the disclosure. In an embodiment, the SARs of the disclosure comprise one or more TCR constant chains or fragments thereof (e.g., constant chains of TCRα, TCRβ, TCRγ, TCRδ etc.). Exemplary SARs comprising one or more TCR constant chains or fragments include SIR (SEQ ID NO: 2305), cTCR, Ab-TCR (SEQ ID NO: 2309 and 2310), STAR, HIT, TFP and TFPαβ and TFPγδ. In an embodiment, the expression of CD3ε, CD3γ, CD3δ and/or CD3 in a cell facilitates the functional expression of the SAR comprising one or more TCR constant chains or fragments.

[0715] In one embodiment, the cell is a stem cell and the stem cell is deficient in one or more of endogenous T cell receptor chains. In another embodiment, the cell is a stem cell in which one or more target antigens (e.g., MPL, CD33, CD123, CD19, etc.) of the SAR have been deleted or mutated to a form that is no longer recognized by the SAR. As an example, a SAR targeting CD19 is expressed in stem cells that have been made deficient in CD19 using CRISP/Cas9 or Zn finger nucleases so that the B cells produced by such stem cells are not eliminated by the T cells expressing the CD19-targeting SAR. Alternatively, a SAR targeting CD19 is expressed in stem cells in which the endogenous CD19 has been mutated to a form that is not targeted by SAR using CRISP/Cas9 or Zn finger nucleases so that the B cells produced by such stem cells are not eliminated by the T cells expressing the CD19-targeting SAR. In another embodiment, the SAR is expressed in immune effector cells and the stem cells from an autologous or an allogeneic donor are genetically engineered to either lack the expression of the SAR-target antigen or to express a mutated form of SAR target antigen which is not recognized by the SAR. For example, a SAR targeting CD19 is expressed in T cells that are infused into a patient along with autologous or allogeneic hematopoietic stem cells that have been made deficient in CD19 using CRISP/Cas9 or Zn finger nucleases so that the B cells produced by such stem cells are not eliminated by the T cells expressing the CD19-targeting SAR. Alternatively, a SAR targeting CD19 is expressed in T cells that are infused into a patient along with autologous or allogeneic hematopoietic stem cells in which the endogenous CD19 has been mutated to a form that is not targeted by SAR using CRISP/Cas9 or Zn finger nucleases so that the B cells produced by such stem cells are not eliminated by the T cells expressing the CD19-targeting SAR. A similar approach can be used to mutate or eliminate other endogenous antigens (e.g., MPL, CD33, CD123 etc.) in stem cells using shRNA, CRISP/Cas9 or Zn finger nucleases in subjects receiving SAR-T cells targeting these antigens for the treatment of specific diseases in which these antigens are expressed on disease associated or disease-causing cells.

[0716] Immune cells (e.g., T cells, NK cells, monocytes/macrophages, neutrophils etc.) or stem cells, can be obtained from a subject. The term “subject” is intended to include living organisms in which an immune response can be elicited (e.g., mammals). Examples of subjects include humans, monkeys, chimpanzees, dogs, cats, mice, rats, and transgenic species thereof. Immune cells (e.g., T cells, NK cells, monocytes/macrophages, neutrophils etc.) can be obtained from a number of sources, including peripheral blood mononuclear cells, bone marrow, lymph node tissue, cord blood, thymus tissue, tissue from a site of infection, ascites, pleural effusion, spleen tissue, and tumors. In an embodiment, the immune cells are obtained from a subject who has been administered a mobilization agent, such as a CXCR4 antagonist (e.g., Plerixafor). The immune cell could be tissue resident gamma-delta T cells, which can be cultured and expanded in vitro prior to expression of the SAR.

[0717] Immune cells (e.g., T cells, NK cells, monocytes/macrophages, neutrophils etc.) can be obtained by in vitro differentiation of stem cells. In an embodiment, the immune cells are obtained by in vitro differentiation of iPSC.

[0718] The immune cells used to express the SAR may be an autologous or an allogeneic immune cell.

[0719] Cells that express a SAR of the disclosure, including uTCR-SAR, are used in the treatment of disease.

[0720] The disclosure thus relates to methods for the prevention and/or treatment of a disease, such as a cancer, comprising administering to a subject a cell or cell population comprising a SAR as described herein, said method comprising administering, to a subject in need thereof, a pharmaceutically active amount of a cell and/or of a pharmaceutical composition of the disclosure.

[0721] The disclosure also relates to a SAR, a cell or cell population comprising a SAR as described herein for use in therapy. The disclosure also relates to a SAR or a cell comprising a SAR as described herein for use in the treatment of cancer. The disclosure also relates to the use of a SAR or a cell comprising a SAR as described herein in the manufacture of a medicament for the treatment of cancer.

[0722] In another aspect, the disclosure relates to a method for stimulating a T cell-mediated immune response to a target cell population or tissue in a subject, the method comprising administering to a subject an effective amount of a cell or cell population that expresses a SAR of the disclosure, wherein the antigen binding domain is selected to specifically recognize the target cell population or tissue.

[0723] In another aspect, the disclosure relates to a method of providing an anti-tumor immunity in a subject, the method comprising administering to the mammal an effective amount of a cell or cell population genetically modified to express a SAR of the disclosure, thereby providing an anti-tumor immunity in the subject.

[0724] In another aspect, the disclosure relates to a method for producing a genetically modified cell or cell population comprising expressing in said cell or cell population a SAR nucleic acid construct of the disclosure. The method may include introducing into the cell a nucleic acid as described herein (e.g., an in vitro transcribed RNA or synthetic RNA; an mRNA sequence encoding a SAR polypeptide as described herein). In embodiments, the RNA expresses the SAR polypeptide transiently. In one embodiment, the cell is a cell as described herein, e.g., an immune effector cell (e.g., T cells or NK cells, or cell population). Cells produced by such methods are also within the scope of the disclosure.

[0725] In another aspect, the disclosure relates to an ex vivo method for generating a population of cells for use in adaptive immunotherapy comprising transforming said cell with a SAR of the disclosure.

[0726] In certain aspects of the disclosure, immune effector cells, e.g., T cells or NK cells, can be obtained from a unit of blood collected from a subject using any number of techniques known to the skilled artisan, such as Ficoll™ separation. In one embodiment, cells from the circulating blood of an individual are obtained by apheresis. In one aspect, the cells are collected from a subject in whom the T and/or NK cells have been mobilized by administration of an agent. In some embodiments, the immune cells are collected from a donor who has been administered a CXCR4 antagonist (e.g., Plerixafor), a cytokine (e.g., G-CSF, GM-CSF or sargramostim, Neulasta or Pegfilgastrim), a beta2 agonist (e.g., epinephrine), a tyrosine kinase inhibitor (e.g., dasatinib), chemotherapy drug(s) (e.g., cyclophosphamide, doxorubicin etc.) either singly or in combination, prior to the collection of immune cells. In some embodiments, the donor is an autologous donor while in other embodiments, the donor is an allogeneic donor.

[0727] The apheresis product usually contains lymphocytes, including T cells, monocytes, granulocytes, B cells, NK cells, other nucleated white blood cells, red blood cells, and platelets. In one aspect, the cells collected by apheresis may be washed to remove the plasma fraction and, optionally, to place the cells in an appropriate buffer or media for subsequent processing steps. In one embodiment, the cells are washed with phosphate buffered saline (PBS). In an alternative embodiment, the wash solution lacks calcium and may lack magnesium or may lack many if not all divalent cations.

[0728] In another embodiment, a SAR-expressing effector cell described herein can further express an agent which enhances the activity of a SAR-expressing cell. In some embodiments, the agent is one that inhibits an inhibitory molecule. Non-limiting examples of inhibitory molecules include PD-1, PD-L1, CTLA-4, TIM-3, CEACAM (e.g., CEACAM-1, CEACAM-3 and/or CEACAM-5), LAG-3, VISTA, BTLA, TIGIT, LAIR1, CD160, 2B4 and TGFR beta. In one embodiment, the agent that inhibits an inhibitory molecule comprises a first polypeptide, e.g., a scFv or VHH or a receptor or a ligand fragment that binds an inhibitory molecule, associated with a second polypeptide that provides a positive signal to the cell, e.g., an intracellular signaling domain, such as 41BB, CD27, OX40, CD28, Dap10, CD2, CD5, ICAM-1, LFA-1, Lck, TNFR-1, TNFR-II, Fas, CD30, CD40 or combinations thereof) and/or a primary signaling domain (e.g., a CD3 zeta signaling domain). In one embodiment, the agent that inhibits an inhibitory molecule comprises a first polypeptide, e.g., a scFv or VHH fragment or a receptor or a ligand fragment that binds an inhibitory molecule, associated with a signaling chain described herein (e.g., CD16, NKp30, NKp44, and NKp46 etc.).

[0729] In another embodiment, the SAR-expressing cell described herein can further express an accessory module, e.g., an agent which modulate the activity of a SAR-expressing cell. Several examples of accessory modules that comprise of agents that can enhance or regulate the activity of a SAR-expressing cell are provided in SEQ ID NO: 3702-3725. For example, in one embodiment, the agent can be an agent which increases the expression and/or activity of CD3ƒ, CD36, CD3ε, CD3γ or combination thereof. In another embodiment, the agent can be an agent (e.g., vFLIP K13, vFLIP MC159, cFLIP-L, cFLIP-p22, HTLV1 Tax, HTLV2 Tax, 41BB or CD28) which provides costimulatory signal to SAR expressing cells. In another embodiment, the agent can be an agent (e.g., FKBPx2-K13, Myr-MYD88-CD40-Fv′-Fv etc.) which provides costimulatory signal to SAR expressing cells in an inducible manner. In another embodiment, the agent can be a cytokine or a chemokine (e.g., CD40L, IL2, IL-7, IL-15, IL12f or IL-21) that promotes the proliferation or persistence of SAR-expressing cells. In an exemplary embodiment, the agent is membrane anchored form of human IL2 (SEQ ID NO (DNA): 1330 and SEQ ID NO (PRT): 3724).

[0730] The disclosure also provides a therapeutic controls/accessory module that serves as a “multi-purpose switch”. In an exemplary embodiment, a multipurpose switch serves as a life-death switch for the purpose of adoptive cell therapy when ectopically expressed in a cell. In an embodiment, the multipurpose switch comprises an in-frame fusion of a first module comprising a receptor-binding domain to a second module that serves as a kill-switch and a third module that serves as a membrane anchoring module. In an embodiment, the first module binds to a receptor that is expressed on cell surface, i.e., it binds to the extracellular domain of a receptor. In an embodiment, the first module binds to a receptor which when bound transmits a pro-survival and/or proliferative signal to the cell. In an embodiment, the first module binds to the receptor in cis (i.e., bind to the receptor expressed on the same cell as the cell expressing the molecular switch). In an embodiment, the first module binds to the receptor in trans (i.e., bind to receptor expressed on a cell other than the cell expressing the molecular switch). In an embodiment, the first module binds to the receptor in cis and in trans. In an embodiment, the second and the third modules are derived from the same endogenous protein. In an embodiment, the second and the third module are derived from different endogenous proteins. In an embodiment, the second module comprises of the extracellular domain of an endogenous protein or a fragment thereof. In an embodiment, the second module can be used to induce death of the cells expressing the molecular switch. In an embodiment, the second module can be used to induce death of the cells expressing the molecular switch when bound by an agent. In an exemplary embodiment, the agent that induces death of cells expressing the molecular switch when bound to the second module is an antibody, a single domain antibody, a non-immunoglobulin antigen binding domain, an antibody drug conjugate, a bispecific antibody or a fragment thereof. In an embodiment, the second module can be used to selectively enrich or deplete cells expressing the molecular switch. In an embodiment, the second module can be used to selectively detect, enrich and/or deplete cells expressing the molecular switch when bound by an agent. In an exemplary embodiment, the agent that can be used to selectively detect, enrich and/or deplete the cells expressing the molecular switch when bound to the second module is an antibody, a single domain antibody, a non-immunoglobulin antigen binding domain or a fragment thereof. In an embodiment, the molecular switch is used to selectively detect, enrich and/or deplete cells ex vivo. In an embodiment, the molecular switch is used to selectively deplete cells in vivo. In an embodiment, the agent (i.e., an antibody, antibody drug conjugate, bispecific antibody, a non-immunoglobulin antigen binding domain or a fragment thereof) that is used to detect, deplete or enrich cells expressing the molecular switch has been approved for human administration by the FDA. Exemplary agents that have been approved by FDA for human administration are known in the art and include, but are not limited to, Rituximab, Herceptin, Erbitrux, adcetris, Enbrel etc. In an embodiment, the agent that is used to detect, deplete or enrich cells expressing the molecular switch is approved by the FDA for ex vivo clinical use. An exemplary such agent is an antibody against CD34 that has been approved by the FDA to be used in conjunction with the clinically approved CliniMACS CD34 system (Miltenyi). An exemplary multipurpose switch is Synth-IL2-Nde-tBCMA-L244ter (SEQ ID NO (DNA):7152 and SEQ ID NO (PRT): 7843) and comprises the IL2 receptor binding domain of IL2 fused in frame to the extracellular-domain and the transmembrane domain of BCMA. This multipurpose switch when expressed in immune cells (e.g., T cells or NK cells etc.) provides them with a survival signal by binding to the IL2 receptor through the N-terminal module comprising IL2. The second module of this multipurpose switch comprises the extracellular domain of BCMA which is recognized by BCMA-binding agents (e.g., BCMA antibodies) and can be used for the detection, selective depletion and/or enrichment of transgene (e.g., SAR) expressing cells. The extracellular domain of BCMA comprising the second module can be also used for selective suicide of transgene (e.g., SAR) expressing cells by the use of BCMA-targeted agents, such as an antibody or an antibody drug-conjugates targeting BCMA. The third module in this molecular switch comprises of the hinge and/or transmembrane domain of BCMA and serves to anchor the switch to the cell membrane. In an embodiment, the second module is a synthetic module comprising one or more copies of an epitope or a mimotope. In an embodiment, the epitope is present in the extracellular domain of an endogenous protein. In an embodiment, the mimotope mimics an epitope that is present in the extracellular domain of an endogenous protein. An exemplary synthetic module comprising one or more copies of an epitope or a mimotope is RQR8, a module harboring a CD34 epitope and two CD20 mimotopes. The RQR8 module allows selection with the clinically approved CliniMACS CD34 system (Miltenyi). Further, the construct binds the widely used pharmaceutical antibody rituximab, resulting in selective deletion of transgene-expressing cells. Additional exemplary multi-purpose molecular switches include fusion proteins comprising IL2 or its variants and tBCMA (SEQ ID NO (DNA): 7151-7155), IL15 or its variants and tBCMA (SEQ ID NO (DNA):7156-7157), IL2 and its variants and tHer2, IL2 and its variants and tEGFR, IL2 and its RQR8 etc. As the multipurpose switches are modular in format, one module can be replaced with a different module. Thus, the IL2 module can be replaced by a different cytokine (e.g., IL15, IL18, IL21 etc.) These multipurpose proteins provide a pro-survival signal through their cytokine moiety (e.g., IL2, IL15, IL18, IL21 etc.) but can be used to kill-off the cells by the use of an agent (e.g., an antibody) that binds to the second module (e.g., RQR3, tBCMA, tHer2, tEGFR, tCD19 etc.), thereby acting as a suicide gene that allow selective deletion of administered T cells in the face of toxicity. The second module (e.g., RQR3, tBCMA, tHer2, tEGFR, tCD19 etc.) can be also used as a marker for measurement of transduction and to allow selection of transduced cells.

[0731] In another embodiment, the agent can be an agent that inhibits an inhibitory molecule. Inhibitory molecules, e.g., PD1, can, in some embodiments, decrease the ability of a SAR-expressing cell to mount an immune effector response. In another embodiment, the agent can be a scFV targeting PD1 or CTLA4. In one embodiment, the agent comprises a first polypeptide, e.g., of an inhibitory molecule such as PD1, PD-L1, CTLA4, TIM3, CEACAM (e.g., CEACAM-1, CEACAM-3 and/or CEACAM-5), LAG3, VISTA, BTLA, TIGIT, LAIR1, CD160, 2B4 or TGFR beta, or a fragment of any of these (e.g., at least a portion of an extracellular domain of any of these), and a second polypeptide which is an intracellular signaling domain described herein (e.g., comprising a costimulatory domain (e.g., 41BB, CD27 or CD28, e.g., as described herein) and/or a primary signaling domain (e.g., a CD3 zeta signaling domain described herein). In one embodiment, the agent comprises a first polypeptide of PD1 or a fragment thereof (e.g., at least a portion of an extracellular domain of PD1), and a second polypeptide of an intracellular signaling domain described herein (e.g., a CD28 signaling domain described herein and/or a CD3 zeta signaling domain described herein).

[0732] In one embodiment, the SAR-expressing effector cell described herein can further comprise a second SAR that may include a different antigen binding domain to the same or a different target. In some embodiments, the second SAR may target the same or a different cell type from the first SAR.

[0733] In one embodiment, the SAR-expressing effector cell described herein can further comprise a second SAR with the same or a different antigen binding domain, optionally the same or a different target. In some embodiments, the second SAR may target the same or a different cell type from the first SAR. The two SARs may have the same backbone or different backbones. In an exemplary embodiment, the two SARs may have the backbone of a CD16 SAR. In another exemplary embodiment, one SAR may have the backbone of a SIR while the second SAR may have the backbone of CD16 SAR. In another exemplary embodiment, one SAR may have the backbone of an Ab-TCR while the second SAR may have the backbone of a CD16 SAR. The nucleic acid and amino acid sequences of several exemplary SARs on different backbones are presented in Tables 32 and 34 of the provisional application. In one embodiment, the SAR includes an antigen binding domain to a target expressed on the same disease cell type (e.g., cancer) as the disease associated antigen. In one embodiment, the SAR expressing cell comprises a first SAR that targets a first antigen, and a 2^{nd} SAR (or a 2^{nd} generation CAR) that targets a second, different, antigen and includes an intracellular signaling domain having no primary signaling domain but a costimulatory signaling domain. While not wishing to be bound by theory, placement of a costimulatory signaling domain, e.g., 4-1BB, CD28, CD27, 2B4 or OX40, onto SAR (e.g., a 2^{nd} generation CAR), can modulate the SAR activity to cells where both targets are expressed. In one embodiment, the SAR expressing cell comprises i) a first disease associated antigen SAR (e.g., a CD16 SAR) that includes one or more antigen binding domains that bind a target antigen described herein, and one or two signaling chains, and ii) a 2^{nd} generation CAR or a TFPε that targets a different target antigen (e.g., an antigen expressed on that same disease associated (e.g., cancer) cell type as the first target antigen) and includes an antigen binding domain, a transmembrane domain and a primary signaling domain and a costimulatory domain. In another embodiment, the SAR expressing cell comprises a i) a first SAR (e.g., a CD16 SAR) that includes an antigen binding domain that binds a target antigen described herein, and one or two signaling chains and ii) a CAR that targets an antigen other than the first target antigen (e.g., an antigen expressed on the same cancer cell type as the first target antigen) and includes an antigen binding domain specific to the antigen, a transmembrane domain and a costimulatory signaling domain. This CAR construct lacks the CD3z domain. In yet another embodiment, the SAR expressing cell comprises i) a first disease associated antigen SAR (e.g., a CD16 SAR) that includes one or more antigen binding domains that bind a target antigen described herein, and one or two signaling chains, and ii) a CAR that targets a different target antigen (e.g., an antigen expressed on that same disease associated (e.g., cancer) cell type as the first target antigen) and includes an antigen binding domain, a transmembrane domain and a primary signaling domain but without a costimulatory domain.

[0734] In another exemplary embodiment, an immune cell may express two SARs one of which provides a costimulatory signal while the other provides a primary activation signal. In one embodiment, one SAR may have the backbone of a 4-1BB-based SAR while the second SAR may have the backbone of a CD16-based SAR. In another exemplary embodiment, one SAR may have the backbone of a CD28-based SAR while the second SAR may have the backbone of a CD16-based SAR. In another exemplary embodiment, one SAR may have the backbone of a OX40-based SAR while the second SAR may have the backbone of a CD16-based SAR. In another exemplary embodiment, one SAR may have the backbone of a 2B4 SAR while the second SAR may have the backbone of a CD16-based SAR.

[0735] It is to be understood that a SAR that can transmit an activation signal to an immune effector cell but may not have an ITAM containing activation domain. Such SARs may recruit a protein with an ITAM containing activation domain. Exemplary SARs that lack an ITAM containing activation domain include but are not limited to SARs with the backbone of CD16.

[0736] In one embodiment, the CAR comprises the antigen binding domain, a transmembrane domain and an intracellular signaling domain (such as but not limited to one or more intracellular signaling domain from 41BB, CD27, 2B4, OX40, CD28, Dap10, CD2, CD5, ICAM-1, LFA-1, Lck, TNFR-1, TNFR-II, Fas, CD30, CD40 or combinations thereof) and/or a primary signaling domain (such as but not limited to a CD3 zeta signaling domain).

[0737] In one embodiment, the SAR-expressing effector cell comprises a SAR described herein and an inhibitory CAR. In one embodiment, the inhibitory CAR comprises an antigen binding domain that binds an antigen found on normal cells but not cancer cells. In one embodiment, the inhibitory CAR comprises an antigen binding domain, a transmembrane domain and an intracellular domain of an inhibitory molecule. For example, the intracellular domain of the inhibitory CAR can be an intracellular domain of any one of PD1, PD-L1, CTLA-4, TIM-3, CEACAM (e.g., CEACAM-1, CEACAM-3 and/or CEACAM-5), LAG-3, VISTA, BTLA, TIGIT, LAIR1, CD160, 2B4 or TGFR beta.

[0738] In certain embodiments, the antigen binding domain of the first SAR molecule (e.g., CD16 SAR, NKp30 SAR, NKp44 SAR, NKp46 SAR or DAP10 SAR etc.) comprises a scFv and the antigen binding domain of the 2^{nd} SAR molecule (e.g., CD16 SAR, NKp30 SAR, NKp44 SAR, NKp46 SAR or DAP10 SAR etc.) does not comprise a scFv. For example, the antigen binding domain of the first SAR molecule comprises a scFv and the antigen binding domain of the 2^{nd} SAR molecule comprises a camelid VHH domain.

[0739] In one embodiment, the disclosure provides an immune effector cell (e.g., T cell, NK cell) expressing a SAR comprising an antigen binding domain that binds to a tumor antigen as described herein, and a CAR comprising a PD 1 extracellular domain or a fragment thereof. In some embodiments, the cell further comprises an inhibitory molecule comprising an inhKIR cytoplasmic domain; a transmembrane domain, e.g., a KIR transmembrane domain; and an inhibitor cytoplasmic domain, e.g., an ITIM domain, e.g., an inhKIR ITIM domain.

[0740] The disclosure also provides a method comprising administering a SAR molecule, a cell expressing a SAR molecule or a cell comprising a nucleic acid encoding a SAR molecule to a subject. In one embodiment, the subject has a disorder described herein, e.g., the subject has cancer, infectious disease, allergic disease, degenerative disease or autoimmune disease, which expresses a target antigen described herein. In yet one embodiment, the subject has increased risk of a disorder described herein, e.g., the subject has increased risk of cancer, infectious disease, allergic disease, degenerative disease or autoimmune disease, which expresses a target antigen described herein. In one embodiment, the subject is a human. In another embodiment, the subject is an animal. In yet another embodiment, the subject is a companion animal such as a dog.

[0741] In one embodiment, the disclosure provides methods of treating or preventing a disease by providing to the subject in need thereof immune effector cells (e.g., T or NK cells) or stem cells that can give rise to immune effector cells that are engineered to express a targeted X-SIR, wherein X represents a disease associated antigen as described herein, and wherein the disease causing or disease-associated cells express said X antigen. Table 49 provides a list of different antigens and the exemplary diseases that can be prevented, inhibited or treated using immune effector cells expressing SARs targeting these antigens.

[0742] In another embodiment, the disclosure provides methods of treating or preventing cancer by providing to the subject in need thereof immune effector cells (e.g., T or NK cells) that are engineered to express a X-targeted SAR (or X-targeted SAR) described herein, wherein the cancer cells express antigen target “X”. In one embodiment, X is expressed on both normal cells and cancers cells but is expressed at lower levels on normal cells. In one embodiment, the method further comprises selecting a SAR that binds X with an affinity that allows the X-targeted SAR to bind and kill the cancer cells expressing X but less than 30%, 25%, 20%, 15%, 10%, 5% or less of the normal cells expressing X are killed, e.g., as determined by an assay described herein. For example, the Gluc release cytotoxicity assay described herein can be used to identify X-targeted SARs that target, e.g., the cancer cells. In one embodiment, the selected SAR has an antigen binding domain that has a binding affinity KD of about 10⁻⁴ M to 10⁻⁸ M, more commonly about 10⁻⁵ M to 10⁻⁷ M, and typically about 10⁻⁶ M or 10⁻⁷ M, for the target antigen. In one embodiment, the selected antigen binding domain has a binding affinity that is at least two-fold, five-fold, 10-fold, 20-fold, 30-fold, 50-fold, 100-fold or 1,000-fold less than a reference antibody, e.g., an antibody described herein and from which the binding domain of the SAR is derived.

[0743] In another embodiment, the disclosure provides methods of treating or preventing cancer by providing to the subject in need thereof immune effector cells (e.g., T cells) that are engineered to express a bispecific SAR (or AxB-targeted SAR) described herein, wherein A and B represent the two different antigens of targeted by the SAR. In an embodiment, antigen A is CD19 and antigen B is CD22 and the disease is B cell lymphoma or leukemia. In an embodiment, antigen A is CD19 and antigen B is CD20 and the disease is B cell lymphoma or leukemia. In an embodiment, antigen A is CD19 and antigen B is BCMA and the disease is B cell lymphoma or leukemia. In an embodiment, antigen A is CD19 and antigen B is CD38 and the disease is B cell lymphoma or leukemia. In an embodiment, antigen A is BCMA and antigen B is CD38 and the disease is a plasma cell disorder or primary effusion lymphoma (PEL). In an embodiment, antigen A is BCMA and antigen B is CS1/SLAMF7 and the disease is a plasma cell disorder or primary effusion lymphoma (PEL). In an embodiment, antigen A is CD123 and antigen B is MPL and the disease is acute myeloid leukemia, chronic myeloid leukemia, myeloproliferative disorder or myelofibrosis. n an embodiment, antigen A is CD123 and antigen B is CD33 and the disease is acute myeloid leukemia, chronic myeloid leukemia, or myeloproliferative disorder. In an embodiment, both antigen A and B are expressed on blood cells. In an embodiment, one antigen is expressed preferentially or exclusively on blood lineage cells (e.g., normal B cells or lymphoma cells) while the other antigen is expressed preferentially or exclusively on non-blood cells (e.g., prostate cancer cells). In an exemplary embodiment, antigen A is PSMA and antigen B is CD19 and the disease is prostate cancer. In such a construct targeting of CD19 provides proliferative signal to the SAR cells by targeting of CD19 expressed on the normal B cells while targeting of PSMA induce killing of prostate cancer cells.

[0744] In another embodiment, the disclosure provides methods of treating or preventing a disease by providing to the subject in need thereof immune effector cells (e.g., T or NK cells) or stem cells that can give rise to immune effector cells that are engineered to express a CD19xC20 bispecific SAR, wherein the disease causing or disease associated cells express CD19 and CD20. In one embodiment, the disease to be treated or prevented is a cancer or immune disease. In one embodiment, the cancer to be treated or prevented is Acute B cell leukemia, chronic B cell leukemia, or B cell lymphoma.

[0745] In another embodiment, the disclosure provides methods of treating or preventing a disease by providing to the subject in need thereof immune effector cells (e.g., T or NK cells) or stem cells that can give rise to immune effector cells that are engineered to express a CD19xC22 bispecific SAR, wherein the disease causing or disease associated cells express CD19 and CD22. In one embodiment, the disease to be treated or prevented is a cancer or immune disease. In one embodiment, the cancer to be treated or prevented is Acute B cell leukemia, chronic B cell leukemia, or B cell lymphoma.

[0746] In another embodiment, the disclosure provides methods of treating or preventing a disease by providing to the subject in need thereof immune effector cells (e.g., T or NK cells) or stem cells that can give rise to immune effector cells that are engineered to express a CD19xC22xCD20 trispecific SAR, wherein the disease causing or disease associated cells express CD19, CD22 and CD20. In one embodiment, the disease to be treated or prevented is a cancer or immune disease. In one embodiment, the cancer to be treated or prevented is Acute B cell leukemia, chronic B cell leukemia, or B cell lymphoma.

[0747] In another embodiment, the disclosure provides methods of treating or preventing a disease by providing to the subject in need thereof immune effector cells (e.g., T or NK cells) or stem cells that can give rise to immune effector cells that are engineered to express a BCMAxCD38 bispecific SAR, wherein the disease-causing or disease associated cells express BCMA and CD38. In one embodiment, the disease to be treated or prevented is a cancer or immune disease. In one embodiment, the cancer to be treated or prevented is plasma cell disorder (e.g., plasma cell leukemia, myeloma.

[0748] In another embodiment, the disclosure provides methods of treating or preventing a disease by providing to the subject in need thereof immune effector cells (e.g., T or NK cells) or stem cells that can give rise to immune effector cells that are engineered to express CD5-SAR, wherein the disease-causing or disease associated cells express CD5. In one embodiment, the disease to be treated or prevented is a cancer or immune disease. In one embodiment, the cancer to be treated or prevented is T cell leukemia or T cell lymphoma. In one embodiment, the immune disorder to be treated or prevented is multiple sclerosis, rheumatoid arthritis, ankylosing spondylitis, inflammatory Bowel Disease, Diabetes Mellitus, Graft vs host disease or autoimmune Thyroiditis.

[0749] In another embodiment, the disclosure provides methods of treating or preventing a disease by providing to the subject in need thereof immune effector cells (e.g., T or NK cells) or stem cells that can give rise to immune effector cells that are engineered to express TCRB1-SAR, wherein the disease-causing or disease associated cells express TCRB1 (T cell receptor Beta1 chain). In one embodiment, the disease to be treated or prevented is a cancer or immune disease. In one embodiment, the cancer to be treated or prevented is T cell leukemia or T cell lymphoma. In one embodiment, the immune disorder to be treated or prevented is multiple sclerosis, rheumatoid arthritis, ankylosing spondylitis, inflammatory Bowel Disease, Diabetes Mellitus, Graft vs host disease or autoimmune Thyroiditis.

[0750] In another embodiment, the disclosure provides methods of treating or preventing a disease by providing to the subject in need thereof immune effector cells (e.g., T or NK cells) or stem cells that can give rise to immune effector cells that are engineered to express TCRB2-SIR, wherein the disease-causing or disease associated cells express TCRB2 (T cell receptor Beta2 SAR). In one embodiment, the disease to be treated or prevented is a cancer or immune disorder. In one embodiment, the cancer to be treated or prevented is T cell leukemia or T cell lymphoma. In one embodiment, the immune disorder to be treated or prevented is multiple sclerosis, rheumatoid arthritis, ankylosing spondylitis, inflammatory Bowel Disease, Diabetes Mellitus, Graft vs host disease or autoimmune Thyroiditis.

[0751] In another embodiment, the disclosure provides methods of treating or preventing a disease by providing to the subject in need thereof immune effector cells (e.g., T or NK cells) or stem cells that can give rise to immune effector cells that are engineered to express T cell receptor gamma-delta-SIR, wherein the disease causing or disease associated cells express T cell receptor gamma-delta. In one embodiment, the disease to be treated or prevented is a cancer or immune disorder. In one embodiment, the cancer to be treated or prevented is T cell leukemia or T cell lymphoma. In one embodiment, the immune disorder to be treated or prevented is multiple sclerosis, rheumatoid arthritis, ankylosing spondylitis, inflammatory bowel disease, diabetes mellitus, Graft vs host disease or autoimmune Thyroiditis.

[0752] In another embodiment, the disclosure provides methods of treating or preventing a disease by providing to the subject in need thereof immune effector cells (e.g., T or NK cells) or stem cells that can give rise to immune effector cells that are engineered to express a SAR encoding CD4-DC-SIGN. In one embodiment, the disease to be treated or prevented is HIV1/AIDS.

[0753] In another embodiment, the disclosure provides methods of treating or preventing an autoimmune disease by providing to the subject in need thereof immune effector cells (e.g., T or NK cells) or stem cells that can give rise to immune effector cells that are engineered to express a SAR encoding the autoantigen or a fragment thereof. In one embodiment, the autoimmune disease is diabetes mellitus, rheumatoid arthritis, multiple sclerosis, pemphigus vulgaris, paraneoplastic pemphigous, glomerulonephritis, ankylosing spondylitis, Ulcerative Colitis or Crohn's disease. In one aspect, the disease is pemphigus vulgaris, and the antigen binding domain of the SAR comprises of extracellular domain of Desmoglein 3 (Dsg3).

[0754] In another embodiment, the disclosure provides methods of treating or preventing a cancer, infection, autoimmune or allergic diseases by providing to the subject in need thereof immune effector cells (e.g., T or NK cells) or stem cells that can give rise to immune effector cells that are engineered to express a SAR encoding the extracellular domain of a naturally occurring receptor (e.g., CD16, CD64, NKp44, NKp30, NKp46, NKG2D etc.) or a fragment thereof along with one or more agents (e.g., an antibody, antibody fragment, antigen binding domain, non-Immunoglobulin antigen binding domain fragment, an autonomous antigen binding domain, a bispecific engager, a bispecific T cell engager or a BiTE, a bispecific Killer engager or a BiKE, a trispecific engager, a trispecific T cell engager, or a trispecific Killer engager or a TriKE etc.) that bind to the naturally occurring receptor comprising the SAR and also bind an antigen expressed on the disease associated cells. In an embodiment, the SAR comprise the extracellular domain of an Fc receptor (e.g., CD16 or CD69 etc.) and SAR-expressing cells are administered with one or more agents (e.g., antibody, an antibody fragment or non-Immunoglobulin antigen binding domain) that binds to the Fc receptor. In an exemplary embodiment, the SAR comprise the extracellular domain of a naturally occurring receptor (e.g., NKp30, NKp44, NKp46, NKG2D or NKG2C) and SAR-expressing cells are administered with one or more agents (e.g., BiKE, TRiKE, BiTE) that bind to the extracellular domain of the naturally occurring receptor. In an exemplary embodiment, the SAR comprises the extracellular domain of NKp46 and is administered with a bispecific killer engager (BiKE) or trispecific killer engager (TRiKE) that binds to NKp46 and CD19 so as to target CD19-expressing cells. In an exemplary embodiment, the SAR comprises the extracellular domain of NKp46 and is administered with a bispecific killer engager (BiKE) that binds to NKp46 and Mesothelin so as to target Mesothelin-expressing cells. In one aspect the disease associated cell is a cancer cell, an infected cell, or a plasma cell or a B cell or a T cell.

[0755] In one aspect, the agent (e.g., antibody, BiKE, TRiKE or a fragment thereof) is bound to SAR expressing cells ex vivo prior to administration of SAR cells to the subject. In one aspect, the agent (e.g., antibody, BiKE, TRiKE or a fragment thereof) is administered in vivo. In one aspect, the agent (e.g., antibody, BiKE, TRiKE or a fragment thereof) is administered before, concurrently with or after the infusion of SAR-expressing cells. In one aspect, a single dose of the agent is administered whereas in other aspects multiple doses of the agent (e.g., antibody, BiKE, TRiKE or a fragment thereof) are administered. In one aspect, multiple types of agents are administered. In one aspect, the agent (e.g., antibody, BiKE, TRiKE or a fragment thereof) targets a single antigen. In one aspect, the one or more agents (e.g., antibody, BiKE, TRiKE or a fragment thereof) target multiple antigens. In an exemplary embodiment, the SAR comprises the extracellular domain of NKp44 and a SAR expressing cell is administered with a bispecific killer engager (BiKE) or trispecific killer engager (TRiKE) that binds to NKp46 and CD19 so as to target CD19-expressing cells. In an exemplary embodiment, the SAR comprises the extracellular domain of NKp44 and a SAR expressing cell is administered with a trispecific killer engager (TRiKE) that binds to NKp46 and a co-stimulatory receptor (e.g., CD28 or 4-1BB) on the SAR-expressing effector cells and CD19 on tumor cells so as to target and kill CD19-expressing tumor cells. In an exemplary embodiment, the SAR comprises the extracellular domains of both NKp46 and CD16 and SAR expressing cell is administered with a trispecific killer engager (TRiKE) that binds to NKp46, CD16 and Mesothelin so as to target Mesothelin-expressing cells with increased efficacy. Exemplary BiKE and TRiKE are described in Gauthier L et al, CELL, (2019), 117, 1701. Other BiKE and TRiKE are known in the art and can be used in alternate embodiments of the disclosure. In one aspect the disease associated cell is a cancer cell, an infected cell, or a plasma cell or a B cell or a T cell.

[0756] In another embodiment, the disclosure provides methods of treating or preventing a cancer, infection, autoimmune or allergic diseases by providing to the subject in need thereof immune effector cells (e.g., T or NK cells) or stem cells that can give rise to immune effector cells that are engineered to express a universal SAR encoding CD16 or a deletion- or point-mutant fragment thereof along with an antibody or an antibody fragment that binds to the CD16 domain of the SAR and an antigen expressed on the disease associated cells. In one aspect the disease associated cell is a cancer cell, an infected cell, or a plasma cell or a B cell or a T cell.

[0757] In another embodiment, the disclosure provides methods of treating or preventing a cancer, infection, autoimmune or allergic diseases by providing to the subject in need thereof immune effector cells (e.g., T cells) or stem cells that can give rise to immune effector cells that are engineered to express a universal SAR encoding an immunoglobulin binding receptor (e.g., CD16, CD64 etc.) or a deletion- or point-mutant fragment thereof. The SAR-expressing immune effector cells are administered to the patient along with one or more antibodies or antibody fragments that bind to the immunoglobulin binding domain of the SAR receptor and to one or more antigens expressed on the disease associated cells. In one aspect, the antibody is bound to SAR expressing cells ex vivo prior to administration of SAR cells to the subject. In one aspect, the antibody is administered in vivo. In one aspect, the antibody or antibody fragment is administered before, concurrently with or after the infusion of SAR-expressing cells. In one aspect, multiple doses of the antibody or antibody fragments are administered. In one aspect, multiple types of antibody or antibody fragments are administered. In one aspect, the antibody or antibody fragments target a single antigen. In one aspect, the antibody or antibody fragments target multiple antigens. An exemplary antibody is Rituximab, Herceptin, Erbitrux etc. In one aspect the disease associated cell is a cancer cell, an infected cell, or a plasma cell or a B cell or a T cell.

[0758] In another embodiment, the disclosure provides methods of treating or preventing a cancer, infection, autoimmune or allergic diseases by providing to the subject in need thereof immune effector cells (e.g., T cells) or stem cells that can give rise to immune effector cells that are engineered to express both a universal SAR encoding an immunoglobulin binding receptor or a deletion- or point-mutant fragment thereof joined to a signaling chain described herein (e.g., SEQ ID NO: 3914-3958) and an antigen binding domain (e.g., a scFv, vHH, vL, vH, or a non-immunoglobulin antigen binding domain, BiTE, BiKE, TRiKE). The SARs-expressing immune effector cells are administered to the patient along with one or more antigen binding domains that bind to the immunoglobulin binding domain of the SAR receptor and with one or more antigens expressed on the disease associated cells. In one aspect, the antigen binding domain is bound to SAR expressing cells ex vivo prior to administration of SAR cells to the subject. In one aspect, the antigen binding domain is administered in vivo. In one aspect, the antibody or antibody fragment is administered before, concurrently with or after the infusion of SAR-expressing cells. In one aspect, multiple doses of the antigen binding domain are administered. In one aspect, multiple types of antigen binding domains are administered. In one aspect, the antigen binding domain targets a single antigen. In one aspect, the antigen binding domain targets multiple antigens. In one aspect the disease associated cell is a cancer cell, an infected cell, or a plasma cell or a B cell or a T cell.

[0759] In another embodiment, the disclosure provides methods of treating or preventing a cancer, infection, autoimmune or allergic diseases by providing to the subject in need thereof immune effector cells (e.g., T cells, NK cells and/or macrophage etc.) or stem cells that can give rise to immune effector cells that are engineered to express a universal SAR encoding an immunoglobulin receptor or a deletion- or point-mutant fragment thereof thereof along with one or more antibodies or an antibody fragments that bind to the above receptor and one or more antigens expressed on the disease associated cells.

[0760] In another embodiment, the disclosure provides methods of treating or preventing a cancer, infection, autoimmune or allergic diseases by providing to the subject in need thereof immune effector cells (e.g., T, NK cells and/or macrophages) or stem cells that can give rise to immune effector cells that are engineered to express both a universal SAR encoding CD16 or a deletion- or point-mutant (e.g., F158V mutant) fragment thereof joined to a T cell receptor constant chain and a SAR encoding an antigen binding domain (e.g., a scFv, vHH, vL, vH, or a non-immunoglobulin antigen binding domain) joined to a T cell receptor constant chain. The SARs-expressing immune effector cells are administered to the patient along with one or more antibody or an antibody fragment that binds to the CD16 domain of the SAR and one or more antigens expressed on the disease associated cells. In one aspect the disease associated cell is a cancer cell, an infected cell, or a plasma cell or a B cell or a T cell. In an embodiment, the antibody is administered in vivo. In an embodiment, the antibody is bound to CD16-SAR cells ex vivo. In an embodiment, multiple infusions of the antibody are administered.

[0761] In another embodiment, the disclosure provides methods of treating or preventing a cancer, infection, autoimmune or allergic diseases by providing to the subject in need thereof immune effector cells (e.g., NK or T cells) or stem cells that can give rise to immune effector cells that are engineered to express a universal SAR encoding CD16 or a deletion- or point-mutant fragment (e.g., F158V mutant) thereof along with one or more antibody or an antibody fragments that binds to the CD16 domain of the SAR and one or more antigens expressed on the disease associated cells. In one aspect the disease associated cell is a cancer cell, an infected cell, or a plasma cell or a B cell or a T cell.

[0762] In another embodiment, the disclosure provides methods of treating or preventing a cancer, infection, autoimmune or allergic diseases by providing to the subject in need thereof immune effector cells (e.g., NK or T cells) that are engineered to express a SAR encoding NKG2D receptor or a deletion- or point-mutant fragment thereof (e.g., SEQ ID NO: 3407 and 3435). In an embodiment, the NKG2D mutant is NKG2D-AF-G4Sx3-NKG2D-AF (SEQ ID NO: 3407). In an embodiment, the NKG2D mutant is NKG2D-YA-G4Sx3-NKG2D-YA (SEQ ID NO: 3435). In an embodiment, the subject is administered immune effector cells expressing the SAR expressing NKG2D-AF-G4Sx3-NKG2D-AF (SEQ ID NO: 3407) along with protein comprising an antigen binding domain (e.g., scFv, vHH, FHVH etc.) in fusion with ULBP2R. An exemplary protein comprising BCMA-93-FHVH in fusion with ULBP2R is presented in SEQ ID NO: 5431. In another embodiment, the subject is administered immune effector cells expressing the SAR expressing NKG2D-YA-G4Sx3-NKG2D-YA (SEQ ID NO: 3435) along with protein comprising an antigen binding domain (e.g., scFv, vHH, FHVH etc.) in fusion with ULBP2-S3. An exemplary protein comprising BCMA-93-FHVH in fusion with ULBPP2-S3 is presented in SEQ ID NO: 5432. In one aspect the disease associated cell is a cancer cell, an infected cell, or a plasma cell or a B cell or a T cell.

[0763] In another embodiment, the disclosure provides methods of treating or preventing a disease by providing to the subject in need thereof immune effector cells (e.g., T or NK cells) or stem cells that can give rise to immune effector cells that are engineered to express CD19-Targeted-SAR. In one aspect the disease is an immune or allergic disease.

[0764] In another embodiment, the disclosure provides methods of treating or preventing a disease by providing to the subject in need thereof immune effector cells (e.g., T or NK cells) that are engineered to express CD20-TARGETED-SAR. In one aspect the disease is an immune or allergic disease.

[0765] In another embodiment, the disclosure provides methods of treating or preventing a disease by providing to the subject in need thereof immune effector cells (e.g., T or NK cells) that are engineered to express CD22-TARGETED-SAR. In one aspect the disease is an immune or allergic disease.

[0766] In another embodiment, the disclosure provides methods of treating or preventing a cancer, infection, autoimmune or allergic diseases by providing to the subject in need thereof immune effector cells (e.g., T or NK cells) or stem cells that can give rise to immune effector cells that are engineered to express a FITC-SAR along with a FITC-labelled antibody or an antibody fragment or an antibody fragment or a receptor or a ligand or a non-Immunoglobulin scaffold that binds to an antigen expressed on the disease associated cells. In one aspect the disease associated cell is a cancer cell, an infected cell, or a plasma cell or a B cell or a T cell.

[0767] In another embodiment, the disclosure provides methods of treating or preventing a cancer, infection, autoimmune or allergic diseases by providing to the subject in need thereof immune effector cells (e.g., T or NK cells) or stem cells that can give rise to immune effector cells that are engineered to express an avidin-SAR along with a Biotin-labelled antibody or an antibody fragment or an antibody fragment or a receptor or a ligand or a non-Immunoglobulin scaffold that binds to an antigen expressed on the disease associated cells. In one aspect the disease associated cell is a cancer cell, an infected cell, or a plasma cell.

[0768] In another embodiment, the disclosure provides methods of treating or preventing a cancer, infection, autoimmune or allergic diseases by providing to the subject in need thereof immune effector cells (e.g., T or NK cells) or stem cells that can give rise to immune effector cells that are engineered to express an Streptag-SAR along with a Streptag-containing antibody or an antibody fragment or a receptor or a ligand or a non-Immunoglobulin scaffold that binds to an antigen expressed on the disease associated cells. In one aspect the disease associated cell is a cancer cell, an infected cell, or a plasma cell.

[0769] In another embodiment, the disclosure provides methods of treating or preventing a disease by providing to the subject in need thereof immune effector cells (e.g., T or NK cells) that are engineered to express IgE-SAR whose antigen binding domain comprises of an antibody or antibody fragment that binds to IgE. In one aspect the disease is an immune or allergic disease.

[0770] In another embodiment, the disclosure relates to treatment of a subject in vivo using a PD1-SAR (i.e., a SAR containing the extracellular domain of PD1 as its antigen binding domain) such that growth of cancerous tumors is inhibited. A PD1-SAR may be used alone to inhibit the growth of cancerous tumors. Alternatively, PD1-SAR may be used in conjunction with other SARs, CARs, immunogenic agents, standard cancer treatments, or other antibodies. In one embodiment, the subject is treated with a PD1-SAR and an X-SAR described herein. In another embodiment, a PD1-SAR is used in conjunction with another SAR or CAR, e.g., a SAR or a CAR described herein, and a kinase inhibitor, e.g., a kinase inhibitor described herein.

[0771] In another embodiment, the disclosure relates to treatment of a subject in vivo using an X-SAR and a PD1-CAR or a CTL4-CAR such that growth of cancerous tumors is inhibited. In one embodiment, the subject is treated with a PD1-CAR or a CTLA4-CAR and an X-SAR described herein.

[0772] Certain cells of the immune system demonstrate cytotoxic activity against particular target cells. Cytotoxic T-lymphocytes express T-cell receptors (TcRs) that are capable of specifically recognizing antigen-derived peptides bound to MHC class I molecules. By contrast, natural killer (NK) cells are not MHC-restricted and do not require antigen presentation by MHC molecules to exert their killing effect. They are able to recognize stressed cells in the absence of peptide-loaded MHC, and to kill cells lacking MHC. NK cells thus play an important role in innate immunity, as these “non-MHC” cells would otherwise not be detected and destroyed by other immune cells.

[0773] NK cells (also defined as ‘large granular lymphocytes’) represent a cell lineage differentiated from the common lymphoid progenitor (which also gives rise to B lymphocytes and T lymphocytes). Unlike T-cells, NK cells do not naturally comprise CD3 at the plasma membrane. Importantly, NK cells do not express a TCR and typically also lack other antigen-specific cell surface receptors (as well as TCRs and CD3, they also do not express immunoglobulin B-cell receptors, and instead typically express CD16 and CD56. Thus, NK cells are differentiated by their CD3-, CD56+ phenotype. NK cell cytotoxic activity does not require sensitization but is enhanced by activation with a variety of cytokines including IL-2. NK cells are generally thought to lack appropriate or complete signaling pathways necessary for antigen-receptor-mediated signaling, and thus are not thought to be capable of antigen receptor-dependent signaling, activation and expansion.

[0774] A number of T-cell-based therapies for treating cancer have been developed. TCR based cell therapy approaches have shown promise in some studies but suffer from the drawback of MHC restriction, i.e., the TCRs used must be matched to a patient's immune type. Unlike a TCR, a CAR does not need to MHC-matched to the recipient. However, very few cancer-specific surface antigens have thus far been identified which can be used as suitable targets for CARs, and thus the use of CARs in cancer therapies is limited at present. All adoptive cell therapy approaches involving the modification of a T-cell with a TCR or a CAR require the isolation and modification of T-cells from a patient, or from a tissue-type matched donor, which increases the time needed for manufacturing and cost of the procedure. Alternative methods seeking to overcome the above limitations of ACT utilize cytotoxic NK cells, as described for example in WO 98/49268. NK cells, however, lack the expression of CD3ε, y, 6 chains and do not express TCR in their native state. NK92 cell line that has been engineered to ectopically express CD3ε, y, 6 and chains has been shown to support TCR expression. However, this method is cumbersome.

[0775] The disclosure provides a novel TCR, designated universal TCR (or uTCR-SAR). In an embodiment, uTCR-SAR is not dependent on CD3 chains for expression and can be expressed in any cell. In an embodiment, uTCR-SAR resembles a physiological TCR in possessing two chains. In an embodiment, the antigen binding domain of uTCR comprises variable domains (Va/Vα and Vb/Vβ or Vg/Vγ and Vd/Vδ) derived from a TCR. In an embodiment, a uTCR lacks the complete TCR constant chains. In an embodiment, one or both chains of a uTCR lack the transmembrane and/or cytosolic domain of a TCR constant chain. In an embodiment, one or both chains of a uTCR lack the hinge, transmembrane and/or cytosolic domain of a TCR constant chain.

[0776] The disclosure aims to provide cancer-specific killer cells, based on NK cells, for universal use, meaning that the cells do not have to be matched to the immune type of the subject to be treated, as is presently required for T-cell-based therapies, but they may nonetheless be tailored to the specific immune- and cancer-type of the subject, according to need. Thus, the universal killer cells may be used for personalized medicine.

[0777] In an embodiment, the subject is administered different cells expressing SAR of the disclosure. In an embodiment, the SAR is expressed in a stem cell (e.g., hematopoietic stem cell or an iPSC) which is differentiated into multiple different lineages (e.g., T cell, NK cell, macrophage, granulocyte, dendritic cells etc.) of SAR-expressing cells. The natural T cell receptor and several next generation CAR platforms (e.g., SIR, Ab-TCR, HIT, or TFP etc.) can be functionally expressed in only T cells. An advantage of the uTCR-SAR of the disclosure is that it can be expressed in any cell type. In an embodiment, the SAR (e.g., uTCR-SAR) is expressed in a stem cell (e.g., hematopoietic stem cell or an iPSC) which is differentiated ex vivo into multiple different lineages (e.g., T cell, NK cell, macrophage, granulocyte, dendritic cells etc.) of uTCR-SAR-expressing cells. The subject is then administered a population of SAR (e.g., uTCR-SAR) expressing cells. In an alternate embodiment, the SAR (e.g., uTCR-SAR) is expressed in a hematopoietic stem cell, which are then administered to a subject. The SAR expressing hematopoietic stem cells differentiate in vivo into multiple lineages of SAR-expressing immune cells (e.g., T cells, NK cell, macrophage, granulocyte, dendritic cells etc.).

[0778] The disclosure also provides that next generation chimeric receptors such as SIR, cTCR, Ab-TCR, TFPαβ and TFPγδ demonstrates poor or negligible expression in NK cells, monocytes/macrophages, dendritic cells and neutrophils. The disclosure provides a method for the expression of SIR, cTCR, Ab-TCR, TFPαβ and TFPγδ in NK cells, NK cell lines (e.g., NK92 and its derivatives), monocytes/macrophages, monocyte cell lines, and neutrophils. The method involves ectopic expression of one or more chains of CD3 complex in NK cells, monocytes/macrophages, dendritic cells and neutrophils. In an alternate embodiment, the method involves ectopic expression of one or more chains of CD3 complex in the stem cells (e.g., iPSC, embryonic stem cells, pluripotent stem cells etc.) that can be differentiated to generate NK cells, monocytes/macrophages, dendritic cells and neutrophils. In an embodiment, the chains of CD3 complex that can be ectopically expressed in NK cells, monocytes/macrophages, dendritic cells, neutrophils and stem cells include CD3ε, CD3γ, CD3δ and CD3ƒ. The SEQ ID NOs of exemplary CD3ε, CD3γ, CD3δ and CD3ƒ chains that can be ectopically expressed in the NK cells, monocytes/macrophages, dendritic cells, neutrophils and stem cells to facilitate the functional expression of SIR, cTCR, Ab-TCR, TFPαβ and TFPγδ are provided in Table 18 of the provisional application. In an embodiment, CD3ε, CD3γ, CD3δ and CD3ƒ chains are ectopically expressed in in the NK cells, monocytes/macrophages, dendritic cells, neutrophils and stem cells to facilitate the functional expression of SIR, cTCR, Ab-TCR, TFPαβ and TFPγδ. In an alternate embodiment, CD3ε, CD3γ, and CD3δ chains are ectopically expressed in in the NK cells, monocytes/macrophages, dendritic cells and neutrophils cells to facilitate the functional expression of SIR, cTCR, Ab-TCR, TFPαβ and TFPγδ. In an embodiment, one of more chains of the CD3 complex are expressed using a single vector. Exemplary vectors are represented by SEQ ID NO: 1331 and 1332. In an alternate embodiment, the one of more chains of the CD3 complex are expressed using more than one vector.

[0779] In some aspects, the SAR expressing cells (e.g., immune effector cells, stem cells or iPSC etc.) can be generated using techniques known in the art for generation of different CAR-modified cells (e.g., T cells, NK cells, NKT, g-NK, CIK cells, macrophage, dendritic cells, granulocytes, stem cells, iPSC etc.). Unless stated otherwise, the techniques known in the art for the manufacturing and administration of adoptive cell therapy products can be used for generation of SAR-encoding vectors, for harvesting, isolation and culture of different cell types for genetic modification by SAR-encoding vectors, for expansion, storage, transport, thawing, potency testing, sterility testing and administration of SAR-expressing cells.

[0780] A SAR can be introduced into a target cell (e.g., T cell, NK cell, hematopoietic cell etc.) ex vivo and/or in vivo. A SAR expressing effector cell can be expanded ex vivo prior to administration to a subject. In an embodiment, a SAR expressing effector cell can be expanded ex vivo for a period of 2-30 days prior to administration to a subject. The disclosure provides that the SAR-expressing cells can be manufactured using an expansion-free protocol. In an embodiment, the SAR-expressing cells are manufactured over a period of 1 day or 2 days. In an embodiment, the SAR-expressing cells are manufactured over a period of less than 3 days, 4 days, 5 days, 6 days, 7 days, 10 days, 15 days, 21 or 30 days. A SAR expressing effector cell can be cryopreserved for storage and then thawed prior to administration.

[0781] In another aspect of the disclosure, there is provided a pharmaceutical composition comprising a SAR or an isolated cell or cell population comprising a SAR according to the disclosure and optionally a pharmaceutically acceptable carrier.

[0782] The genetically modified cells or pharmaceutical composition of the disclosure can be administered by any convenient route, including parenteral administration. Parenteral administration includes, for example, intravenous, intramuscular, intraarterial, intraperitoneal, intranasal, rectal, intravesical, intradermal, topical or subcutaneous administration. Compositions can take the form of one or more dosage units.

[0783] The SAR expressing immune cells can be administered to an individual by absolute numbers of cells, e.g., said individual can be administered from about 1000 cells/injection to up to about 10 billion cells/injection, such as at about, at least about, or at most about, 1×10⁸, 1×10⁷, 5×10⁷, 1×10⁶, 5×10⁶, 1×10⁵, 5×10⁵, 1×10⁴, (and so forth) SAR cells per injection, or any ranges between any two of the numbers, end points inclusive. In other embodiments, SAR expressing cells can be administered to such an individual by relative numbers of cells, e.g., said individual can be administered about 1000 cells to up to about 10 billion cells per kilogram of the individual, such as at about, at least about, or at most about, 1×10⁸, 1×10⁷, 5×10⁷, 1×10⁶, 5×10⁶, 1×10⁵, 5×10⁵, 1×10⁴ (and so forth) cells per kilogram of the individual, or any ranges between any two of the numbers, end points inclusive. SAR cells can also be administered to such a patient according to an approximate ratio between a number of SAR cells and the size of the tumor in said patient. The size of the tumor can be determined or estimated by conventional imaging methods, such X-ray, ultrasound imaging, or the like. In other embodiments, the total dose may be calculated by m² of body surface area, including 1×10⁸, 1×10⁷, 5×10⁷, 1×10⁶ per m². The average person is 1.6-1.8 m².

[0784] The SAR expressing immune cells (e.g., NK92 cell line) can be irradiated prior to administration. The SAR expressing immune cells can be treated with an agent (e.g., Mitomycin-C) that makes them replication-incompetent prior to administration to the subject.

[0785] The SAR-expressing cells, and optionally other anti-tumor agents, can be administered once to a patient or can be administered multiple times, e.g., once every 1, 2, 3, 4, 5, 6, 7, 8, 9, 10, 11, 12, 13, 14, 15, 16, 17, 18, 19, 20, 21, 22 or 23 hours, or once every 1, 2, 3, 4, 5, 6 or 7 days, or once every 1, 2, 3, 4, 5, 6, 7, 8, 9, 10 or more weeks during therapy, or any ranges between any two of the numbers, end points inclusive.

[0786] The SAR-expressing cells can be administered by different routes known in the art, such as intravenous, intraperitoneal, intra-pleural, intrathecal, intraventricular, intra-dermal, subcutaneous, intra-tumoral, intra-lesional, intrahepatic routes etc.

[0787] In some embodiments of the SAR-expressing cells are administered in combination with other therapies including conventional therapy, such as chemotherapy, radiotherapy, biological therapy, antibody therapy or hormone treatment. In an embodiment, the SAR expressing cells are administered to a subject after the subject has received lymphodepleting chemotherapy. In an embodiment, the SAR expressing cells are administered to a subject after the subject has received both lymphodepleting and myelodepleting chemotherapy. In an embodiment, the SAR expressing cells are administered to a subject after the subject has received chemotherapy comprising etoposide. In an embodiment, SAR-expressing cells are administered with an agent selected from one or more of the following: a protein phosphatase inhibitor; a kinase inhibitor (e.g., src kinase inhibitor); a Lck kinase inhibitor (e.g., Dasatinib); agents that bind to one or more antigens expressed on the SAR-expressing effector cell and one or more antigens expressed on a target cell (e.g., an antibody, an antibody fragment, a BiTE, a BiKE, a TRiKE etc.); a cytokine (e.g., IL2, IL15 etc.); an inhibitor of an immune inhibitory molecule (e.g., a PD1 or PDL1 inhibitor); an agent that decreases the level or activity of a TREG cell (e.g., rapamycin); an agent that increase the proliferation and/or persistence of SAR-modified cells (e.g., IL2, IL15, IL18, IL21 etc.); a chemokine; an agent that increases the expression of SAR; an agent that allows regulation of the expression or activity of SAR; an agent that allows control over the survival and/or persistence of SAR-modified cells; an agent that controls the side effects of SAR-modified cells (e.g., Tocilizumab, Anakinra, steroid, dasatinib, ibrutinib etc.); a Brd4 inhibitor; an agent that delivers a therapeutic or prophylactic agent to the site of the disease; an agent that increases the expression of the target antigen against which SAR is directed (e.g., a y secretase inhibitor when used with a BCMA targeted SAR); an agent that binds to a multipurpose switch co-expressed with the SAR (e.g., Rituximab, Herceptin or); an agent that protects allogeneic SAR cells from immune attack (e.g., a CD52 antibody) and an adenosine A2a receptor antagonist.

[0788] In one embodiment, the method includes administering a cell expressing the SAR molecule, as described herein, in combination with an agent which enhances the activity of a SAR-expressing cell, wherein the agent is a cytokine, e.g., IL-2, IL-7, IL-15, IL-21, or a combination thereof. The cytokine can be delivered in combination with, e.g., simultaneously or shortly after, administration of the SAR-expressing cell. Alternatively, the cytokine can be delivered after a prolonged period of time after administration of the SAR-expressing cell, e.g., after assessment of the subject's response to the SAR-expressing cell. In one embodiment the cytokine is administered to the subject simultaneously (e.g., administered on the same day) with or shortly after administration (e.g., administered 1 day, 2 days, 3 days, 4 days, 5 days, 6 days, or 7 days after administration) of the cell or population of cells of any of claims 143 to 161. In other embodiments, the cytokine is administered to the subject after a prolonged period of time (e.g., at least 2 weeks, 3 weeks, 4 weeks, 6 weeks, 8 weeks, 10 weeks, or more) after administration of the cell or population of cells, or after assessment of the subject's response to the cell.

[0789] The disclosure provides that Src inhibitors (e.g., Lck inhibitor, e.g., Dasatinib, ponatinib etc.) can control the activity of the SAR of the disclosure. In an embodiment, Dasatinib can control the activity of a SAR comprising the transmembrane and/or cytosolic domains of CD3z, CD16, NKp30, NKp44, NKp46, or NKG2D etc. In one embodiment, the disclosure provides that an agent that can be administered to treat the side effects of the novel SAR-expressing cells of the disclosure is a Src inhibitor (e.g., Lck inhibitor, e.g., Dasatinib). In one embodiment, Dasatinib is administered to the patient after the administration of SAR-expressing cells to control or terminate the activity of SAR-expressing cells. In one embodiment, Dasatinib is administered to a subject to prevent and/or treat Cytokine Release Syndrome (CRS) caused by SAR-expressing cells. In one embodiment, Dasatinib is administered to a subject to prevent and/or treat neurological complications caused by SAR-expressing cells. In an embodiment, Dasatinib is used in combination with other agents (e.g., steroids, Tocilizumab, Anakinra etc.) to prevent and/or treat CRS and neurological complications caused by SAR-expressing cells.

[0790] In one embodiment, dasatinib is administered orally at a dose of at least 10 mg/day, 20 mg/day, 40 mg/day, 60 mg/day, 70 mg/day, 90 mg/day, 100 mg/day, 140 mg/day, 180 mg/day, 210 mg/day, 250 mg/day or 280 mg/day. In one embodiment, the disclosure provides that an agent that can be administered to treat the side effects of the novel SAR-expressing cells of the disclosure is Ponatinib. In an embodiment, Ponatinib is administered to the patient after the administration of CAR-expressing cells to control or terminate the activity of CAR-expressing cells. In one embodiment, ponatinib is administered orally at a dose of at least 15 mg/day, 30 mg/day, 45 mg/day, 60 mg/day. In one embodiment, Ponatinib is administered to a subject to prevent and/or treat Cytokine Release Syndrome (CRS) caused by SAR-expressing cells. In one embodiment, Ponatinib is administered to a subject to prevent and/or treat neurological complications caused by SAR-expressing cells. In an embodiment, Ponatinib is used in combination with other agents (e.g., steroids, Tocilizumab, Anakinra etc.) to prevent and/or treat CRS and neurological complications caused by SAR-expressing cells.

[0791] In an embodiment, the disclosure provides that a tyrosine kinase inhibitor can be used to prolong the persistence of SAR-expressing cells of the disclosure with novel signaling domains. In an embodiment, the disclosure provides that a tyrosine kinase inhibitor can be used to prolong the persistence of SAR-expressing cells of the disclosure with novel signaling domains where the SAR comprises the transmembrane and/or cytosolic domain of CD3z, CD16A, CD16B, NKp30, NKp44, NKp46, and/or NKG2D etc. In an embodiment, the disclosure provides that a tyrosine kinase inhibitor can be used to delay/reverse exhaustion of SAR-expressing cells of the disclosure with novel signaling domains where the SAR comprises the transmembrane and/or cytosolic domains of CD3z, CD16, NKp30, NKp44, NKp46, and/or NKG2D etc. In an embodiment, the tyrosine kinase inhibitor is a Src kinase inhibitor. In an embodiment, the Src kinase inhibitor is an Lck inhibitor. In an embodiment, a Lck inhibitor is Dasatinib or Ponatinib. In an embodiment, Dasatinib can be used to prevent/delay the exhaustion of SAR-expressing cells of the disclosure. In an embodiment, the SAR comprises the transmembrane and/or cytosolic domain of CD3z, CD16, NKp30, NKp44, NKp46, and/or NKG2D etc. In an embodiment, Dasatinib can be used to reverse the exhaustion of SAR-expressing cells of the disclosure. In an embodiment, the SAR comprises the transmembrane and/or cytosolic domain of CD3z, CD16A, CD16B, NKp30, NKp44, NKp46, and/or NKG2D etc. In an embodiment, Dasatinib is administered to a subject who has received SAR-expressing cells intermittently. In an embodiment, the subject receives multiple cycles of a Tyrosine kinase inhibitor (e.g., dasatinib). In an embodiment, treatment with a tyrosine kinase inhibitor (e.g., Dasatinib or Ponatinib) prevents apoptosis of SAR-expressing cells of the disclosure. In an embodiment, with a tyrosine kinase inhibitor (e.g., Dasatinib or Ponatinib) decreases the expression of at least one T or NK cell exhaustion marker selected from the group consisting of PD1, TIM-3, and LAG-3. In an embodiment, treatment with a tyrosine kinase inhibitor (e.g., Dasatinib or Ponatinib) increases the expression of CD62L or CCR7 on SAR-expressing cells. In an embodiment, treatment is continued for a time sufficient to restore at least partial function of SAR expressing cells (e.g., T cells or NK cells). In an embodiment, a tyrosine kinase inhibitor (e.g., Dasatinib or Ponatinib) is administered to a subject who has received SAR-expressing cells continuously. In embodiments, Dasatinib is administered at a dose of about 10 mg/day to 240 mg/day (e.g., 10 mg/day, 20 mg/day, 40 mg/day, 50 mg/day, 70 mg/day, 80 mg/day, 100 mg/day, 110 mg/day, 120 mg/day, 140 mg/day, 180 mg/day, 210 mg/day, 240 mg/day or 300 mg/day).

[0792] In an embodiment, Ponatinib can be used to prolong the persistence of SAR-expressing cells of the disclosure. In an embodiment, Ponatinib can be used to delay the exhaustion of SAR-expressing cells of the disclosure. In an embodiment, Ponatinib is administered to a subject who has received SAR-expressing cells intermittently. In an embodiment, Ponatinib is administered to a subject who has received SAR-expressing cells continuously.

[0793] The composition of the disclosure can be in the form of a liquid, e.g., a solution, emulsion or suspension. The liquid can be useful for delivery by injection, infusion (e.g., IV infusion) or sub-cutaneously. The liquid compositions of the disclosure, whether they are solutions, suspensions or other like form, can also include one or more of the following: sterile diluents such as water, saline solution, typically physiological saline, Ringer's solution, isotonic sodium chloride, fixed oils such as synthetic mono or diglycerides, polyethylene glycols, glycerin, or other solvents; antibacterial agents such as benzyl alcohol or methyl paraben; and agents for the adjustment of tonicity such as sodium chloride or dextrose. A composition can be enclosed in an ampoule, a disposable syringe or a multiple-dose vial made of glass, plastic or other material.

[0794] The amount of the pharmaceutical composition of the disclosure that is effective/active in the treatment of a particular disorder or condition will depend on the nature of the disorder or condition and can be determined by standard clinical techniques. In addition, in vitro or in vivo assays can optionally be employed to help identify optimal dosage ranges. The precise dose to be employed in the compositions will also depend on the route of administration, and the seriousness of the disease or disorder, and should be decided according to the judgment of the practitioner and each patient's circumstances.

[0795] The compositions of the disclosure comprise an effective amount of a binding molecule of the disclosure such that a suitable dosage will be obtained. The correct dosage of the compounds will vary according to the particular formulation, the mode of application, and its particular site, host and the disease being treated. Other factors like age, body weight, sex, diet, time of administration, rate of excretion, condition of the host, drug combinations, reaction sensitivities and severity of the disease shall be taken into account. Administration can be carried out continuously or periodically within the maximum tolerated dose.

[0796] Typically, this amount is at least about 0.01% of a binding molecule of the disclosure by weight of the composition.

[0797] Typical compositions of the disclosure are prepared so that a parenteral dosage unit contains from about 0.01% to about 2% by weight of the binding molecule of the disclosure.

[0798] For intravenous administration, the composition can comprise from about typically about 0.1 mg/kg to about 250 mg/kg of the animal's body weight, typically, between about 0.1 mg/kg and about 20 mg/kg of the animal's body weight, and more commonly about 1 mg/kg to about 10 mg/kg of the animal's body weight.

[0799] The present compositions can take the form of suitable carriers, such aerosols, sprays, suspensions, or any other form suitable for use. Other examples of suitable pharmaceutical carriers are described in “Remington's Pharmaceutical Sciences” by E. W. Martin.

[0800] The pharmaceutical compositions can be prepared using methodology well known in the pharmaceutical art. For example, a composition intended to be administered by injection can be prepared by combining a binding molecule of the disclosure with water so as to form a solution. A surfactant can be added to facilitate the formation of a homogeneous solution or suspension.

[0801] The pharmaceutical composition of the disclosure can be co-administered with other therapeutics, for example anti-cancer agents, chemotherapy drugs, surgery or radiation.

[0802] In one embodiment, the cancer is selected from a hematological cancer or malignancy or a solid tumor. In one embodiment, the cancer is metastatic. In an embodiment cancer is any cancer of any organ or tissue. The exemplary diseases and the antigens targeted by the SAR of the disclosure is presented in Table 49. In an exemplary embodiment, the SAR is used to target BCMA and CD38 and is used to treat plasma cell and autoimmune disorders, such as multiple myeloma, plasma cell leukemia, primary effusion lymphoma and systemic lupus erythematosus (SLE). Such a SAR includes antigen binding domains specific to BCMA and CD38 as described herein. In another exemplary embodiment, the SAR is used to target BCMA and CD22 and is used to treat lymphoid disorders and plasma cell disorders, such as lymphoma, acute lymphocytic leukemia, multiple myeloma, plasma cell leukemia primary effusion lymphoma and systemic lupus erythematosus (SLE). Such a SAR includes antigen binding domains specific to BCMA and CD22 as described herein. In one embodiment, the SAR is used to target CD19, CD22, BCMA and CD20 and is used to treat plasma cell, lymphoid and autoimmune disorders, such as multiple myeloma, plasma cell leukemia, primary effusion lymphoma, diffuse large B cell lymphoma, acute lymphocytic leukemia, chronic lymphocytic leukemia and systemic lupus erythematosus (SLE). Such a SAR includes antigen binding domains specific to CD19, CD22, BCMA and CD20 as described herein. In one embodiment, the SAR is used to target PSMA and CD19 and treat prostate cancer. Such a SAR includes antigen binding domains specific to PSMA and CD19 as described herein. The CD19 specific antigen binding domain is used to primarily stimulate activation, proliferation and expansion of the SAR.

[0803] In an embodiment, the SAR of the disclosure is used to treat any disease (e.g., infection, allergy, autoimmune, degenerative disease etc.).

[0804] In one embodiment, the SAR is used to target BCMA and CD19 and is used to treat lymphoid disorders and plasma cell disorders, such as lymphoma, acute lymphocytic leukemia, multiple myeloma, plasma cell leukemia primary effusion lymphoma and systemic lupus erythematosus (SLE). Such a SAR includes antigen binding domains specific to BCMA and CD19 as described herein.

[0805] In one embodiment, the SAR is used to target BCMA, CD38 and CD22 and is used to treat lymphoid, plasma cell and autoimmune disorders, such as multiple myeloma, plasma cell leukemia, primary effusion lymphoma, diffuse large B cell lymphoma, B-ALL, chronic lymphocytic leukemia and systemic lupus erythematosus (SLE). Such a SAR includes antigen binding domains specific to BCMA, CD38 and CD22 as described herein.

[0806] In one embodiment, the SAR is used to target BCMA, CD38 and CD19 and is used to treat lymphoid, plasma cell and autoimmune disorders, such as multiple myeloma, plasma cell leukemia, primary effusion lymphoma, diffuse large B cell lymphoma, B-ALL, chronic lymphocytic leukemia and systemic lupus erythematosus (SLE). Such a SAR includes antigen binding domains specific to BCMA, CD38 and CD19 as described herein.

[0807] In one embodiment, the SAR is used to target BCMA, CD3ε, CD22 and CD19 and is used to treat lymphoid, plasma cell and autoimmune disorders, such as multiple myeloma, plasma cell leukemia, primary effusion lymphoma, diffuse large B cell lymphoma, B-ALL, chronic lymphocytic leukemia and systemic lupus erythematosus (SLE). Such a SAR includes antigen binding domains specific to BCMA, CD3ε, CD22 and CD19 as described herein.

[0808] In one embodiment, the SAR is used to target BCMA, CD3ε, CD22, CD20 and CD19 and is used to treat lymphoid, plasma cell and autoimmune disorders, such as multiple myeloma, plasma cell leukemia, primary effusion lymphoma, diffuse large B cell lymphoma, B-ALL, chronic lymphocytic leukemia and systemic lupus erythematosus (SLE). Such a SAR includes antigen binding domains specific to BCMA, CD3ε, CD22, CD20 and CD19 as described herein.

[0809] In one embodiment, the SAR is used to target CD19 and CD22 and is used to treat lymphoid and autoimmune disorders, such as lymphoma, acute lymphocytic leukemia, chronic lymphocytic leukemia and systemic lupus erythematosus (SLE). Such a SAR includes antigen binding domains specific to CD19 and CD22 as described herein.

[0810] In one embodiment, the SAR is used to target CD19 and CD20 and is used to treat lymphoid and autoimmune disorders, such as lymphoma, acute lymphocytic leukemia, chronic lymphocytic leukemia and systemic lupus erythematosus (SLE). Such a SAR includes antigen binding domains specific to CD19 and CD22 as described herein.

[0811] In one embodiment, the SAR is used to target CD19, CD22 and CD20 and is used to treat lymphoid and autoimmune disorders, such as lymphoma, acute lymphocytic leukemia, chronic lymphocytic leukemia and systemic lupus erythematosus (SLE). Such a SAR includes antigen binding domains specific to CD19, CD20 and CD22 as described herein.

[0812] In one embodiment, the SAR is used to target PSMA and treat prostate cancer. Such a SAR includes an antigen binding domain specific to PSMA as described herein.

[0813] In one embodiment, the SAR is used to target PSMA and CD22 and treat prostate cancer. Such a SAR includes antigen binding domains specific to PSMA and CD22 as described herein. The CD22 specific antigen binding domain is used to primarily stimulate activation, proliferation and expansion of the SAR.

[0814] In one embodiment, the SAR is used to target PSMA and CD20 and treat prostate cancer. Such a SAR includes antigen binding domains specific to PSMA and CD20 as described herein. The CD20 specific antigen binding domain is used to primarily stimulate activation, proliferation and expansion of the SAR.

[0815] In one embodiment, the SAR is used to target PSMA and BCMA and treat prostate cancer. Such a SAR includes antigen binding domains specific to PSMA and BCMA as described herein. The BCMA specific antigen binding domain is used to primarily stimulate activation, proliferation and expansion of the SAR.

[0816] In one embodiment, a SAR or cell comprising a SAR of the disclosure is used in combination with an existing therapy or therapeutic agent, for example an anti-cancer therapy. Thus, in another aspect, the disclosure also relates to a combination therapy comprising administration of a SAR-T or SAR-NK and/or SAR-macrophage or pharmaceutical composition of the disclosure and an anti-cancer therapy. The anti-cancer therapy may include a therapeutic agent or radiation therapy and includes gene therapy, viral therapy, RNA therapy bone marrow transplantation, nanotherapy, targeted anti-cancer therapies or oncolytic drugs. Examples of other therapeutic agents include other checkpoint inhibitors, antineoplastic agents, immunogenic agents, attenuated cancerous cells, tumor antigens, antigen presenting cells such as dendritic cells pulsed with tumor-derived antigen or nucleic acids, immune stimulating cytokines (e.g., IL-2, IFNa2, GM-CSF), targeted small molecules and biological molecules (such as components of signal transduction pathways, e.g., modulators of tyrosine kinases and inhibitors of receptor tyrosine kinases, and agents that bind to tumor-specific antigens, including EGFR antagonists), an anti-inflammatory agent, a cytotoxic agent, a radiotoxic agent, or an immunosuppressive agent and cells transfected with a gene encoding an immune stimulating cytokine (e.g., GM-CSF), chemotherapy. In one embodiment, the SAR-T or SAR-NK and/or SAR-T and/or SAR-macrophage pharmaceutical composition of the disclosure is used in combination with surgery. The SAR-T or SAR-NK pharmaceutical composition of the disclosure may be administered at the same time or at a different time as the other therapy, e.g., simultaneously, separately or sequentially.

[0817] Immune cell (e.g., NK, T cells etc.) survival and, hence, cytotoxicity requires cytokine support. Expression of interleukin-15 (IL-15) and IL-2 in a non-secretory, membrane-bound form is known to sustain NK and T cell growth and improve cytotoxicity.

[0818] The disclosure provides a method of producing an immune cell that expresses all or a functional portion of low-affinity variants of IL-2 and/or IL-15. All or a portion of the IL-2 and/or IL-15 can be expressed as a membrane-bound polypeptide, a secreted polypeptide or as a combination thereof. The method comprises introducing nucleic acid encoding all or a functional portion of low affinity variants of IL-2 or IL-15 into the one or more immune cells (e.g., NK cells). In one aspect, the nucleic acid encoding all or a functional portion of low affinity variants of IL-2 or IL-15 is linked (e.g., fused) to all or a portion of a transmembrane protein. Alternatively, or in addition, nucleic acid encoding all or a functional portion of IL-2 or IL-15 variants is introduced into the immune cells (e.g. NK cell). As will be apparent to those of skill in the art, aspects in which nucleic acid encoding all or a functional portion of IL-2 or IL-15 variant and all or a functional portion of IL-2 or IL-15 variant fused to all or a portion of a transmembrane protein is introduced in to an immune cell (e.g., NK cell, can be done so using a single nucleic acid or multiple (e.g., separate; two) nucleic acids. The NK or T cell is maintained under conditions in which all or a functional portion of the IL-15 or IL-2 is expressed as a membrane-bound polypeptide and/or as a secreted polypeptide thereby producing a NK or T cell that expresses all or a functional portion of IL-15 or IL-2 as a membrane-bound polypeptide and/or as a secreted polypeptide. In a particular aspect, nucleic acid encoding all or a functional portion of IL-15 or IL-2 is fused to a signal peptide of CD8a and all or a portion of a transmembrane domain of CD8a is introduced into the NK cell.

[0819] In yet another aspect, the disclosure is directed to a method of enhancing expansion and/or survival of NK cells (e.g., in vitro, ex vivo, and/or in vivo). The method comprises introducing nucleic acid encoding all or a functional portion of IL-15 or IL-2. Nucleic acid encoding all or a portion of the IL-15 (e.g., wild type IL-15) and/or encoding all or a functional portion of IL-15 fused to all or a portion of a transmembrane protein can be introduced into the NK cell. Thus, the NK cell can express all or a functional portion of IL-15 as a membrane-bound polypeptide, a secreted polypeptide or as a combination thereof. The NK cells are maintained under conditions in which all or a portion of the IL-15 is expressed as a membrane-bound polypeptide, a secreted polypeptide or as a combination thereof and in which the NK cells proliferate. In a particular aspect, nucleic acid encoding all or a functional portion of IL-15 is fused to a signal peptide of CD8a and all or a portion of a transmembrane domain of CD8a is introduced into the NK cell. In some aspects, the method can further comprise contacting the NK cells comprising membrane-bound IL-15 and/or secreted IL-15 with IL-2. In some aspects, the concentration of IL-2 is from about 10 IU/ml to about 1000 IU/ml. In other aspects, the concentration of IL-2 is about 20, 40, 60, 80,100,120, 140, 160, 180, 200, 220, 240, 260, 280, 300, 320, 340, 360, 380, 400, 420, 440, 460, 480, 500, 520, 540, 560, 580, 600, 620, 640, 660, 680, 700, 720 740, 760, 780, 800, 820, 840, 860, 880, 900, 920, 940, 960, 980 IU/ml.

[0820] As will be apparent to those of skill in the art, a variety of methods for introducing nucleic acid can be used.

[0821] Also apparent to those of skill in the art is that a variety of methods of maintaining immune cells (e.g. NK cells) under conditions in which (i) all or a functional portion of the IL-15 is expressed as a membrane-bound polypeptide and/or as a secreted polypeptide and/or (ii) the NK cells comprising membrane-bound IL-15 and/or secreted IL-15 proliferate can be used. The methods can further comprise isolating or separating the one or more NK cells produced by the methods provided herein, In addition, the methods can further comprise culturing the one or more NK cells. In some aspects, an NK cell line is produced.

[0822] The disclosure also encompasses a (one or more) natural killer (NK) cell or cell line produced by the methods described herein, and compositions comprising the NK cells provided herein. In a particular aspect, the composition is a pharmaceutical composition comprising one or more of the NK cells or cell lines provided herein. The pharmaceutical composition can further comprise all or a functional portion of IL-2 (e.g., all or a functional portion of an (one or more) IL-2 protein; nucleic acid encoding all or a functional portion of IL-2).

[0823] The disclosure provides membrane anchored form of IL2 and IL15 and their low affinity variants (Table 43) that can be used to provide IL2 and/or IL15 signaling to immune cells (e.g., T cells, NK cells, NK-T cells), including immune cells expressing the SARs of the disclosure (e.g., SEQ ID NO: 8428). The SEQ ID NO: of representative low affinity IL2 variants are provided in SEQ ID NO: 7834-7837. The SEQ ID NO: of representative low affinity IL15 variants are provided in SEQ ID NO: 7839-7841. The low affinity variants of membrane anchored IL2 and/or IL15 have the advantage of providing survival signal selectively to cells in which the variants are expressed and not to stimulate IL2 and/or IL15 signaling in neighboring cells. Therefore, the low affinity variants of membrane anchored IL2 and/or IL15 have the advantage of improved therapeutic index.

[0824] A technical challenge with the next generation SAR constructs is the lack of an easy method for their detection, isolation, purification or depletion. The addition of the epitope tags on the SAR constructs have been described but suffer from the problems of interfering with the SAR binding to its target antigen and/or off-target signaling. The applicant has discovered that epitope tags can be added to membrane anchored forms of cytokines (e.g., IL2 and 1L15) without interfering with their binding and signaling activity. The disclosure provides membrane anchored form of IL2 and IL15 and their low affinity variants the also comprise one or more epitope tags (e.g., cetuximab mimotope, rituximab tag, Herceptin mimotope, MYC tag, StreptagII etc.) that can be used for detection, isolation, purification and or depletion of the cells expressing them, including SAR expressing cells. Exemplary epitope tags are known in the literature including Table 37 of PCT/US2021/022641, which is incorporated in its entirety by reference herein. These epitope tags can be used for detection, isolation, purification and or depletion of the immune cells (e.g., SAR-expressing NK or T cells) using the methods described in PCT/US2021/022641.

[0825] Increasing efficacy of adoptive immunotherapy has been associated with reports of serious short-term and long-term adverse events, such as CRS, neurotoxicity, graft-versus host disease (GvHD), lymphoproliferation and insertional mutagenesis. Since engineered T-cells can expand and persist for years after administration, it is desirable to include a safety mechanism to allow selective deletion of adoptively infused T-cells in the face of toxicity. Suicide genes enable selective deletion of transduced cells in vivo. Two suicide genes are under clinical testing: HSV-TK and iCasp9.

[0826] In order to maximize efficiency of adoptive cell therapy, it is desirable to have a mechanism for monitoring transduction efficiency and selecting transduced cells. A purified population of transduced cells may then be given to the patient.

[0827] Some T-cell engineering strategies, including expression of next generation CAR constructs (e.g., SIR, zSIR, Ab-TCR etc.) may not result in transgenic expression of readily detectable surface proteins. In these cases, measurement of transduction and tracking of cells in peripheral blood is difficult. Further, in some settings, it is essential to administer only transduced T-cells, for instance in GvHD gene-therapy protocols. Here, a marker which allows clinical grade sorting is required.

[0828] Several marker genes have been described, such as puromycin resistance gene (PAC), tEGFR, CD20, and low-affinity Nerve Growth Factor receptor. More recently, truncated CD34 and RQR8 have been used as marker. These have the advantage that CD34 Miltenyi CliniMACS selection system is readily available for clinical grade sorting.

[0829] The marker and suicide genes (e.g., HSV-TK, iCaspase 9, tEGFR etc.) have a long coding sequence and inclusion of these proteins as a marker gene is likely to tax vector packaging capacity and transcriptional efficiency. Finally, none of the above-described suicide and/or marker genes can provide survival signal to the immune cells. Although the suicide, marker and survival functions can be provided by inclusion of two or more genes, this is likely to further tax vector packaging capacity and transcriptional efficiency. There is thus a need for a multi-purpose gene switch which can provide suicide, survival and marker functions.

[0830] The disclosure provides multi-purpose gene switches that serve suicide, survival and marker functions. In an exemplary embodiment, a multipurpose switch serves as a life-death (or survival-suicide) switch for the purpose of adoptive cell therapy when ectopically expressed in a cell. In an embodiment, the multipurpose switch has the following formula: SP-D1-L1-D2-L2-D3-L3-D4; where SP is an optional signal peptide that allows cell surface transport of the multipurpose switch and is cleaved to yield the mature peptide, D1 is receptor binding domain which binds to a receptor that promotes cell survival, D2 is a marker/suicide domain, D3 is a hinge domain/stalk domain that allows the D1 and D2 domains to be projected away from the surface of the target cell, D4 is a membrane associating domain (e.g., a transmembrane domain or a membrane anchoring domain) that anchors the molecular switch to the cell membrane and L1, L2 and L3 are optional linker domains.

[0831] In an embodiment, the multipurpose switch comprises an in-frame fusion of a first module (D1) comprising a receptor-binding domain to a second module (D2) that serves as a marker/suicide-switch and a third module (D3) that serves as a hinge/stalk domain and a fourth module (D4) that serves as a membrane associating domain. In an embodiment, the D2, D3 and D4 modules are derived from the same endogenous protein. In an embodiment, the D2, D3 and D4 module are derived from different endogenous proteins. In an embodiment, D3 and D4 are derived from the same endogenous protein. In an embodiment, D3 and D4 are derived from the different endogenous proteins.

[0832] In an embodiment, the first module (D1) binds to a receptor that is expressed on cell surface, i.e., it binds to the extracellular domain of a receptor. In an embodiment, the first module (D1) binds to a receptor which when bound transmits a pro-survival and/or proliferative signal to the cell. In an embodiment, the first module binds to the receptor in cis (i.e., bind to the receptor expressed on the same cell as the cell expressing the molecular switch). In an embodiment, the first module binds to the receptor in trans (i.e., bind to receptor expressed on a cell other than the cell expressing the molecular switch). In an embodiment, the first module binds to the receptor in cis and in trans. In an embodiment, the first module (D1) comprises the receptor binding domain of a cytokine, a chemokine, a ligand, or a variant or a fragment thereof. Exemplary cytokines, chemokines and ligands include, but are not limited to, one of the following: IL-la, IL-10, IL-2, IL-3, IL-4, IL-5, IL-6, IL-7, IL-8, IL-9, IL-10, IL-11, IL-12, IL-13, IL-14, IL-15, IL-16, IL18, IL-19, IL20, IL-21, IL-22, IL-23, IL27, IL-28, CD40L, 4-1BBL, CD30L, OX40L, FLT3-L, APRIL, BAFF, Rantes, MIP, Erythropoietin, Thrombopoietin, SCF (stem cell factor), G-CSF, GM-CSF and M-CSF etc. In an embodiment, the first module is an antibody, an antibody fragment (e.g., scFv, vL, vH, Fab etc.), a single domain antibody (e.g., vHH, FHVH etc.) or a non-immunoglobulin antigen binding module that can bind to a receptor. In exemplary embodiments, the receptor is selected from one of the following: IL-1R, IL2R, IL-3R, IL-4R, IL-5R, IL-6R, IL-7R, IL-8R, IL-9R, IL-10R, IL-11R, IL-12R, IL-13R, IL-15R, IL-18R, IL-19R, IL-20R, IL-21R, IL-22R, IL-23R, IL-27R, IL-28R, CCR1, CCR3, CCR5, MIP-1R, PF4 receptor, Erythropoeitin-Receptor (Epo-R), TPO-R/MPL, GSF-R, c-Kit, and M-CSF receptor.

[0833] In an embodiment, the second module (D2) comprises of the extracellular domain of an endogenous protein or a fragment thereof. In an exemplary embodiment, the D2 comprises the extracellular domain of one or more of the following endogenous proteins or a fragment thereof: CD5; CD19; CD123; CD22; CD30; CD3ε, CD52, CD171; CS1 (SLAMF7, CD319); C-type lectin-like molecule-1 (CLL-1 or CLECL1); CD33; epidermal growth factor receptor variant III (EGFRviii); ganglioside G2 (GD2); ganglioside GD3; BCMA; Tn antigen (Tn Ag); prostate-specific membrane antigen (PSMA); Receptor tyrosine kinase-like orphan receptor 1 (ROR1); Fins Like Tyrosine Kinase 3 (FLT3); Tumor-associated glycoprotein 72 (TAG72); CD38; CD44v6; Carcinoembryonic antigen (CEA); Epithelial cell adhesion molecule (EPCAM); B7H3 (CD276); KIT (CD 117); Interleukin-13 receptor subunit alpha-2 (IL-13Ra2 or CD213A2); Mesothelin; Interleukin 11 receptor alpha (IL-llRa); prostate stem cell antigen (PSCA); Protease Serine 21 (Testisin or PRSS21); vascular endothelial growth factor receptor 2 (VEGFR2); Lewis(Y) antigen; CD24; Platelet-derived growth factor receptor beta (PDGFR-beta); Stage-specific embryonic antigen-4 (SSEA-4); CD20; Folate receptor alpha (FRa or FR1); Folate receptor beta (FRb); Receptor tyrosine-protein kinase ERBB2 (Her2/neu); Mucin 1, cell surface associated (MUC1); epidermal growth factor receptor (EGFR); neural cell adhesion molecule (NCAM); Ephrin B2; fibroblast activation protein alpha (FAP); insulin-like growth factor 1 receptor (IGF-I receptor), carbonic anhydrase IX (CAlX); ephrin type-A receptor 2 (EphA2); sialyl Lewis adhesion molecule (sLe); ganglioside GM3; high molecular weight-melanoma associated antigen (HMWMAA); o-acetyl-GD2 ganglioside (OAcGD2); tumor endothelial marker 1 (TEM1/CD248); tumor endothelial marker 7-related (TEM7R); claudin 6 (CLDN6); thyroid stimulating hormone receptor (TSHR); G protein coupled receptor class C group 5, member D (GPRC5D); CD97; CD179a; anaplastic lymphoma kinase (ALK); Polysialic acid; placenta-specific 1 (PLAC1); hexasaccharide portion of globoH glycoceramide (GloboH); mammary gland differentiation antigen (NY-BR-1); uroplakin 2 (UPK2); Hepatitis A virus cellular receptor 1 (HAVCR1); adrenoceptor beta 3 (ADRB3); pannexin 3 (PANX3); G protein-coupled receptor 20 (GPR20); lymphocyte antigen 6 complex, locus K 9 (LY6K); Olfactory receptor 51E2 (OR51E2); TCR Gamma Alternate Reading Frame Protein (TARP); Androgen receptor; Squamous Cell Carcinoma Antigen Recognized By T Cells 3 (SART3); CD79a; CD79b; CD72; Leukocyte-associated immunoglobulin-like receptor 1 (LAIR1); Fc fragment of IgA receptor (FCAR or CD89); Leukocyte immunoglobulin-like receptor subfamily A member 2 (LILRA2); CD300 molecule-like family member f (CD300LF); C-type lectin domain family 12 member A (CLEC12A); bone marrow stromal cell antigen 2 (BST2); EGF-like module-containing mucin-like hormone receptor-like 2 (EMR2); lymphocyte antigen 75 (LY75); Glypican-3 (GPC3); Fc receptor-like 5 (FCRL5); and immunoglobulin lambda-like polypeptide 1 (IGLLl), MPL, CD34, LAMP1 TROP2, GFRalpha4, CDH17, CDH6, NYBRI, CDH19, CD200R, Slea (CA19.9; Sialyl Lewis Antigen); Fucosyl-GM1, PTK7, gpNMB, CDH1/CD324, DLL3, CD276/B7H3, IL-2R, IL-4R, IL-6R, IL1lRa, IL13Ra2, IL-17R, CD179b-IGLll, TCRgamma-delta, NKG2D, CD32 (FCGR2A), Tim1-/HVCR1, CSF2RA (GM-CSFR-alpha), TGFbetaR2, Lews Ag, TCR-beta1 chain, TCR-beta2 chain, TCR-gamma chain, TCR-delta chain, FITC, Leutenizing hormone receptor (LHR), Follicle stimulating hormone receptor (FSHR), Gonadotropin Hormone receptor (CGHR or GR), CCR4, SLAMF6, SLAMF4, CD99, Ras G12V, Tissue Factor 1 (TF1), GPRC5D, Claudin18.2 (CLD18A2 or CLDN18A.2), P-glycoprotein, STEAPI, Liv1, Nectin-4, Cripto, gpA33, BST1/CD157, low conductance chloride channel (LCCC), TAJ/TROY, MPL (TPO-R), KIR3DL2, CD32b, CD229, Toso, PD-1, PD-L1, PD-L2, TNFRI, TRAIL-Ri (DR4), TRAIL-R2 (DR5), CTLA4, IL-36R, CD25, LAG3, VEGF-A, MASP-2, Thymic stromal lymphopoietin, Tissue Factor, IFNARI, IL5, IL-6, IL-12, IL-23, IL-17A, IL-13, Angiopoietin-like 3, CGRP, IL-23p19, vWF, C5, IFNγ, CD4, CD8, CD7, NKp30, NKp44, NKp46, NKG2D, PDGRFα, α4β7 integrin, α4 integrin, VEGF, GPIIb/IIIa PCSK9, Blys, and BAFF-R.

[0834] In an embodiment, the second module (D2) can be used to induce death of the cells expressing the molecular switch. In an embodiment, the second module (D2) can be used to induce death of the cells expressing the molecular switch when bound by an agent. In an exemplary embodiment, the agent that induces death of cells expressing the molecular switch when bound to the second module is an antibody, an antibody fragment, an scFv, a single domain antibody, a non-immunoglobulin antigen binding domain, an antibody drug conjugate, a bispecific antibody or a fragment thereof or a cell (e.g., CAR-T, SAR-T, SAR-NK cell etc.). In an embodiment, the second module can be used to selectively enrich or deplete cells expressing the molecular switch. In an embodiment, the second module can be used to selectively detect, enrich and/or deplete cells expressing the molecular switch when bound by an agent. In an exemplary embodiment, the agent that can be used to selectively detect, enrich and/or deplete the cells expressing the molecular switch when bound to the second module is an antibody, a single domain antibody, a non-immunoglobulin antigen binding domain or a fragment thereof. In an embodiment, the molecular switch is used to selectively detect, enrich and/or deplete cells ex vivo. In an embodiment, the molecular switch is used to selectively deplete cells in vivo. In an embodiment, the agent (i.e., an antibody, antibody drug conjugate, bispecific antibody, a non-immunoglobulin antigen binding domain or a fragment thereof) that is used to detect, deplete or enrich cells expressing the molecular switch has been approved for human administration by the FDA. Exemplary agents that have been approved by FDA or are pending FDA approval for human administration are known in the art and include, but are not limited to, Rituximab, Herceptin, Erbitrux, Adcetris, Enbrel, Tremelimumab, Mosunetuzumab, Teclistamab, Donanemab, Spesolimab, Faricimab, Tislelizumab, belantamab mafodotin, Pembrolizumab, nivolumab and Qbend etc. Methods to selectively deplete and/or enrich cells using antibodies are known in the art (e.g., WO 2018/178378). In an embodiment, the agent that is used to detect, deplete or enrich cells expressing the molecular switch is approved by the FDA for ex vivo clinical use. An exemplary such agent is an antibody against CD34 that has been approved by the FDA to be used in conjunction with the clinically approved CliniMACS CD34 system (Miltenyi).

[0835] The molecular switch of the disclosure comprises a hinge/stalk sequence (D3) which, when the polypeptide is expressed at the surface of a target cell, causes the D1 and D2 domains to be projected away from the surface of the target cell.

[0836] The stalk sequence (D3) causes the D1 and D2 to be sufficiently distanced from the cell surface to facilitate binding of, for example, of the D1 to the receptor and/or an antibody to the D2 domain.

[0837] The stalk sequence (D3) elevates the D1-D2 domains from the cell surface.

[0838] The stalk sequence may be a substantially linear amino acid sequence. The stalk sequence may be sufficiently long to distance the D1 and D2 domains from the surface of the target cell but not so long that its encoding sequence compromises vector packaging and transduction efficiency. The stalk sequence may, for example be between 20 and 100 amino acids in length. The stalk sequence may be approximately 40-50 amino acids in length.

[0839] The stalk sequence may be highly glycosylated.

[0840] The stalk sequence may comprise or be approximately equivalent in length to the sequence represented by SEQ ID NO (DNA):7132 and SEQ ID NO (PRT):7824.

[0841] The stalk/hinge sequence is operationally linked to a transmembrane domain (D4), optionally together with an intracellular anchor sequence. The transmembrane domain and intracellular anchor sequence may be derived from the same protein as extracellular part of the stalk sequence or it/they may be derived from a different protein. The stalk/hinge and transmembrane domains and intracellular anchor sequence may be derivable from CD8. An exemplary CD8 hinge and transmembrane sequence is provide in SEQ ID NO (PRT):3603.

[0842] The molecular switch may comprise L1, L2 and L3 are optional linker (or spacer) domains, which may be the same or different. Exemplary linkers are provided in SEQ ID NO: 3418-3434. The molecular switch may also comprise a signal peptide at the amino terminus. Exemplary signal peptides are provided in SEQ ID NO: 2425-2428. Once the polypeptide is expressed by the target cell, the signal peptide is cleaved, resulting in the mature peptide product.

[0843] An exemplary multipurpose switch is Synth-IL2-Nde-tBCMA-L244ter (SEQ ID NO (DNA):7152 and SEQ ID NO (PRT): 7843) and comprises the IL2 receptor binding domain of IL2 fused in frame to the extracellular-domain and the transmembrane domain of BCMA. This multipurpose switch when expressed in immune cells (e.g., T cells or NK cells etc.) provides them with a survival signal by binding to the IL2 receptor through the N-terminal D1 module comprising the IL-2R binding domain of IL2. The second module (D2) of this multipurpose switch comprises the extracellular domain of BCMA which is recognized by BCMA-binding agents (e.g., BCMA antibodies) and can be used for the detection, selective depletion and/or enrichment of transgene (e.g., SAR) expressing cells. The extracellular domain of BCMA comprising the second (D2) module can be also used for selective suicide of transgene (e.g., SAR) expressing cells by the use of BCMA-targeted agents, such as an antibody or an antibody drug-conjugates targeting BCMA (e.g., belantamab mafodotin). The third (D3) and the fourth (D4) modules in this molecular switch comprises of the hinge/stalk and transmembrane domains of BCMA and serves to anchor the switch to the cell membrane.

[0844] As the molecular switches are modular in format, the different modules can be replaced by other modules as long as the resulting switch retains at least one of its biological activities (e.g., ability to serve as a survival switch or a suicide switch etc.). Thus, the IL2 module can be replaced by a different cytokine (e.g., IL15, IL18, IL21 etc.) These multipurpose proteins provide a pro-survival signal through their cytokine moiety (e.g., IL2, IL15, IL18, IL21 etc.) but can be used to kill-off the cells by the use of an agent (e.g., an antibody) that binds to the second module (e.g., RQR3, tBCMA, tHer2, tEGFR, tCD19, tCD30 etc.), thereby acting as a suicide gene that allow selective deletion of administered T cells in the face of toxicity. The second module (e.g., RQR3, tBCMA, tHer2, tEGFR, tCD19, tCD30 etc.) can be also used as a marker for measurement of transduction and to allow selection of transduced cells.

[0845] In an exemplary embodiment, the IL2 module can be replaced by low-affinity IL2 variants, IL15 or IL15 variants. Exemplary multipurpose switches comprising low-affinity IL2 variants fused to tBCMA are provided in SEQ ID NO (DNA):7152-7155 and SEQ ID NO (PRT): 7844-7847. Exemplary multipurpose switches comprising IL-15 and its low affinity variant fused to tBCMA are provided in SEQ ID NO (DNA):7156-7157 and SEQ ID NO (PRT): 7848-7849. In another exemplary embodiment, the tBCMA module can be replaced by other modules. An exemplary multipurpose switch comprises IL2 fused to tCD30 is provided in SEQ ID NO (DNA):7158 and SEQ ID NO (PRT): 7850. Exemplary multipurpose switches comprising cytokines fused to tEGFR and other surface proteins (e.g., Her3, CD19, PD1, PDL1, CD40 etc.) can be constructed similarly and used in alternate embodiments of the disclosure.

[0846] The multipurpose switch expression cassettes are compact in size and can be easily packaged in viral vectors. They are much more manageable size than the expression cassettes encoding individual marker, suicide and survival genes, which would require separate promoters. They have the added advantage of comprising survival, suicide and marker gene elements with sensitivity at least equal to that demonstrated by the individual genes.

[0847] In an embodiment, the second module (D2) is a synthetic module comprising one or more copies of an epitope or a mimotope. In an embodiment, the epitope is present in the extracellular domain of an endogenous protein. In an embodiment, the mimotope mimics an epitope that is present in the extracellular domain of an endogenous protein. Exemplary endogenous proteins are presented in the preceding section. An exemplary synthetic module comprising one or more copies of an epitope or a mimotope is RQR8 (SEQ ID NO: 9619), which is a module harboring a CD34 epitope and two CD20 mimotopes and has been described in WO/2013/153391, which is incorporated in its entirety by reference herein. The RQR8 module allows selection with the clinically approved CliniMACS CD34 system (Miltenyi). Further, the construct binds the widely used pharmaceutical antibody rituximab, resulting in selective deletion of transgene-expressing cells. Additional exemplary multi-purpose molecular switches and include fusion proteins comprising IL2 or its variants and tBCMA (SEQ ID NO (DNA): 7151-7155), IL15 or its variants and tBCMA (SEQ ID NO (DNA):7156-7157), IL2 and its variants and tHer2, IL2 and its variants and tEGFR, IL2 and its RQR8, IL2 and its variants and CD30 (SEQ ID NO: 7850) etc. As the multipurpose switches are modular in format, one module can be replaced with a different module.

[0848] The polypeptides encoding the multipurpose switches of the disclosure may comprise or consist of a variant of the sequence shown as SEQ ID No. 7843-7850 and 9621-9625, which has at least 70%, 80% or 90% identity with the sequence shown as SEQ ID No. 7843-7850 and 9621-9625, as long as it retains the functional activity of the SEQ ID No. 7843-7850 and 9621-9625 polypeptide. For example, the variant of sequence 7843-7847 should (i) bind IL-2R; (ii) bind BCMA antibodies (e.g., J6M0 or belantamab mafodotin) (iii) when expressed on the surface of a cell, induce killing of the cell in the presence of J6M0 or belantamab mafodotin. The J6M0 has been described in U.S. Pat. No. 9,273,141B2.

[0849] Homology comparisons may be conducted by eye or with the aid of readily available sequence comparison programs, such as the GCG Wisconsin Bestfit package. The multipurpose molecular switches of the disclosure can be in the form of a fusion protein, in which the polypeptide is fused to a protein of interest (POI). The fusion protein may comprise a self-cleaving peptide (e.g., P2A or F2A) between the polypeptide encoding the multipurpose switch and the protein of interest.

[0850] The protein of interest is a molecule for expression at the surface of a target cell. The POI may exert a therapeutic or prophylactic effect when the target cell is in vivo. The POI may be a SAR (e.g., a CAR, SIR, zSIR, HIT, STAR, cTCR, Ab-TCR, TFP, TAC, recombinant TCR etc.) or an endogenous TCR.

[0851] The disclosure also provides a nucleic acid sequence capable of encoding a multipurpose switch encoding polypeptide or fusion protein of the disclosure.

[0852] The nucleic acid, when expressed by a target cell, causes the encoded multipurpose switch polypeptide to be expressed at the cell-surface of the target cell. Where the nucleic acid encodes both the multipurpose switch polypeptide and POI (for example as a fusion protein), it should cause both the polypeptide of the disclosure and the POI to be expressed at the surface of the target cell.

[0853] The nucleic acid sequence may be RNA or DNA, such as cDNA.

[0854] The disclosure also provides a vector which comprises a nucleic acid sequence of the multipurpose molecular switch. The vector may also comprise a transgene of interest, i.e., a gene encoding a POI (e.g., a SAR).

[0855] The vector should be capable of transfecting or transducing a target cell, such that they express the polypeptide encoding the multipurpose switch and optionally a protein of interest.

[0856] The vector may be a non-viral vector such as a plasmid. The vector may be a viral vector, such as a retroviral or lentiviral vector. The vector may comprise a nucleic acid encoding the polypeptide and a nucleic acid comprising the POI as separate entities, or as a single nucleotide sequence. If they are present as a single nucleotide sequence they may comprise one or more internal ribosome entry site (IRES) sequences between the two encoding portions to enable the downstream sequence to be translated. In an embodiment, the multipurpose molecular switch and the POI may be expressed from a single vector using separate promoters. In another embodiment, the multipurpose switch and the POI may be expressed from separate vectors.

[0857] The disclosure also provides a cell which expresses a multipurpose switch polypeptide of the disclosure. The cell may coexpress the multipurpose switch polypeptide and a POI (e.g., a SAR) at the cell surface. The disclosure also provides a cell which comprises a nucleic acid sequence capable of encoding a multipurpose switch polypeptide of the disclosure. The cell may have been transduced or transfected with a vector according to the disclosure. The cell may be suitable for adoptive cell therapy. The cell may be a T cell, such as a cytotoxic T lymphocyte (CTL). The T cell may have an existing specificity. For example, it may be an Epstein-Barr virus (EBV)-specific T cell. The cell may be an NK cell, NKT cell, iPSC-derived T cell or synthetic T cell. The cell may be derived from a patient. For example, the cell may have been removed from a patient and then transduced ex vivo with a vector according to the disclosure. T cell populations which are suitable for ACT include: bulk peripheral blood mononuclear cells (PBMCs), CD8+ cells (for example, CD4-depleted PBMCs); PBMCs that are selectively depleted of T-regulatory cells (Tregs); isolated central memory (Tcm) cells; EBV-specific CTLs; and ti-virus-specific CTLs.

[0858] The disclosure also comprises a cell population which comprises a cell according to the disclosure. The cell population may have been transduced with a vector according to the disclosure. A proportion of the cells of the cell population may express a multipurpose switch polypeptide according to the disclosure at the cell surface. A proportion of the cells of the cell population may co-express a multipurpose switch polypeptide and a POI (e.g., SAR) at the cell surface. The cell population may be ex vivo patient-derived cell population.

[0859] The disclosure provides a method for measuring transduction with a transgene of interest (which encodes a protein of interest POI, e.g., a SAR), which comprises the step of transducing a population of cells with a vector which coexpresses the multipurpose switch polypeptide of the disclosure and the protein of interest (e.g., a SAR) and detecting expression of the multipurpose switch (e.g., BCMA, QBEnd10-binding epitope etc.) on the surface of cells, wherein the proportion of cells expressing the multipurpose switch polypeptide of the disclosure corresponds to the proportion of cells transduced with the transgene of interest.

[0860] The disclosure also provides a method for selecting cells expressing a POI (e.g., a SAR) which comprises the following steps:
[0861] (i) detecting expression of the multipurpose switch (e.g., BCMA-, Her2-, or QBEnd10-binding epitope) on the surface of cells transfected or transduced with a vector of the disclosure which comprises a nucleotide sequence encoding the POI (e.g., a SAR); and
[0862] (ii) selecting cells which are identified as expressing the multipurpose switch (e.g., BCMA-, Her2-, or QBEnd10-binding epitope).

[0863] Cells may be identified and/or sorted by methods known in the art such as FACS or Miltenyi cliniMACS system.

[0864] The disclosure also provides a method for preparing a purified population of cells enriched for cells expressing a POI (e.g., SAR) which comprises the step of selecting cells expressing a POI (e.g., a SAR) from a population of cells using the method described above. The disclosure also provides a purified population of POI-expressing cells prepared by such a method. In the purified population of cells, at least 80%, 85%, 90% or 95% of the cells may express a POI (and a multipurpose switch polypeptide according to the disclosure).

[0865] The disclosure also provides a method for tracking transduced cells in vivo which comprises the step of detection of expression of the polypeptide of the disclosure at the cell surface. Cells may be tracked in vivo by methods known in the art such as bioluminescence imaging. For such applications, the polypeptide of the disclosure may be engineered to be co-expressed with a detectable protein, such as luciferase.

[0866] The disclosure also provides a method for deleting cells transduced by a vector according to the disclosure, which comprises the step of exposing the cells to an agent that binds to the multipurpose switch polypeptide. In an embodiment, the agent binds to the D2 domain of the multipurpose switch polypeptide. In an embodiment, the agent is an antibody (e.g., rituximab, ertibtrux or J6M0) and cells are exposed to the antibody in the presence of complement. In an embodiment, the agent is an antibody drug conjugate (e.g., belantamab mafodotin, T-DM1 or Enhertu etc.). In an embodiment, the multipurpose switch comprises tBCMA or the variants or fragments thereof and the agent is J6M0 or belantamab mafodotin. In an embodiment, the multipurpose switch comprises tHer2 or the variants or fragments thereof and the agent is Herceptin, T-DMlor Enhertu. In an embodiment, the multipurpose switch comprises RQR8 or the variants or fragments thereof and the agent is rituximab. In an embodiment, the multipurpose switch comprises tEGFR or the variants or fragments thereof and the agent is Erbitrux.

[0867] When the multipurpose switch polypeptide of the disclosure is expressed at the surface of a cell, binding of the agent (e.g., rituximab) to the D2 domain of the polypeptide causes lysis of the cell. More than one molecule of agent (e.g., Rituximab) may bind per multipurpose switch polypeptide expressed at the cell surface.

[0868] Deletion of cells may occur in vivo, for example by administering the agent (e.g., Rituximab, Herceptin, Erbitrux, J6M0, belantamab mafodotin, T-DM1 or Enhertu etc.) to a patient. The decision to delete the transferred cells may arise from undesirable effects being detected in the patient which are attributable to the transferred cells. For example, unacceptable levels of toxicity may be detected. The dose, route and frequency of administration of the different agent is known in the art and will vary depending on the agent and clinical condition of the subject. In an embodiment, more than one dose of the agent is administered.

[0869] Adoptive transfer of genetically modified T cells is an attractive approach for generating desirable immune responses, such as an anti-tumor immune response. The disclosure provides a method for treating and/or preventing a disease in a subject, which comprises the step of administering a cell according to the disclosure to the subject. The method may comprise the step of administering a population of cells to a subject. The population of cells may be enriched for cells expressing a transgene of interest using a method described above.

The method may involve the following steps:
[0870] (i) taking a sample of cells, such as a blood sample from a patient,
[0871] (ii) extracting the T-cells,
[0872] (iii) transducing or transfecting the T cells with a vector of the disclosure which comprises a nucleic acid sequence encoding the multipurpose switch and a transgene (e.g., SAR) of interest,
[0873] (iv) expanding the transduced cells ex-vivo
[0874] (v) returning the cells to the patient.
   The transduced cells may possess a desired therapeutic property such as enhanced tumor specific targeting and killing.

[0875] A technical challenge with the next generation SAR constructs (e.g., SIR, zSIR, Ab-TCR, HIT, STAR etc.) is the lack of an easy method for their detection, isolation, purification or depletion. The addition of the kill switches on the CAR constructs have been described but suffer from the problems of interfering with the SAR binding to its target antigen and/or off-target signaling. The applicant has discovered that cytokines (e.g., IL2 and 1L15 etc.) can be fused in frame to the membrane anchored form of a molecule (e.g., BCMA, CD30 etc.) without interfering with their binding and signaling activity. The disclosure provides cytokines (e.g., IL2 and IL15 etc.) and their low affinity variants fused to a membrane anchored molecule (e.g., BCMA or CD30). As there are FDA approved antibodies and antibody drug conjugates available against BCMA and CD30 (e.g. Adcetris), these molecules can be used as kill switches to eradicate cells (e.g., SAR-cells) expressing them in case of toxicity.

[0876] The fusion construct may also comprise one or more epitope tags (e.g., cetuximab mimotope, rituximab tag, Herceptin mimotope, MYC tag, StreptagII etc.) that can be used for detection, isolation, purification and or depletion of the cells expressing them, including SAR expressing cells. Exemplary epitope tags are known in the literature (e.g., SEQ ID NO: 3423-3434. These epitope tags can be used for detection, isolation, purification and or depletion of the immune cells (e.g., SAR-expressing NK or T cells) using the methods described in PCT/US2021/022641.

[0877] The article of manufacture can comprise a container and a label or package insert on or associated with the container. Suitable containers include, for example, bottles, vials, syringes, etc. The containers may be formed from a variety of materials such as glass or plastic. Generally, the container holds a composition which is effective for treating a disease or disorder described herein, and may have a sterile access port (for example the container may be an intravenous solution bag or a vial having a stopper pierceable by a hypodermic injection needle). At least one active agent in the composition is an effector cell presenting on its surface an SAR of the disclosure. The label or package insert indicates that the composition is used for treating the particular condition. The label or package insert will further comprise instructions for administering the SAR effector cell composition to the patient. Articles of manufacture and kits comprising combinatorial therapies described herein are also contemplated.

[0878] Package insert refers to instructions customarily included in commercial packages of therapeutic products that contain information about the indications, usage, dosage, administration, contraindications and/or warnings concerning the use of such therapeutic products. In some embodiments, the package insert indicates that the composition is used for treating a target antigen-positive cancer (such as adrenocortical carcinoma, bladder cancer, breast cancer, cervical cancer, cholangiocarcinoma, colorectal cancers, esophageal cancer, glioblastoma, glioma, hepatocellular carcinoma, head and neck cancer, kidney cancer, lung cancer, melanoma, mesothelioma, multiple myeloma, pancreatic cancer, pheochromocytoma, plasmacytoma, neuroblastoma, ovarian cancer, prostate cancer, sarcoma, stomach cancer, uterine cancer or thyroid cancer). In other embodiments, the package insert indicates that the composition is used for treating a target antigen-positive viral infection (for example infection by CMV, EBV, HCV etc.).

[0879] Additionally, the article of manufacture may further comprise a second container comprising a pharmaceutically acceptable buffer, such as bacteriostatic water for injection (BWFI), phosphate-buffered saline, Ringer's solution and dextrose solution. It may further include other materials desirable from a commercial and user standpoint, including other buffers, diluents, filters, needles, and syringes.

[0880] Kits are also provided that are useful for various purposes, e.g., for treatment of a target antigen-positive disease or disorder described herein, optionally in combination with the articles of manufacture. Kits of the disclosure include one or more containers comprising an SAR effector cell composition (or unit dosage form and/or article of manufacture), and in some embodiments, further comprise another agent (such as the agents described herein) and/or instructions for use in accordance with any of the methods described herein. The kit may further comprise a description of selection of individuals suitable for treatment.

[0881] Instructions supplied in the kits of the disclosure are typically written instructions on a label or package insert (e.g., a paper sheet included in the kit), but machine-readable instructions (e.g., instructions carried on a magnetic or optical storage disk) are also acceptable.

[0882] For example, in some embodiments, the kit comprises a composition comprising an effector cell presenting on its surface an SAR. In some embodiments, the kit comprises a) a composition comprising an effector cell presenting on its surface an SAR, and b) an effective amount of at least one other agent, wherein the other agent increases the expression of MHC proteins and/or enhances the surface presentation of peptides by MHC proteins (e.g., IFNy, IFNP, IFNa, or Hsp90 inhibitor). In some embodiments, the kit comprises a) a composition comprising an effector cell presenting on its surface an SAR, and b) instructions for administering the SAR effector cell composition to an individual for treatment of a target antigen-positive disease (such as cancer or viral infection). In some embodiments, the kit comprises a) a composition comprising an effector cell presenting on its surface an SAR, b) an effective amount of at least one other agent, wherein the other agent increases the expression of MHC proteins and/or enhances the surface presentation of peptides by MHC proteins, and c) instructions for administering the SAR effector cell composition and the other agent(s) to an individual for treatment of a target antigen-positive disease (such as cancer or viral infection). The SAR effector cell composition and the other agent(s) can be present in separate containers or in a single container. For example, the kit may comprise one distinct composition or two or more compositions wherein one composition comprises the SAR effector cell and another composition comprises the other agent.

[0883] In some embodiments, the kit comprises a) a composition comprising an SAR, and b) instructions for combining the SAR with effector cells (such as effector cells, e.g., T cells or natural killer cells, derived from an individual) to form a composition comprising the effector cells presenting on their surface the SAR and administering the SAR effector cell composition to the individual for treatment of a target antigen-positive disease (such as cancer or viral infection). In some embodiments, the kit comprises a) a composition comprising an SAR, and b) an effector cell (such as a cytotoxic cell).

[0884] In some embodiments, the kit comprises a) a composition comprising an SAR, b) an effector cell (such as a cytotoxic cell), and c) instructions for combining the SAR with the effector cell to form a composition comprising the effector cell presenting on its surface the SAR and administering the SAR effector cell composition to an individual for the treatment of a target antigen-positive disease (such as cancer or viral infection).

[0885] In some embodiments, the kit comprises a nucleic acid (or set of nucleic acids) encoding an SAR. In some embodiments, the kit comprises a) a nucleic acid (or set of nucleic acids) encoding an SAR, and b) a host cell (such as an effector cell) for expressing the nucleic acid (or set of nucleic acids). In some embodiments, the kit comprises a) a nucleic acid (or set of nucleic acids) encoding an SAR, and b) instructions for i) expressing the SAR in a host cell (such as an effector cell, e.g., a T cell), ii) preparing a composition comprising the host cell expressing the SAR, and iii) administering the composition comprising the host cell expressing the SAR to an individual for the treatment of a target antigen-positive disease (such as cancer or viral infection). In some embodiments, the host cell is derived from the individual. In some embodiments, the kit comprises a) a nucleic acid (or set of nucleic acids) encoding an SAR, b) a host cell (such as an effector cell) for expressing the nucleic acid (or set of nucleic acids), and c) instructions for i) expressing the SAR in the host cell, ii) preparing a composition comprising the host cell expressing the SAR, and iii) administering the composition comprising the host cell expressing the SAR to an individual for the treatment of a target antigen-positive disease (such as cancer or viral infection).

[0886] The kits of the disclosure are in suitable packaging. Suitable packaging includes, but is not limited to, vials, bottles, jars, flexible packaging (e.g., sealed Mylar or plastic bags), and the like. Kits may optionally provide additional components such as buffers and interpretative information. The present application thus also provides articles of manufacture, which include vials (such as sealed vials), bottles, jars, flexible packaging, and the like.

[0887] The instructions relating to the use of the SAR effector cell compositions generally include information as to dosage, dosing schedule, and route of administration for the intended treatment. The containers may be unit doses, bulk packages (e.g., multi-dose packages) or sub-unit doses. For example, kits may be provided that contain sufficient dosages of an SAR effector cell composition as disclosed herein to provide effective treatment of an individual for an extended period, such as any of a week, 8 days, 9 days, 10 days, 11 days, 12 days, 13 days, 2 weeks, 3 weeks, 4 weeks, 6 weeks, 8 weeks, 3 months, 4 months, 5 months, 7 months, 8 months, 9 months, or more. Kits may also include multiple unit doses of the SAR and pharmaceutical compositions and instructions for use and packaged in quantities sufficient for storage and use in pharmacies, for example, hospital pharmacies and compounding pharmacies.

[0888] The disclosure provides vL, vH and scFv targeting a membrane exposed epitope of Heat shock protein 70 (Hsp70) (Table 47). The disclosure also provides SAR targeting Hsp70 based on these vL, vH and scFv polypeptides targeting Hsp70. The SEQ ID of exemplary SARs targeting Hsp70 are provided in (SEQ ID NO (DNA): 7754-7808 and SEQ ID NO (PRT): 8446-8500). The SARs are expressed in immune cells (e.g., T cells and NK cells etc.) using lentiviral mediated gene transfer and tested for cytotoxicity against Hps70 expressing Daudi cells using in vitro and in vivo assays described in this disclosure.

[0889] In vivo delivery of SARs with a number of different backbones is tested in a patient with Acute lymphocytic leukemia. A number of delivery methods are tried, including lentiviral mediated gene transfer and gene transfer with viral like particles. It is observed that SARs with the backbone of a SIR, a cTCR and Ab-TCR are safer for in vivo gene delivery as compared with the SAR with the backbone of a 1^{st} generation CAR, a 2^{nd} generation CAR, a 3^{rd} generation CAR, a TFPε, TFPγ, TFPδ, TFPƒ, CD16-SAR, NKp30-SAR, NKp44-SAR, NKp46-SAR, DAP10-SAR, or NKG2D SAR. It is observed that the lentiviral vectors encoding a CD19-SAR with the backbone of a SIR, acTCR and Ab-TCR insert less frequently in circulating CD19-expressing B-ALL cells as compared to the lentiviral vectors encoding a SAR with the backbone of a 1^{st} generation CAR, a 2^{nd} generation CAR, a 3^{rd} generation CAR, a TFPε, TFPγ, TFPδ, TFPƒ, CD16-SAR, NKp30-SAR, NKp44-SAR, NKp46-SAR, DAP10-SAR, or NKG2D SAR. It is further observed that even upon insertion, SARs with the backbone of a SIR, acTCR and Ab-TCR do not express in circulating CD19-expressing B-ALL cells while good expression of SAR with the backbone of a 1” generation CAR, a 2^{nd} generation CAR, a 3rd generation CAR, a TFPε, TFPγ, TFPδ, TFPƒ, CD16-SAR, NKp30-SAR, NKp44-SAR, NKp46-SAR, DAP10-SAR, or NKG2D SAR is observed in circulating B-ALL cells. It is further noted that the risk of relapse of B-ALL due to accidental insertion of the SAR is lower with the SARs with the backbones of SIR, a cTCR and Ab-TCR as compared with the SAR with the backbone of a 1” generation CAR, a 2^{nd} generation CAR, a 3^{rd} generation CAR, a TFPε, TFPγ, TFPδ, TFPƒ, CD16-SAR, NKp30-SAR, NKp44-SAR, NKp46-SAR, DAP10-SAR, or NKG2D SAR.

[0890] It has been observed that CAR-T cells targeting antigens (e.g., mesothelin, PSMA etc.) expressed on solid tumor show poor expansion upon infusion into the patient. The current disclosure provides a solution to this problem by providing SARs that can target antigens that are expressed on blood cells (e.g., CD19, BCMA, CD20 etc.). Such SARs can be co-expressed in the immune cells along with SARs targeting solid tumors to provide proliferative advantage to the SAR-T cells targeting the solid tumor. For example, a SAR targeting CD19 (SEQ ID NO: 7660) can be co-expressed in immune cells (e.g., T cells or NK cells) with a SAR targeting PSMA (SEQ ID NO: 7617) or a SAR targeting Her2. It is observed that the immune cells (e.g., T cells or NK cells) expressing PSMA SAR and also co-expressing the CD19 SAR show greater proliferation and in vivo persistence as compared to immune cells expressing the PSMA SAR alone. A unique advantage of the SAR of the current disclosure for generating bispecific or multi-specific immune cells (e.g., bispecific or multispecific CAR-T or CAR-NK cells) is based on their relatively small size as compared to the 1” generation or the 2^{nd} generation CARs. Therefore, they can be easily packaged in the viral vectors (e.g., lentiviral or retroviral vectors). In addition, the SARs of the current disclosure comprise many different signaling chains (e.g., CD16, NKp30, NKp44, NKp46, DAP10, NKG2D, CD3z etc.). The SARs with different signaling chains (i.e., backbones) can be combined so as to generate a variety of bispecific and multispecific SARs that do not compete with each other for signaling proteins. Thus, the SARs of the current disclosure can be used to generate a diverse immune response.

[0891] As stated previously, there is a packaging limit to the size of the lentivirus inserts. The disclosure describes the use of internal ribosomal entry sequence (IRES) from human herpes virus 8 (Kaposi's sarcoma associated herpes virus or KSHV) for expression of a gene for cell therapy and other genetic engineering applications. As compared to other known IRES, the KSHV IRES (SEQ ID NO: 7116) is relatively small in size and therefore can be easily packaged in viral vectors. We generated a lentiviral vector encoding a double chain SIR in which tBCMA was expressed after the SIR cassette using an intervening KSHV IRES sequence. We observed effective expression of tBCMA in T cells infected with the lentiviral vector. We also observed good titer of the resulting lentiviral vector when packaged in 293FT cells using standard packaging mix. We also observed high level expression of the SIR in the T cells, suggesting that presence of KSVH IRES does not impact the expression of the upstream SIR. Both the expression of the SIR and tBCMA in the T cells infected with the above construct compared favorably to their expression in T cells infected with a lentiviral vector in which the tBCMA was expressed using a F2A ribosomal skip sequence.

[0892] The disclosure contemplates the following exemplary inventive aspects:

[0893] Aspect 1. A synthetic antigen receptor (SAR) that specifically binds to a target antigen, the SAR comprising: (i) a first module comprising one or more heterologous antigen binding domains selected from the group consisting of: a) an antibody; b) an antibody fragment; c) a heavy chain variable region of an antibody (vH domain) or a fragment thereof, d) a light chain variable region of an antibody (vL domain) or a fragment thereof, e) a single chain variable fragment (scFv) or a fragment thereof, f) a single domain antibody (SDAB) or a fragment thereof, g) a vHH domain or a fragment thereof, h) a monomeric variable region of an antibody; i) a single vH domain (SVH) or a fragment thereof, j) a single vL domain (SVL) or a fragment thereof, k) a non-immunoglobulin antigen binding scaffold selected from a DARPIN, an affibody, an affilis, an adnectin, an affitin, an obody, an repebody, an fynomer, an alphabody, an avimer, an atrimer, an centyrin, an pronecti, an anticalins, an kunitz domain, an Armadillo repeat protein, a D domain, and a fragment of any of the foregoing; l) a ligand-binding domain of a receptor or a fragment thereof, m) a receptor-binding domain of a ligand; n) a bispecific-antibody, -antibody fragment, -scFV, -vHH, -SDAB, -non-immunoglobulin antigen binding scaffold, -receptor or -ligand; o) an autoantigen or a fragment thereof, p) an adaptor binding domain or a fragment thereof, q) an Fc binding domain or a fragment thereof, r) a TCR or an HLA-independent TCR or a fragment thereof, and s) Va, Vb, Vg or Vd fragment of a TCR or a fragment thereof, (ii) a second module that comprise at least one membrane associated domain, wherein the membrane associated domain can be a transmembrane domain or a membrane anchoring domain; and (iii) an optional third module comprising one or more cytosolic domains, where the first, second, and the optional third modules are operationally linked via one or more optional linkers.

[0894] Aspect 2. A single chain SAR of aspect 1, where the first module comprising one or more heterologous antigen binding domains are operationally linked via optional linkers to a polypeptide comprising: (1) the entire or partial extracellular antigen binding domain, optional hinge domain, transmembrane/membrane associated domain and optional cytosolic domain of a naturally occurring receptor or a fragment or variant thereof, or (2) the hinge domain, transmembrane/membrane associated domain and optional cytosolic domain of a naturally occurring receptor or a fragment or variant thereof; or (3) the transmembrane/membrane associated domain and optional cytosolic domain of a naturally occurring receptor or a fragment or variant thereof, or (4) cytosolic domain of a naturally occurring receptor or a fragment or variant thereof; or (5) the entire or partial extracellular domain, the hinge domain, the transmembrane domain and cytosolic domain of a signaling adaptor or a variant or a fragment thereof.

[0895] Aspect 3. A SAR of aspect 2, wherein a) the naturally occurring receptor does not comprise a T cell receptor selected from the group consisting of TCRα, TCRβ, TCRγ, TCRδ and preTCRα; and/or b) the naturally occurring receptor does not comprise a T cell receptor module (TCRM); and/or c) the signaling adaptor is not a CD3 adaptor selected from the group of CD3ƒ, CD3γ, CD3E and CD36; and/ord) the signaling adaptor is not FcRγ.

[0896] Aspect 4. A SAR of aspects 2 or 3, wherein the naturally occurring receptor is a Type I membrane protein with an N-terminal extracellular domain and the N-terminus of a polypeptide comprising one or more heterologous antigen binding domains is operationally linked via optional linkers to the N-terminus or near the N-terminus of the polypeptide comprising the a) the entire or partial extracellular antigen binding domain, optional hinge domain, transmembrane/membrane associated domain and optional cytosolic domain of the naturally occurring receptor polypeptide chain or a fragment or variant thereof, or b) the hinge domain, transmembrane/membrane associated domain and optional cytosolic domain of the naturally occurring receptor polypeptide chain or a fragment or variant thereof, or c) the transmembrane/membrane associated domain and optional cytosolic domain of the naturally occurring receptor polypeptide chain or a fragment or variant thereof, or d) cytosolic domain of the naturally occurring receptor polypeptide chain or a fragment or variant thereof.

[0897] Aspect 5. A SAR of aspect 4, wherein the naturally occurring receptor Type I membrane protein is selected from the group consisting of CD16A, CD16B, CD64, CD32, NKp30, NKp44, NKp46, KIR2DL1, KIR2DL2, KIR2DL3, KIR2DL5A, KIR2DL5B, KIR3DL1, KIR3DL2, KIR3DL4, KIR2DL4, KIR2DS1, KIR2DS2, KIR2DS3, KIR2DS4, KIR2DS5, KIR3DS1, DNAM-1, 2B4, OX40, CD28, 4-1BB, CD27, CD81, CD2, CD5, TNFR-I, TNFR-II, Fas, CD30, CD40, CRTAM, TIGIT, CD96, SLAMF6, SLAMF7, CD100, CD160, CEACAM, ILT2, LAIR1, variants and fragments thereof.

[0898] Aspect 6. A SAR of aspects 2 or 3, wherein the naturally occurring receptor is a Type II membrane protein with a C-terminal extracellular domain and the N-terminus of a polypeptide encoding one or more heterologous antigen binding domains is operationally linked via optional linkers to the C-terminus or near the C-terminus of a polypeptide comprising: a) the entire or partial extracellular antigen binding domain, optional hinge domain, transmembrane/membrane associated domain and optional cytosolic domain of the naturally occurring receptor polypeptide chain or a fragment or variant thereof, or b) the hinge domain, transmembrane/membrane associated domain and optional cytosolic domain of the naturally occurring receptor polypeptide chain or a fragment or variant thereof, or c) the transmembrane/membrane associated domain and optional cytosolic domain of the naturally occurring receptor polypeptide chain or a fragment or variant thereof, or d) cytosolic domain of the naturally occurring receptor polypeptide chain or a fragment or variant thereof.

[0899] Aspect 7. A SAR of aspect 6, further comprising the N-terminus of a polypeptide comprising the cytosolic domain of a signaling adaptor operationally linked to the N-terminus of the Type II membrane protein.

[0900] Aspect 8. The SAR of aspect 7, wherein the signaling adaptor is selected from the group of CD3ƒ, FcRγ, DAP10 or DAP10.

[0901] Aspect 9. The SAR of aspect 8, further comprising the N-terminus of a polypeptide comprising one or more co-stimulatory domains operationally linked to the N-terminus of the cytosolic domain of the signaling adaptor.

[0902] Aspect 10. The SAR of aspect 9, wherein the one or more co-stimulatory domains are selected from the group consisting of CD28, 4-1BB, OX40, 2B4, CD27, CD81, CD2, CD5, BAFF-R, CD30, CD40, HVEM and ICOS.

[0903] Aspect 11. The SAR of aspect 10, which is co-expressed with an accessory module comprising DAP10.

[0904] Aspect 12. A SAR of anyone of aspects 6-10, wherein the naturally occurring receptor Type II membrane protein is selected from the group consisting of NKG2D, NKG2C, NKG2A, NKG2E, NKG2F, KLRG1, CD94, CD161, variants thereof and fragments thereof.

[0905] Aspect 13. A SAR of aspect 3, wherein the entire or partial extracellular antigen binding domain, the optional hinge domain, the transmembrane domain and the optional cytosolic domain are all derived from a single naturally occurring receptor and are present in one continuous polypeptide chain.

[0906] Aspect 14. A SAR of aspect 2, wherein the entire or partial extracellular antigen binding domain, the optional hinge domain, the transmembrane domain and the optional cytosolic domain are derived from two or more different naturally occurring receptor.

[0907] Aspect 15. A SAR of aspect 14, wherein a) the entire or partial extracellular antigen binding domain of a naturally occurring receptor is operationally linked to the optional hinge domain, the transmembrane domain and the optional cytosolic domain derived from one or more different naturally occurring receptors; or b) the entire or partial extracellular antigen binding domain and the optional hinge domain of a naturally occurring receptor is operationally linked to the transmembrane domain and the optional cytosolic domain derived from one or more different naturally occurring receptors; or c) the entire or partial extracellular antigen binding domain, the optional hinge and transmembrane domain of a naturally occurring receptor is operationally linked to a cytosolic domain derived from one or more different naturally occurring receptors.

[0908] Aspect 16. A SAR of aspect 2, wherein the cytosolic domain comprises an activation domain comprising ITAMs.

[0909] Aspect 17. A SAR of aspect 2, wherein the cytosolic domain lacks an activation domain comprising ITAMs.

[0910] Aspect 18. A SAR of aspect 2, wherein the cytosolic domain recruits one or more signaling adaptor selected from the group of CD3ƒ, FcRγ, DAP10 and/or DAP10.

[0911] Aspect 19. A SAR of aspect 2, wherein the cytosolic domain comprises one or more co-stimulatory domains.

[0912] Aspect 20. The SAR of aspect 2, wherein the one or more co-stimulatory domains are selected from the group consisting of CD28, 4-1BB, OX40, 2B4, CD27, CD81, CD2, CD5, BAFF-R, CD30, CD40, HVEM, ICOS, a variant thereof and a fragment thereof.

[0913] Aspect 21. A SAR of aspect 2, where the cytosolic domain lacks a co-stimulatory domain.

[0914] Aspect 22. A SAR of aspect 2, where the cytosolic domain comprises one or more co-stimulatory domains that are located between the transmembrane domain and the activation domain.

[0915] Aspect 23. A SAR of aspect 2, where the naturally occurring receptor is selected from the group consisting of CD16A, CD16B, CD64, CD32, NKp30, NKp44, NKp46, KIR2DL1, KIR2DL2, KIR2DL3, KIR2DL5A, KIR2DL5B, KIR3DL1, KIR3DL2, KIR3DL4, KIR2DL4, KIR2DS1, KIR2DS2, KIR2DS3, KIR2DS4, KIR2DS5, KIR3DS1, NKG2D, NKG2C, NKG2A, NKG2E, NKG2F, DNAM-1, 2B4, OX40, CD28, 4-1BB, CD27, CD81, CD2, CD5, TNFR-I, TNFR-II, Fas, CD30, CD40, CRTAM, TIGIT, CD96, SLAMF6, SLAMF7, CD100, CD160, CEACAM, ILT2, KLRG1, LAIR1, CD161, variants thereof and fragments thereof.

[0916] Aspect 24. A SAR of aspects 2 and 3, wherein the SAR retains partially or completely the antigen binding property of the extracellular antigen binding domain of the naturally occurring receptor and acquires the antigen binding specificities of the one or more heterologous antigen binding domains located in the first module.

[0917] Aspect 25. A SAR of aspect 1, which when expressed on the surface of a cell is able to confer MHC (or HLA)-dependent and/or MHC (or HLA)-independent antigen recognition on the cell, and wherein a) the antigen binding domain of the SAR is not comprised of a single continuous polypeptide chain; and/or b) the antigen binding domain(s) of the SAR are not derived from an antibody or an antibody fragment; and/or c) the SAR does not comprise a T cell receptor module.

[0918] Aspect 26. A SAR of aspect 25, wherein the antigen recognition domain of the SAR is derived from at least two variable domains of a TCR.

[0919] Aspect 27. A SAR of aspect 26, wherein the two variable domains comprise a heterodimer of at least two variable domains selected from Vα, Vβ, Vγ, Vδ and preTCRα.

[0920] Aspect 28. A SAR of aspect 27, wherein the two variable domains are Vα and VP or Vγ and V6.

[0921] Aspect 29. A SAR of aspect 28, wherein the two variable domains are not linked by a flexible peptide linker.

[0922] Aspect 30. A SAR of aspect 29, which is not a single chain TCR (sc-TCR).

[0923] Aspect 31. A SAR of aspect 25, which has two chain and at least one chain is membrane associated.

[0924] Aspect 32. A SAR of aspect 31, wherein both chains are membrane associated.

[0925] Aspect 33. A SAR of aspect 25, which can bind to a peptide in complex with an MHC (HLA) molecule.

[0926] Aspect 34. A SAR of aspect 25, which when expressed on the surface of a cell confers on it the ability to recruit at least one signaling adaptor when bound by a peptide/MHC complex.

[0927] Aspect 35. A SAR of aspect 25, which when expressed on the surface of a cell confers on it the ability to initiate at least one signaling pathway when bound by a peptide/MHC complex.

[0928] Aspect 36. A SAR of aspect 25, which can be functionally expressed in a non-T cell.

[0929] Aspect 37. A SAR of aspect 36, which can be functionally expressed in a cell that lacks the expression of a functional CD3 complex.

[0930] Aspect 38. A SAR of aspect 37, which can be functionally expressed in a cell that lacks the functional expression of CD3γ and CD3δ and CD3δ chains.

[0931] Aspect 39. A SAR of aspect 36, which can confer T cell like antigen recognition to a non-T cell.

[0932] Aspect 40. A SAR of aspect 36, which can confer T cell like antigen recognition to a T cell that lacks the functional expression of CD3γ and CD3δ and CD3ε chains.

[0933] Aspect 41. A SAR of aspect 36, which can confer T cell like signaling upon antigen recognition to a non-T cell.

[0934] Aspect 42. A SAR of aspect 36, which can confer T cell like signaling to a T cell that lacks the functional expression of CD3γ and CD3δ and CD3ε chains.

[0935] Aspect 43. A SAR of aspect 222, which can confer T cell like antigen recognition to any cell.

[0936] Aspect 44. A SAR of aspect 1, comprising at least two chains wherein a) a first polypeptide chain comprises a first antigen-binding domain comprising a vL, a Vα or a Vγ domain and a first Membrane associated module (MAM); and b) a second polypeptide chain comprises a second antigen-binding domain comprising a vH, a Vβ or a Vδ domain and a second Membrane associated module (MAM); wherein the vL, Vα or Vγ domain of the first antigen-binding domain and the complementary vH, Vβ or Vδ domain of the second antigen-binding domain form a Fv- or TCR-Fv like antigen-binding module that specifically binds to the target antigen; and wherein the first MAM and the second MAM form a non-T cell receptor module (NTCRM) that is capable of activating at least one signaling pathway and/or recruiting at least one signaling adaptor.

[0937] Aspect 45. The SAR of aspect 44, where the first polypeptide chain further comprises a first peptide linker between the first antigen-binding domain and the first MAM, and the second polypeptide chain further comprises a second peptide linker between the second antigen-binding domain and the second MAM.

[0938] Aspect 46. The SAR of aspect 45, wherein the first and/or second peptide linkers comprise, individually, a constant domain or fragment thereof from an immunoglobulin or T cell receptor subunit.

[0939] Aspect 47. The SAR of aspect 46, wherein the first and/or second peptide linkers comprise, individually, a CH1, CH2, CH3, CH4 or CL antibody domain, or a fragment thereof.

[0940] Aspect 48. The SAR of aspect 46, wherein the first and/or second peptide linkers comprise, individually, a Cα, Cβ, Cγ, or Cδ TCR domain, or a fragment thereof.

[0941] Aspect 49. The SAR of aspects 44 or 45, wherein the first polypeptide chain and the second polypeptide chain are linked via one or more disulfide bonds.

[0942] Aspect 50. The SAR of aspect 45, wherein first and/or second peptide linkers comprise mutations that increase the expression, affinity and/or pairing of the two polypeptide chains.

[0943] Aspect 51. The SAR of aspect 45, wherein the first and/or second peptide linkers comprise a sequence as set forth in any one of SEQ ID NO: 3536-3569 and 9627-9631, 10832-10841, and 12304-12311 or a sequence with at least 70% identity thereto.

[0944] Aspect 52. The SAR of aspect 44, wherein the first polypeptide further comprises a first hinge domain or fragment thereof N-terminal to the first MAM; and/or wherein the second polypeptide further comprises a second hinge domain or fragment thereof N-terminal to the second MAM.

[0945] Aspect 53. A SAR of aspect 44, comprising a disulfide bond between a residue in the first MAM and the second MAM and/or a residue in the first hinge domain and a residue in the second hinge domain.

[0946] Aspect 54. A SAR of aspect 44, wherein the first polypeptide further comprises a first homologous antigen binding domain or fragment thereof N-terminal to the first hinge domain and/or the second polypeptide further comprises a second homologous antigen binding domain or fragment thereof N-terminal to the second hinge domain, wherein the two homologous antigen binding domains are derived from the same naturally occurring non-T cell receptor as the corresponding hinge domains.

[0947] Aspect 55. A SAR of aspect 44, wherein the first polypeptide further comprises a first cytosolic domain containing an optional activation domain C-terminal to the first transmembrane/membrane-anchoring domain comprising the first MAM; and/or wherein the second polypeptide further comprises a second cytosolic containing an optional activation domain C-terminal to the second transmembrane/membrane anchoring domain comprising the second MAM.

[0948] Aspect 56. The SAR of aspect 44, wherein the first polypeptide chain further comprises a first accessory intracellular domain comprising a co-stimulatory domain sequence C-terminal to the first transmembrane/membrane anchoring domain of the first MAM; and/or wherein the second polypeptide chain further comprises a second accessory intracellular domain comprising a co-stimulatory domain sequence C-terminal to the second transmembrane/membrane anchoring domain comprising the second MAM.

[0949] Aspect 57. A SAR of aspect 56, wherein the co-stimulatory domain is selected from CD28, 4-1BB, OX40, 2B4, CD27, CD81, CD2, CD5, BAFF-R, CD30, CD40, HVEM or ICOS, or a variant or a fragment thereof.

[0950] Aspect 58. A SAR of aspect 44, wherein the first and/or the second MAM and the NTCRM are comprised of the transmembrane/membrane anchored domain, optional cytosolic domain, optional hinge domain and/or optional extracellular domain of a non-T cell receptor and/or a signaling adaptor.

[0951] Aspect 59. A SAR of aspect 58, wherein the first and/or the second MAM and the NTCRM are comprised of the transmembrane/membrane anchored domain, optional cytosolic domain, optional hinge domain and/or optional extracellular domain that are all derived from a single non-T cell receptor and/or a signaling adaptor or variants thereof.

[0952] Aspect 60. A SAR of aspect 58, wherein the first and/or the second MAM and the NTCRM are comprised of the transmembrane/membrane anchored domain, optional cytosolic domain, optional hinge domain and/or optional extracellular domain that are derived from different non-T cell receptor and/or a signaling adaptor or variants thereof.

[0953] Aspect 61. A SAR of aspect 58, wherein the two transmembrane/membrane anchored domains, optional cytosolic domains, optional co-stimulatory domain, optional hinge domains and/or optional extracellular domains are identical in sequence and are derived from the same protein.

[0954] Aspect 62. A SAR of aspect 58, wherein the two transmembrane/membrane anchored domains, optional cytosolic domains, optional co-stimulatory domain, optional hinge domains and/or optional extracellular domains are different in sequence and/or are derived from different proteins.

[0955] Aspect 63. A SAR of aspect 58, wherein a) the non T cell receptor is a naturally occurring receptor and is selected from the group consisting of: CD16A, CD16B, CD64, CD32, NKp30, NKp44, NKp46, KIR2DL1, KIR2DL2, KIR2DL3, KIR2DL5A, KIR2DL5B, KIR3DL1, KIR3DL2, KIR3DL4, KIR2DL4, KIR2DS1, KIR2DS2, KIR2DS3, KIR2DS4, KIR2DS5, KIR3DS1, NKG2D, NKG2C, NKG2A, NKG2E, NKG2F, DNAM-1, 2B4, OX40, CD28, 4-1BB, CD27, CD81, CD2, CD5, TNFR-I, TNFR-II, Fas, CD30, CD40, CRTAM, TIGIT, CD96, SLAMF6, SLAMF7, CD100, CD160, CEACAM, ILT2, KLRG1, LAIR1, CD161, a variant of any of the foregoing, and fragments thereof; and b) the signaling adaptor is selected from the group consisting of: CD3ƒ, FcRγ, DAP10, a variant of any of the foregoing and a fragments thereof.

[0956] Aspect 64. The SAR of aspect 44, wherein a) the first MAM and the second MAM do not comprise the transmembrane domain and optionally the cytosolic domain of a CD3 chain selected from CD3ε, CD3γ, CD3δ or CD3ƒ; and/or b)the first MAM and the second MAM do not comprise the transmembrane domain of a TCR chain and a CD3 chain; and/or c) the first MAM and the second MAM do not comprise the transmembrane domain of CD3ƒ.

[0957] Aspect 65. A SAR of aspect 44, wherein only one of the MAM is derived from a T cell receptor selected from the group consisting of TCRα, TCRβ, TCRγ, TCRδ and preTCRα.

[0958] Aspect 66. A SAR of aspect 1, comprising at least two chains wherein a) a first polypeptide chain comprises a first antigen-binding domain comprising a vL domain and a first TCR constant chain selected from TCRα, TCRβ, TCRγ or TCRδ or a variant thereof; and b) a second polypeptide chain comprises a second antigen-binding domain comprising a vH, domain and a second TCR constant chain selected from TCRα, TCRβ, TCRγ or TCRδ or a variant thereof; where the first TCR constant chain is constant chain of TCRα and the second TCR constant chain is constant chain of TCRβ, or where the first TCR constant chain is constant chain of TCRβ and the second TCR constant chain is constant chain of TCRα, or where the first TCR constant chain is constant chain of TCRγ and the second TCR constant chain is constant chain of TCRδ, or where the first TCR constant chain is constant chain of TCRδ and the second TCR constant chain is constant chain of TCRγ, or wherein the first TCR constant chain and/or the second TCR constant chain lacks amino acid residues at its N-terminal region wherein the vL and the vH domain form a Fv like antigen-binding module that specifically binds to a target antigen; and wherein the first TCR constant chain and the second TCR constant chain form a T cell receptor module (TCRM) that is capable of activating at least one signaling pathway and/or recruiting at least one signaling adaptor.

[0959] Aspect 67. A SAR of aspect 66, wherein a) the TCRα constant chain is represented by an amino acid sequence with SED ID NO (PRT): 7863-7963 or sequences with 80-99% homology thereto; and b) the TCRβ constant chain is represented by an amino acid sequence with SED ID NO (PRT): 7964-8089 or sequences with 80-99% homology thereto; and c) the TCRγ constant chain is represented by an amino acid sequence with SED ID NO (PRT): 8091-8191 or sequences with 80-99% homology thereto; and d) the TCRδ constant chain is represented by an amino acid sequence with SED ID NO (PRT): 8192-8292 or sequences with 80-99% homology thereto.

[0960] Aspect 68. A SAR of aspect 44 or 66, wherein the first and/or the second polypeptide chains further comprise one or more autonomous antigen binding domains (AABD) that are attached to the N-terminus or near the N-terminus of the first and/or the second antigen binding domains.

[0961] Aspect 69. The SAR of aspect 68, wherein the AABD is selected from one or more of a single vH domain (SVH), a single vL domain (SVL), a vHH domain, a single domain antibody, a single variable domain of a TCR (svd-TCR), a non-immunoglobulin antigen binding scaffold, a ligand-binding domain of a receptor, a receptor-binding domain of a ligand, an autoantigen, an adaptor binding domain, an Fc binding domain, a fragment thereof and/or a variant thereof.

[0962] Aspect 70. The SAR of aspect 1, wherein the module comprising one or more heterologous antigen-binding domains binds specifically to one or more target antigens selected from the group consisting of a) cell surface protein antigen, b) peptide/MHC complex, and c) lipid antigen.

[0963] Aspect 71. The SAR of aspect 1, wherein the target antigen is selected from the group consisting of: CD19; CD123; CD22; CD30; CD171; CS-1 (also referred to as CD2 subset 1, CRACC, SLAMF7, CD319, and 19A24); C-type lectin-like molecule-1 (CLL-1 or CLECL1); CD33; epidermal growth factor receptor variant III (EGFRviii); ganglioside G2 (GD2); ganglioside GD3; TNF receptor family member B cell maturation (BCMA); Tn antigen ((Tn Ag); prostate-specific membrane antigen (PSMA); Receptor tyrosine kinase-like orphan receptor 1 (ROR1); FmsLike Tyrosine Kinase 3 (FLT3); Tumor-associated glycoprotein 72 (TAG72); CD38; CD44v6; a glycosylated CD43 epitope expressed on acute leukemia or lymphoma but not on hematopoietic progenitors, a glycosylated CD43 epitope expressed on non-hematopoietic cancers, Carcinoembryonic antigen (CEA); Epithelial cell adhesion molecule (EPCAM); B7H3 (CD276); KIT (CD 117); Interleukin-13 receptor subunit alpha-2 (IL-13Ra2 or CD213A2); Mesothelin; Interleukin 11 receptor alpha (IL-llRa); prostate stem cell antigen (PSCA); Protease Serine 21 (Testisin or PRSS21); vascular endothelial growth factor receptor 2 (VEGFR2); Lewis(Y) antigen; CD24; Platelet-derived growth factor receptor beta (PDGFR-beta); Stage-specific embryonic antigen-4 (SSEA-4); CD20; Folate receptor alpha; Receptor tyrosine-protein kinase ERBB2 (Her2/neu); Mucin 1, cell surface associated (MUC1); epidermal growth factor receptor (EGFR); neural cell adhesion molecule (NCAM); Prostase; prostatic acid phosphatase (PAP); elongation factor 2 mutated (ELF2M); Ephrin B2; fibroblast activation protein alpha (FAP); insulin-like growth factor 1 receptor (IGF-I receptor), carbonic anhydrase IX (CAlX); Proteasome (Prosome, Macropain) Subunit, Beta Type, 9 (LMP2); glycoprotein 100 (gp100); oncogene fusion protein consisting of breakpoint cluster region (BCR) and Abelson murine leukemia viral oncogene homolog 1 (Abl) (bcr-abl); tyrosinase; ephrin type-A receptor 2 (EphA2); Fucosyl GM1; sialyl Lewis adhesion molecule (sLe); ganglioside GM3; transglutaminase 5 (TGS5); high molecular weight-melanoma associated antigen (HMWMAA); o-acetyl-GD2 ganglioside (OAcGD2); Folate receptor beta; tumor endothelial marker 1 (TEM1/CD248); tumor endothelial marker 7-related (TEM7R); claudin 6 (CLDN6); thyroid stimulating hormone receptor (TSHR); G protein coupled receptor class C group 5, member D (GPRC5D); chromosome X open reading frame 61 (CXORF61); CD97; CD179a; anaplastic lymphoma kinase (ALK); Polysialic acid; placenta-specific 1 (PLAC1); hexasaccharide portion of globoH glycoceramide (GloboH); mammary gland differentiation antigen (NY-BR-1); uroplakin 2 (UPK2); Hepatitis A virus cellular receptor 1 (HAVCR1); adrenoceptor beta 3 (ADRB3); pannexin 3 (PANX3); G protein-coupled receptor 20 (GPR20); lymphocyte antigen 6 complex, locus K 9 (LY6K); Olfactory receptor 51E2 (OR51E2); TCR Gamma Alternate Reading Frame Protein (TARP); Wilms tumor protein (WT1); Cancer/testis antigen 1 (NY-ESO-1); Cancer/testis antigen 2 (LAGE-la); Melanoma-associated antigen 1 (MAGE-A1); MAGE-A2, MAGE-A3, MAGE-A4, PRAME, PSA, ETS translocation-variant gene 6, located on chromosome 12p (ETV6-AML); sperm protein 17 (SPA17); X Antigen Family, Member 1A (XAGE1); angiopoietin-binding cell surface receptor 2 (Tie 2); melanoma cancer testis antigen-1 (MAD-CT-1); melanoma cancer testis antigen-2 (MAD-CT-2); Fos-related antigen 1; tumor protein p53 (p5³); p53 mutant; prostein; surviving; telomerase; prostate carcinoma tumor antigen-1 (PCT A-1 or Galectin 8), melanoma antigen recognized by T cells 1 (MelanA or MARTI); Rat sarcoma (Ras) mutant; human Telomerase reverse transcriptase (hTERT); sarcoma translocation breakpoints; melanoma inhibitor of apoptosis (ML-IAP); ERG (transmembrane protease, serine 2 (TMPRSS2) ETS fusion gene); N-Acetyl glucosaminyl-transferase V (NA17); paired box protein Pax-3 (PAX3); Androgen receptor; Cyclin Bl; v-myc avian myelocytomatosis viral oncogene neuroblastoma derived homolog (MYCN); Ras Homolog Family Member C (RhoC); Tyrosinase-related protein 2 (TRP-2); Cytochrome P450 lB 1 (CYPlB 1); CCCTC-Binding Factor (Zinc Finger Protein)-Like (BORIS or Brother of the Regulator of Imprinted Sites), Squamous Cell Carcinoma Antigen Recognized By T Cells 3 (SART3); Paired box protein Pax-5 (PAX5); proacrosin binding protein sp32 (OY-TESl); lymphocyte-specific protein tyrosine kinase (LCK); A kinase anchor protein 4 (AKAP-4); synovial sarcoma, X breakpoint 2 (SSX2); Receptor for Advanced Glycation End products (RAGE-1); renal ubiquitous 1 (RUl); renal ubiquitous 2 (RU2); legumain; human papilloma virus E6 (HPV E6); human papilloma virus E7 (HPV E7); intestinal carboxyl esterase; heat shock protein 70-2 mutated (mut hsp70-2); CD79a; CD79b; CD72; Leukocyte-associated immunoglobulin-like receptor 1 (LAIRl); Fc fragment of IgA receptor (FCAR or CD89); Leukocyte immunoglobulin-like receptor subfamily A member 2 (LILRA2); CD300 molecule-like family member f (CD300LF); C-type lectin domain family 12 member A (CLEC12A); bone marrow stromal cell antigen 2 (BST2); EGF-like module-containing mucin-like hormone receptor-like 2 (EMR2); lymphocyte antigen 75 (LY75); Glypican-3 (GPC3); Fc receptor-like 5 (FCRL5); and immunoglobulin lambda-like polypeptide 1 (IGLLl), MPL, Biotin, c-MYC epitope Tag, CD34, LAMP1 TROP2, GFRalpha4, CDH17, CDH6, NYBR1, CDH19, CD200R, Slea (CA19.9; Sialyl Lewis Antigen) Fucosyl-GM1, PTK7, gpNMB, CDH1-CD324, DLL3, CD276/B7H3, IL1lRa, IL13Ra2, CD179b-IGLll, ALK TCRgamma-delta, NKG2D, CD32 (FCGR2A), Tn ag, CSPG4-HMW-MAA, Tim1-/HVCR1, CSF2RA (GM-CSFR-alpha), TGFbetaR2, VEGFR2/KDR, Lews Ag, TCR-beta1 chain, TCR-beta2 chain, TCR-gamma chain, TCR-delta chain, FITC, Leutenizing hormone receptor (LHR), Follicle stimulating hormone receptor (FSHR), Chorionic Gonadotropin Hormone receptor (CGHR), CCR4, GD3, SLAMF6, SLAMF4, HIV1 envelope glycoprotein, HTLV1-Tax, CMV pp65, EBV-EBNA3c, influenza A hemagglutinin (HA), GAD, PDL1, Guanylyl cyclase C (GCC), auto antibody to desmoglein 3 (Dsg3), autoantibody to desmoglein 1 (Dsgl), HLA, HLA-A, HLA-A2, HLA-B, HLA-C, HLA-DP, HLA-DM, HLA-DOA, HLA-DOB, HLA-DQ, HLA-DR, HLA-G, IGE, CD99, RAS G12V, Tissue Factor 1 (TF1), AFP, GPRC5D, claudin18.2 (CLD18A2 OR CLDN18A.2), P-glycoprotein, STEAPI, LIV1, NECTIN-4, CRIPTO, GPA33, BST1/CD157, low conductance chloride channel, and SARS-CoV2 Spike protein.

[0964] Aspect 72. The SAR of aspect 1, wherein the encoded SAR polypeptide comprises one or more heterologous antigen binding domains selected from the group consisting of: (i) a heavy chain variable region (vH) comprising a sequence as set forth in any of SEQ ID Nos: 2682-2918 or sequences with at least 80% identity thereto or a sequence with at least 80% identity in the three complementarity determining regions (CDRs) to the sequences set forth in any one or more of SEQ ID NOS: 2682-2918 or a sequence with less than 3 substitutions in the three CDRs of the sequences set forth in any one or more of SEQ ID NOS: 2682-2918 or a sequence with less than three substitutions in the CDR1, CDR2 and CDR3 that belong to a vH and are presented in SEQ ID NO: 11593-11829, 11830-12066, 12067-12303, respectively, or a sequence that binds to the same target antigens or the same epitopes on the target antigens as a sequence set forth in any one or more of SEQ ID NOS: 2682-2918 and which encodes a polypeptide that binds to its antigen; (ii) a light chain variable region (vL) comprising a sequence as set forth in any one of SEQ ID NO: 2440-2676 or sequences with at least 80% identity to sequences set forth in any one or more of SEQ ID NOS: 2440-2676 or a sequence with at least 80% identity in the three complementarity determining regions (CDRs) to the sequences set forth in any one or more of SEQ ID NOS: 2440-2676 or a sequence with less than 3 substitutions in the three CDRs of the sequences set forth in any one or more of SEQ ID NOS: 12440-2676 or a sequence with less than three substitutions in the CDR1, CDR2 and CDR3 that belong to a vL and are presented in SEQ ID NO: 10882-11118, 11119-11355 and 11356-11592, respectively, or a sequence that binds to the same target antigens or the same epitopes on the target antigens as a sequence set forth in any one or more of SEQ ID NOS: 2440-2676 and which encodes a polypeptide that binds to its antigen; (iii) a single chain variable fragment (scFv) comprising a sequence as set forth in any one SEQ ID NO: 2924-3160 or a sequence with at least 80% identity thereto or a sequence with at least 70% identity in the six complementarity determining regions (CDRs) to the sequences set forth in any one or more of SEQ ID NOS: 2924-3160 or a sequence with less than 6 substitutions in the six CDRs of the sequences set forth in any one or more of SEQ ID NOS: 2924-3160 or a sequence with less than three substitutions in the CDR1, CDR2 and CDR3 that belong to a vH comprising a scFV and are presented in SEQ ID NO: 11593-11829, 11830-12066, 12067-12303, respectively and less than thre substitutions in the light chain CDR1, CDR2 and CDR3 that belong to a vL comprising a scFv and are presented in SEQ ID NO: 10882-11118, 11119-11355 and 11356-1159 respectively, or a sequence that binds to the same target antigens or the same epitopes on the target antigens as a sequence set forth in any one or more of SEQ ID NOS: 2924-3160 and which encodes a polypeptide that binds to its antigen; (iv) a single domain antibody, a vHH domain, a SVH, and/or FHVH domain comprising a sequence as set forth in any one of SEQ ID NO: 3210-3353, 10695-10713 or a sequence with at least 70% identity to a sequence set forth in any one or more of SEQ ID NOS: 3210-3353, 10695-10713 and or a sequence with at least 70% identity in the three complementarity determining regions (CDRs) to the sequences set forth in any one or more of SEQ ID NOS: 3210-3353, 10695-10713 or a sequence with less than 3 substitutions in the three CDRs of the sequences set forth in any one or more of SEQ ID NOS: 3210-3353, 10695-10713 or a sequence that bind to the same target antigens or the same epitopes on the target antigens as a sequence set forth in any one or more of SEQ ID NOS: 3210-3353, 10695-10713 and which encodes a polypeptide that binds to its antigen; (v) a non-immunoglobulin scaffold encoded by a polynucleotide of any one of SEQ ID NOS: 3366-3377 or sequences with at least 70% identity to sequences set forth in any one or more of SEQ ID NOS: 3366-3377 or sequences that bind to the same target antigens or the same epitopes on the target antigens as the sequences set forth in any one or more of SEQ ID NOS: 3366-3377; (vi) the ligand binding domain of a receptor comprising a sequence as set forth in any one of SEQ ID NO: 3378-3395, 3880, 3882, 3886, 3893, 3896, 3897 or sequences with at least 70% identity thereto and which encodes a polypeptide that binds to its cognate; (vii) the receptor binding domain of a ligand comprising a sequence as set forth in any one of SEQ ID NO: 3396-3406, 10786-10787 or sequences with at least 70% identity thereto and which encodes a polypeptide that binds to its cognate; (viii) an adaptor binding domain comprising a sequence as set forth in any one of SEQ ID NO: 3407-3435, 10771-10780 or sequences with at least 70% identity thereto and which encodes a polypeptide that binds to its adaptor; (ix) an autoantigen comprising a sequence as set forth in any one of SEQ ID NO 10788-10791 or sequences with at least 70% identity thereto and which encodes a polypeptide that binds to its autoantibody or autoantibody producing cells; (x) a TCR variable region (Va, Vb, Vg or Vd) comprising a sequence as set forth in any of SEQ ID NOs: 3357-3364, 9606-9614, 10781-10782 or sequences with at least 70% identity thereto or sequences with at least 70% identity in the three complementarity determining regions (CDRs) to the sequences set forth in any one or more of SEQ ID NOS: 3357-3364, 9606-9614, 10781-10782 or sequences with less than 3 substitutions in the three CDRs of the sequences set forth in any one or more of SEQ ID NOS: 3357-3364, 9606-9614, 10781-10782 or sequences that bind to the same target antigens or the same epitopes on the target antigens as the sequences set forth in any one or more of SEQ ID NOS: 3357-3364, 9606-9614, 10781-10782 and which encodes a polypeptide that binds to its antigen; and (xi) a single variable TCR domain (svd-TCR) comprising a sequence as set forth in any of SEQ ID NOs: 9613-9614 or sequences with at least 70% identity thereto or sequences with 70-99% identity in the three complementarity determining regions (CDRs) to the sequences set forth in any one or more of SEQ ID NOS: 9613-9614 or sequences with less than 3 substitutions in the three CDRs of the sequences set forth in any one or more of SEQ ID NOS: 9613-9614 or sequences that bind to the same target antigens or the same epitopes on the target antigens as the sequences set forth in any one or more of SEQ ID NOS: 9613-9614 and which encodes a polypeptide that binds to its antigen.

[0965] Aspect 73. A SAR of aspect 2 or 58, wherein a naturally occurring receptor and/or the signaling adaptor or a fragment thereof comprises a sequence selected from SEQ ID NO: 3743-3966, 3385, 3394, 7818-7822, 9633-9859 or a sequence with 70% homology to a sequence thereto.

[0966] Aspect 74. A SAR of aspect 2 or 58, wherein a polypeptide comprising the hinge domain, transmembrane domain and cytosolic domains of naturally occurring receptor and/or the signaling adaptor comprises a sequence selected from SEQ ID NO: 9669-9704, 3813, 8721, 8733 and 8746 or a sequence with 70% homology to a sequence thereto.

[0967] Aspect 75. A SAR of aspect 1, 2, or 58, wherein a membrane associated domain of a naturally occurring receptor and/or a signaling adaptor comprises a sequence selected from SEQ ID NO: 3914-3928, 9741-9776, 9852-9855 or a sequence with 70% homology to a sequence thereto.

[0968] Aspect 76. A SAR of aspects 1, 2 or 58, wherein a cytosolic domain of a naturally occurring receptor and/or a signaling adaptor comprises a sequence selected from SEQ ID NO: 3944-3958, 9777-9812, 9856-9859 or a sequence with 70% homology to a sequence thereto.

[0969] Aspect 77. A SAR of aspects 16 or 55, wherein the activation domain of a naturally occurring receptor and/or a signaling adaptor comprises a sequence selected from SEQ ID NO: 9856-9859 and 9777 or a sequence with 70% homology to a sequence thereto.

[0970] Aspect 78. A SAR of aspect 9, 48 and 56, wherein the co-stimulatory domain comprises a sequence selected from SEQ ID NO: 9807-9810 or a sequence with 70% homology to a sequence thereto.

[0971] Aspect 79. The SAR of aspect 1, further comprising a leader sequence or signal peptide that is present at the N-terminal of each chain and optionally comprising a sequence selected from the group consisting of SEQ ID NO:2425-2430.

[0972] Aspect 80. The isolated SAR polypeptide aspect 1, wherein the SAR comprises a SAR heterodimer.

[0973] Aspect 81. The isolated synthetic antigen receptor (SAR) polypeptide or polypeptide heterodimer of aspects 1 or 80, where the polypeptide comprises two SAR chains that are linked by a cleavable linker.

[0974] Aspect 82. The isolated synthetic antigen receptor (SAR) polypeptide or polypeptide heterodimer of aspects 81, wherein the cleavable linker is a self-cleaving cleavable linker.

[0975] Aspect 83. The isolated synthetic antigen receptor (SAR) polypeptide or polypeptide heterodimer of aspect 82, wherein the cleavable linker is any one or more of a 2A linker, a 2A-like linker or functional equivalent thereof.

[0976] Aspect 84. The isolated synthetic antigen receptor (SAR) polypeptide or polypeptide heterodimer of aspect 83, wherein the cleavable linker is any one or more of T2A linker, P2A, F2A, E2A linker or functional equivalent thereof.

[0977] Aspect 85. The isolated synthetic antigen receptor (SAR) polypeptide or polypeptide heterodimer of aspect 84, wherein the cleavable linker comprises a sequence of any one or more of SEQ ID Nos: 3627-3632.

[0978] Aspect 86. The isolated synthetic antigen receptor (SAR) polypeptide or polypeptide heterodimer of aspect 84, wherein the cleavable linker is optionally preceded by a furine cleavage site or furine like cleavage site or functional equivalent thereof.

[0979] Aspect 87. The isolated synthetic antigen receptor (SAR) polypeptide or polypeptide heterodimer of aspect 86, wherein the furine cleavage site preceding the cleavable linker comprises a sequence of any one or more of SEQ ID Nos:3635-3636.

[0980] Aspect 88. The isolated synthetic antigen receptor (SAR) polypeptide or polypeptide heterodimer of any one of aspects 86-87, wherein the cleavable linker is preceded by a flexible linker.

[0981] Aspect 89. The isolated synthetic antigen receptor (SAR) polypeptide or polypeptide heterodimer of aspect 88, wherein the flexible linker preceding the cleavable linker encodes for one or more of Ser-Gly linker or functional equivalent thereof.

[0982] Aspect 90. The isolated synthetic antigen receptor (SAR) polypeptide or polypeptide heterodimer of aspect 89, wherein the flexible linker preceding the cleavable linker comprises a sequence of SEQ ID Nos: 3633-3634.

[0983] Aspect 91. The isolated synthetic antigen receptor (SAR) polypeptide or polypeptide heterodimer of any one of aspects 88-90, wherein the furine cleavage site is followed by the flexible linker which is followed by the cleavable linker so that the order is Furine cleavage site-Flexible linker-cleavable linker.

[0984] Aspect 92. The isolated synthetic antigen receptor (SAR) polypeptide or polypeptide heterodimer of aspect 1 or 80, wherein the SARs is designed to have a desired binding affinity for a selected antigen.

[0985] Aspect 93. A SAR of aspect 1, further expressing an accessory module comprising a polypeptide that is selected from the group consisting of: a) a cytokine or a variant thereof; b) membrane-anchored cytokine; c) a membrane anchored cytokine with epitope tags; d) a multi-purpose switch that serves as a suicide, survival and marker function; e) a signaling adaptor molecule; and f) a kill-switch.

[0986] Aspect 94. An accessory module of aspect 93, wherein a) the cytokine comprises a sequence with SEQ ID NO:7833-7842 or a variant with up to 70% sequence homology thereto, and b) the membrane-anchored cytokine comprises a sequence with SEQ ID NO: 7825-7832 or a variant with up to 70% sequence homology thereto, c) the multipurpose switch comprises a sequence with SEQ ID NO: 7843-7850 or a variant with 70% sequence homology thereto, and d) the adaptor is selected from the group of CD3ƒ, FcRγ, DAP10 and DAP12.

[0987] Aspect 95. A polypeptide comprising a multi-purpose switch of aspect 94 having the formula: SP-D1-L1-D2-L2-D3-L3-D4; wherein SP is an optional signal peptide that allows cell surface transport of the multipurpose switch and is cleaved to yield the mature peptide, D1 is receptor binding domain which binds to a receptor that promotes cell survival, D2 is a marker/suicide domain, D3 is a hinge domain/stalk domain that allows the D1 and D2 domains to be projected away from the surface of the target cell, D4 is a membrane associating domain that anchors the multi-purpose switch to the cell membrane, and L1, L2 and L3 are optional linker.

[0988] Aspect 96. A polypeptide of aspect 95, wherein the multipurpose switch polypeptide comprises an in-frame fusion of a first module (D1), (D2), (D3) and (D4).

[0989] Aspect 97. A polypeptide of aspect 96, wherein a) D3 and D4 modules are derived from the same endogenous protein; or b) D2, D3 and D4 module are derived from different endogenous proteins; or c) D3 and D4 are derived from the same endogenous protein; or d) D3 and D4 are derived from different endogenous proteins.

[0990] Aspect 98. A polypeptide of aspect 95, wherein the first module (D1) binds to a receptor that is expressed on the cell surface.

[0991] Aspect 99. A polypeptide of aspect 98, wherein the receptor when bound transmits a pro-survival and/or proliferative signal to the cell.

[0992] Aspect 100. A polypeptide of aspect 98, wherein the first module binds to the receptor in cis and/or the first module binds to the receptor in trans.

[0993] Aspect 101. A polypeptide of aspect 95, wherein the first module (D1) comprises the receptor binding domain of a cytokine, a chemokine, a ligand, or a variant or a fragment thereof.

[0994] Aspect 102. A multipurpose switch of aspect 101, wherein the D1 comprises the receptor binding domain of a cytokine, a chemokine or a ligand selected from the group consisting of IL2, IL4, IL6, IL7, IL9, IL10, IL11, IL12, IL15, IL18, IL21, CD40L, 4-1BBL, CD30L, OX40L, FLT3-L, APRIL, BAFF, Rantes, MIP, Erythropoietin, Thrombopoietin, SCF (stem cell factor), G-CSF, GM-CSF, M-CSF, a variant of any of the foregoing and a fragment of any of the foregoing.

[0995] Aspect 103. A polypeptide of aspect 101, wherein the D1 comprises a polypeptide with sequence represented by SEQ ID NO: 7833 to 7842 or a variant with at least 70% identity thereto.

[0996] Aspect 104. A polypeptide of aspect 95, wherein the D1 comprises an antibody, an antibody fragment, a single domain antibody, a single chain antibody, an scFv, or a non-immunoglobulin antigen binding module that can bind to a receptor.

[0997] Aspect 105. A polypeptide of aspect 95 and 104, wherein the D1 binds to a receptor selected from the group consisting of: IL2R, IL6R, IL7R, IL9R, IL10R, IL11R, IL12R, IL15R, IL18, IL21 CCR1, CCR3, CCR5, MIP-1R, PF4 receptor, Erythropoeitin-Receptor (Epo-R), TPO-R/MPL, GSF-R, c-Kit, and M-CSF receptor.

[0998] Aspect 106. A polypeptide of aspect 95, wherein the D2 comprises of a non-endogenous polypeptide.

[0999] Aspect 107. A polypeptide of aspect 95, wherein the D2 comprises of the extracellular domain of an endogenous protein or a variant or a fragment thereof.

[1000] Aspect 108. A polypeptide of aspect 95, wherein the D2 comprises extracellular domain of one or more of the following endogenous proteins or a variant or a fragment thereof: CD5; CD19; CD123; CD22; CD30; CD3ε, CD52, CD171; CS1 (SLAMF7, CD319); C-type lectin-like molecule-1 (CLL-1 or CLECL1); CD33; epidermal growth factor receptor variant III (EGFRviii); ganglioside G2 (GD2); ganglioside GD3; BCMA; Tn antigen (Tn Ag); prostate-specific membrane antigen (PSMA); Receptor tyrosine kinase-like orphan receptor 1 (ROR1); Fins Like Tyrosine Kinase 3 (FLT3); Tumor-associated glycoprotein 72 (TAG72); CD38; CD44v6; Carcinoembryonic antigen (CEA); Epithelial cell adhesion molecule (EPCAM); B7H3 (CD276); KIT (CD 117); Interleukin-13 receptor subunit alpha-2 (IL-13Ra2 or CD213A2); Mesothelin; Interleukin 11 receptor alpha (IL-llRa); prostate stem cell antigen (PSCA); Protease Serine 21 (Testisin or PRSS21); vascular endothelial growth factor receptor 2 (VEGFR2); Lewis(Y) antigen; CD24; Platelet-derived growth factor receptor beta (PDGFR-beta); Stage-specific embryonic antigen-4 (SSEA-4); CD20; Folate receptor alpha (FRa or FR1); Folate receptor beta (FRb); Receptor tyrosine-protein kinase ERBB2 (Her2/neu); Mucin 1, cell surface associated (MUC1); epidermal growth factor receptor (EGFR); neural cell adhesion molecule (NCAM); Ephrin B2; fibroblast activation protein alpha (FAP); insulin-like growth factor 1 receptor (IGF-I receptor), carbonic anhydrase IX (CAlX); ephrin type-A receptor 2 (EphA2); sialyl Lewis adhesion molecule (sLe); ganglioside GM3; high molecular weight-melanoma associated antigen (HMWMAA); o-acetyl-GD2 ganglioside (OAcGD2); tumor endothelial marker 1 (TEM1/CD248); tumor endothelial marker 7-related (TEM7R); claudin 6 (CLDN6); thyroid stimulating hormone receptor (TSHR); G protein coupled receptor class C group 5, member D (GPRC5D); CD97; CD179a; anaplastic lymphoma kinase (ALK); Polysialic acid; placenta-specific 1 (PLAC1); hexasaccharide portion of globoH glycoceramide (GloboH); mammary gland differentiation antigen (NY-BR-1); uroplakin 2 (UPK2); Hepatitis A virus cellular receptor 1 (HAVCR1); adrenoceptor beta 3 (ADRB3); pannexin 3 (PANX3); G protein-coupled receptor 20 (GPR20); lymphocyte antigen 6 complex, locus K 9 (LY6K); Olfactory receptor 51E2 (OR51E2); TCR Gamma Alternate Reading Frame Protein (TARP); Androgen receptor; Squamous Cell Carcinoma Antigen Recognized By T Cells 3 (SART3); CD79a; CD79b; CD72; Leukocyte-associated immunoglobulin-like receptor 1 (LAIRl); Fc fragment of IgA receptor (FCAR or CD89); Leukocyte immunoglobulin-like receptor subfamily A member 2 (LILRA2); CD300 molecule-like family member f (CD300LF); C-type lectin domain family 12 member A (CLEC12A); bone marrow stromal cell antigen 2 (BST2); EGF-like module-containing mucin-like hormone receptor-like 2 (EMR2); lymphocyte antigen 75 (LY75); Glypican-3 (GPC3); Fc receptor-like 5 (FCRL5); and immunoglobulin lambda-like polypeptide 1 (IGLLl), MPL, CD34, LAMP1 TROP2, GFRalpha4, CDH17, CDH6, NYBRI, CDH19, CD200R, Slea (CA19.9; Sialyl Lewis Antigen); Fucosyl-GM1, PTK7, gpNMB, CDH1/CD324, DLL3, CD276/B7H3, IL-2R, IL-4R, IL-6R, IL1lRa, IL13Ra2, IL-17R, CD179b-IGLll, TCRgamma-delta, NKG2D, CD32 (FCGR2A), Timl-/HVCR1, CSF2RA (GM-CSFR-alpha), TGFbetaR2, Lews Ag, TCR-beta1 chain, TCR-beta2 chain, TCR-gamma chain, TCR-delta chain, FITC, Leutenizing hormone receptor (LHR), Follicle stimulating hormone receptor (FSHR), Gonadotropin Hormone receptor (CGHR or GR), CCR4, SLAMF6, SLAMF4, CD99, Ras G12V, Tissue Factor 1 (TF1), GPRC5D, Claudin18.2 (CLD18A2 or CLDN18A.2), P-glycoprotein, STEAPI, Livl, Nectin-4, Cripto, gpA33, BST1/CD157, low conductance chloride channel (LCCC), TAJ/TROY, MPL (TPO-R), KIR3DL2, CD32b, CD229, Toso, PD-1, PD-L1, PD-L2, TNFRI, TRAIL-Ri (DR4), TRAIL-R2 (DR5), CTLA4, IL-36R, CD25, LAG3, VEGF-A, MASP-2, Thymic stromal lymphopoietin, Tissue Factor, IFNARI, IL5, IL-6, IL-12, IL-23, IL-17A, IL-13, Angiopoietin-like 3, CGRP, IL-23pi9, vWF, C5, IFNy, CD4, CD8, CD7, NKp30, NKp44, NKp46, NKG2D, PDGRFα, α4β7 integrin, α4 integrin, VEGF, GPIIb/IIIa PCSK9, Blys, and BAFF-R.

[1001] Aspect 109. A polypeptide of aspect 95, wherein the D2 can be bound by agent that can be used to detect, enrich and/or kill the cells expressing the multi-purpose switch.

[1002] Aspect 110. A polypeptide of aspect 109, wherein the agent is selected from one or more of: an antibody, an antibody fragment, an scFv, a single domain antibody, a non-immunoglobulin antigen binding domain, an antibody drug conjugate, a bispecific antibody or a fragment thereof or a cell.

[1003] Aspect 111. A polypeptide of aspect 110, wherein the agent that binds D2 is approved for in vivo or ex vivo human clinical use.

[1004] Aspect 112. The polypeptide of aspect 111, wherein the agent is selected from the group consisting of Rituximab, Herceptin, Enhertu, Erbitrux, Adcetris, Enbrel, Tremelimumab, Mosunetuzumab, Teclistamab, Donanemab, Spesolimab, Faricimab, belantamab mafodotin, Tislelizumab, loncastuximab tesirine, Tafasitamab, Pembrolizumab, nivolumab and Qbend10.

[1005] Aspect 113. A polypeptide of aspect 95, wherein the D3 comprises a stalk (hinge domain) sequence that is between 5-100 amino acids in length.

[1006] Aspect 114. A polypeptide of aspect 95, comprising an amino acid sequence represented by SEQ ID NO (PRT): 7843-7850, SEQ ID NO (PRT): 9625 and SEQ ID NO: 9620-9624 or a variant with at least 80% homology thereto.

[1007] Aspect 115. A polypeptide according to aspect 95, which comprises a sequence shown as SEQ ID No. 7843-7849, or a variant thereof which has at least 80% identity with the sequence shown as SEQ ID No. 7843-7849 and which (i) binds J6M0; (ii) binds belantamab mafodotin and (iii) when expressed on the surface of a T cell or an NK cell, promotes survival; (v) when expressed on the surface of a T cell or an NK cell, induces killing of the cell in the presence of belantamab mafodotin.

[1008] Aspect 116. A polypeptide according to aspect 95, which comprises a sequence shown as SEQ ID No. 9620-9624, or a variant thereof which has at least 80% identity with the sequence shown as SEQ ID No. 9620-9624 and which (i) binds QBEND10; (ii) binds Rituximab and (iii) when expressed on the surface of a T cell or an NK cell, promotes survival; (v) when expressed on the surface of a T cell or an NK cell, induces complement-mediated killing of the cell in the presence of Rituximab.

[1009] Aspect 117. A polypeptide according to aspect 95, which comprises a sequence shown as SEQ ID No. 9625, or a variant thereof which has at least 80% identity with the sequence shown as SEQ ID No. 9625 and which (i) binds Herceptin; (ii) binds and Enhertu (iii) when expressed on the surface of a T cell or an NK cell, promotes survival; (v) when expressed on the surface of a T cell or an NK cell, induces killing of the cell in the presence of Herceptin or Enehertu.

[1010] Aspect 118. A recombinant nucleic acid(s) encoding the first and/or second polypeptide chains of the SAR of aspect 1 and/or one or more accessory modules of aspect 93.

[1011] Aspect 119. A recombinant expression system comprising the recombinant polynucleotide of aspect 118, which is co-expressed with an accessory, wherein the accessory module is selected from the group consisting of a truncated epidermal growth factor receptor (tEGFR), truncated epidermal growth factor receptor viii (tEGFRviii), truncated CD30 (tCD30), truncated BCMA (tBCMA), truncated CD19 (tCD19), CD34, thymidine kinase, cytosine deaminase, nitroreductase, xanthine-guanine phosphoribosyl transferase, human caspase 8, human caspase 9, inducible caspase 9 (icaspase9), purine nucleoside phosphorylase, linamarase/linamarin/glucose oxidase, deoxyribonucleoside kinase, horseradish peroxidase (HRP)/indole-3-acetic (IAA), Gamma-glutamylcysteine synthetase, CD20/alphaCD20, CD34/thymidine kinase chimera, dox-dependent caspase-2, mutant thymidine kinase (HSV-TKSR39), AP1903/Fas system, a chimeric cytokine receptor (CCR), a selection marker, a multi-purpose switch, vFLIP-K13, vFLIP-MC159, 4-1BBL-CD40L, DAP10, DAP12, NKG2C, CD94, CD3ε, CD3γ, CD36, CD3ƒ, FcRγ, dihydroxyfolate receptor (DHFR), mutant DHFR, methylated-DNA-protein-cysteine methyltransferase, inosine monophosphate dehydrogenase II (IMDHP2), puromycin acetyl transferase (PAC), blasticidin-resistance gene, mutant calcinueurin a/b (Can/b), CNa12, CNb30 and combinations thereof.

[1012] Aspect 120. The recombinant expression system of aspect 119, wherein the recombinant polynucleotide encoding the one or two chains of the SAR and one or more accessory modules are linked by nucleotide sequences encoding an optional flexible linker, an optional furine cleavage site or furine like cleavage site and a cleavable linker.

[1013] Aspect 121. The recombinant expression system of aspect 120, wherein the recombinant polynucleotide encoding the one or two chains of the SAR and one or more accessory modules are expressed using i) one or more promoters; ii) one or more Internal ribosomal entry sites (IRES); iii) one or more cleavable linkers; iv) any combination of i, ii and iii.

[1014] Aspect 122. A recombinant expression system of aspect 121, wherein a) the promoter is an MNDU3 promoter, EFlu promoter, EFS promoter (SEQ ID NO: 8505), EFS2 promoter (SEQ ID NO: 8506), RSV promoter (SEQ ID NO:8507), or mutRSV promoter (SEQ ID NO: 8508) or sequences with 70% identity thereto; and b) the IRES is K-IRES (SEQ ID NO: 8504) or a sequence with 70% identity thereto.

[1015] Aspect 123. At least one vector comprising the recombinant polynucleotide of aspect 118 and recombinant expression system of aspect 119, wherein the vector is selected from the group consisting of a DNA vector, an RNA vector, a plasmid, a lentivirus vector, adenoviral vector, a retrovirus vector, a baculovirus vector, a sleeping beauty transposon vector, and a piggybac transposon vector.

[1016] Aspect 124. The vector of aspect 123, comprising one or more constitutive promoters or regulatable promoters.

[1017] Aspect 125. The vector of aspect 104, where the promoter is chosen from an MNDU3 promoter, EFlu promoter, EFS promoter (SEQ ID NO: 8505), EFS2 promoter (SEQ ID NO: 8506), RSV promoter (SEQ ID NO:8507), or mutRSV promoter (SEQ ID NO: 8508), a CMV IE gene promoter, an EF-la promoter, a ubiquitin C promoter, a MSCV LTR promoter, a phosphoglycerate kinase (PGK) promoter or a synthetic Notch (SynNotch) promoter.

[1018] Aspect 126. The vector of aspect 123, wherein the vector is an in vitro transcribed vector, or the vector further comprises a poly(A) tail or a 3′UTR.

[1019] Aspect 127. An effector cell or stem cell comprising at least one SAR polypeptide or heterodimer of aspect 1, a nucleic acid of aspect 118, an optional accessory module, a recombinant expression system of aspect 119, and a vector of aspect 123.

[1020] Aspect 128. The effector cell or stem cell of aspect 127, wherein the cell comprises a plurality of single or double chain SAR polypeptides.

[1021] Aspect 129. The effector cell or stem cell of aspect 128, wherein at least one single or double chain SAR polypeptide of the plurality of SAR polypeptides targets a different antigen than at least one other SAR polypeptide.

[1022] Aspect 130. The effector cell or stem cell of aspect 127, wherein at least one SAR polypeptide of the plurality of SAR polypeptides target the same antigen.

[1023] Aspect 131. The effector cell or stem cell of aspect 127, wherein at least one SAR polypeptide of the plurality of SAR polypeptides comprises a different binding affinity for the antigen than at least one other SAR polypeptide.

[1024] Aspect 132. The effector cell or stem cell of aspect 127, wherein at least one SAR polypeptide of the plurality of SAR polypeptides comprises a different naturally occurring receptor or a signaling adaptor than at least one other SAR polypeptide.

[1025] Aspect 133. The effector cell or stem cell of aspect 127, wherein the least one SAR polypeptide of the plurality of SAR polypeptides has a different extracellular domain, transmembrane domain, cytosolic domain than at least one other SAR polypeptide.

[1026] Aspect 134. The effector cell or stem cell of aspect 127, wherein the least one SAR polypeptide of the plurality of SAR polypeptides is an activating receptor and at least one other SAR polypeptide is an inhibitory receptor.

[1027] Aspect 135. The effector cell or stem cell of aspect 127, wherein the two or more SAR polypeptide of the plurality of SAR polypeptides are activating receptors or two or more SAR polypeptide of the plurality of SAR polypeptides are inhibitory receptors.

[1028] Aspect 136. The effector cell or stem cell of aspect 127, wherein the two or more SAR polypeptide of the plurality of SAR polypeptides recruit different signaling adaptors and/or activate different signal transduction pathways.

[1029] Aspect 137. The effector cell or stem cell of any one of aspects 127-136, wherein the effector cell is a a/P T cell, y/⁶ T cell, CD8⁺ T cell, a CD4⁺ T cell, a memory T cell, naïve T cell, T stem cell, a Treg cell, natural killer T (NKT) cell, iNKT (innate natural killer cell), NK cell, g-NK cell, memory like NK cells, cytokine induced killer cell (CIK), iPSC, a modified HLA deficient iPSC, iPSC-derived NK cell, iPSC-derived T cell, B cell, a macrophage/monocyte, granulocyte, a dendritic cell, an immortalized cell line, an immortalized NK cell line, NK92 cell line, NK92MI cell line, YTS cell or derivative thereof.

[1030] Aspect 138. A population of effector cells of any one of aspects 127-137, wherein the population of cells comprises a plurality of diverse SAR polypeptides.

[1031] Aspect 139. The population of immune or effector cells of aspect 138, wherein the plurality of diverse SAR polypeptides comprise different sequences but bind to the same target antigen or different antigens.

[1032] Aspect 140. A method of making a SAR-expressing effector cell of aspect 127, comprising introducing at least one vector of aspect 123 or at least one recombinant polynucleotide of aspect 118 into an effector cell, a cell line, a hematopoietic stem cell, a progenitor cell or an IPSC that can give rise to an effector cell, under conditions such that the SAR polypeptide and the optional accessory module are expressed.

[1033] Aspect 141. The effector cell of aspect 127, wherein the effector cell lacks expression or has low expression of a functional TCR, a functional HLA, 32 macroglobulin, TAP1, TAP2, tapasin, NLRC5, CIITA, RFXANK, CIITA, RFX5, RFXAP, TCRα or R constant region, NKG2A, NKG2D, CD3ε, CD5, CD52, CD33, CD123, CLL-1, CIS, CBL-B, SOCS2, PD1, CTLA4, LAG3, TIM3, TIGIT, or any gene in the chromosome 6p21 region; and/or introduced or increased expression in at least one of HLA-E, 41BBL, CD3ε, CD3γ, CD36, CD3ƒ, FcRγ, DAP10, DAP12, CD4, CD8, CD16, CD47, CD94, CD113, CD131, CD137, CD80, PDL1, A2AR, Fc receptor, an engager, or surface triggering receptor for coupling with bi- or multi-specific or universal engagers.

[1034] Aspect 142. The effector cell of aspect 127, wherein effector cell is modified to block or decrease the expression of a first endogenous TCR subunit and/or a second endogenous TCR subunit.

[1035] Aspect 143. The effector cell of aspect 127 which does not express a T cell receptor (TCR) and/or CD3ε, CD3γ or CD3δ and which is modified by recombinant expression to express a recombinant double chain SAR comprising a non TCR antigen-recognition domain and a T cell receptor module (TCRM), wherein said cell expresses CD3 chains CD3γ, CD36, CD3E and CD3ƒ, and the CD3 chains and the SAR form a functional CD3-SAR complex located at the surface of the cell.

[1036] Aspect 144. The effector cell of aspect 127 which does not express a T cell receptor (TCR) and/or does not express CD3ε, CD3γ or CD3δ and which is modified by recombinant expression to express a recombinant double chain TCR exogenous to the cell, wherein said recombinant double chain TCR is a SAR which comprises a TCR antigen-recognition domain comprising a) Vα and Vβ domains or b) Vγ and Vδ domains and a non-T cell receptor module (NTCRM).

[1037] Aspect 145. The effector cell of aspect 144, comprising a TCR antigen recognition motif that is operationally linked via optional linkers to a non-T cell receptor module (NTCRM) comprising a first MAM and a second MAM derived from non-T cell receptors and/or signaling adaptors and further comprising optional cytosolic co-stimulatory domains.

[1038] Aspect 146. The effector cell of aspects 143-145, which is a selected from the group consisting of NK cell, g-NK cell, memory like NK cells, cytokine induced killer cell (CIK), iPSC, modified HLA deficient iPSC, iPSC-derived NK cell, B cell, a granulocyte, a macrophage/monocyte, a dendritic cell, a T cell that is deficient in one or more of TCRα, TCRβ, TCRγ, TCRδ, CD3γ, CD36, CD3E or CD3 chains, an immortalized cell line, an immortalized NK cell line, NK92 cell line, NK92MI cell line, YTS cells or derivative thereof.

[1039] Aspect 147. A method of generating effector cells of aspect 127, comprising introducing in vitro transcribed RNA or RNAs or synthetic RNA or RNAs into a cell or population of cells, where the RNA or RNAs comprises a recombinant polynucleotide or polynucleotides of aspect 118.

[1040] Aspect 148. A method of providing anti-disease immunity in a subject comprising administering to the subject an effective amount of the immune effector cell or a stem cell that can give rise to an immune effector cell of any one of aspects 127-146, wherein the cell is an autologous T cell or an allogeneic T cell, or an autologous NK cell or an allogeneic NK cell, or an autologous macrophage or an allogeneic macrophage, or an autologous granulocyte or an allogeneic granulocyte, or an autologous dendritic cell or an allogeneic dendritic cell, or an autologous hematopoietic stem or an allogeneic hematopoietic stem cell or an autologous or an allogeneic iPSC that can give rise to an effector cell.

[1041] Aspect 149. The method of aspect 148, wherein the allogeneic T, NK, macrophage, granulocyte, dendritic cell, hematopoietic stem cell or iPSC lacks expression or has low expression of a functional TCR, a functional HLA, 02 macroglobulin, TAP1, TAP2, tapasin, NLRC5, CIITA, RFXANK, CIITA, RFX5, RFXAP, TCRα or R constant region, NKG2A, NKG2D, CD3ε, CD5, CD52, CD33, CD123, CLL-1, CIS, CBL-B, SOCS2, PD1, CTLA4, LAG3, TIM3, TIGIT, or any gene in the chromosome 6p21 region; and/or introduced or increased expression in at least one of HLA-E, 41BBL, CD3ε, CD3γ, CD36, CD3ƒ, FcRγ, DAP10, DAP12, CD4, CD8, CD16, CD47, CD94, CD113, CD131, CD137, CD80, PDL1, A2AR, Fc receptor, an engager, or surface triggering receptor for coupling with bi- or multi-specific or universal engagers.

[1042] Aspect 150. A method of killing a target cell presenting a target antigen, comprising contacting the target cell with the effector cell of aspect 127, wherein the SAR specifically binds to the target antigen.

[1043] Aspect 151. A method of aspect 150, further comprising contacting the target cells with one or more agents that bind to one or more antigens expressed on the SAR-expressing effector cell and one or more antigens expressed on a target cell.

[1044] Aspect 152. A method of aspect 151 wherein the agent can redirect SAR-expressing effector cells to a target cell expressing an antigen targeted by the agent.

[1045] Aspect 153. A method of aspect 151, wherein the agent is an antibody, an antibody, antibody, an antigen binding domain, non-Immunoglobulin antigen binding domain fragment, an autonomous antigen binding domain, a bispecific engager, a bispecific T cell engager (BiTE), a bispecific Killer engager (BiKE), a trispecific engager, a trispecific T cell engager, or a trispecific Killer engager (TRiKE) or a combination thereof.

[1046] Aspect 154. A method of aspect 151, wherein the effector cell expresses a SAR comprising the extracellular domain of one or more naturally occurring receptors.

[1047] Aspect 155. A method of aspect 154, wherein the SAR comprises the extracellular domain of one or more naturally occurring receptor selected from the group of CD16A, CD16B, CD64, CD32, NKp30, NKp44, NKp46, KIR2DL1, KIR2DL2, KIR2DL3, KIR2DL5A, KIR2DL5B, KIR3DL1, KIR3DL2, KIR3DL4, KIR2DL4, KIR2DS1, KIR2DS2, KIR2DS3, KIR2DS4, KIR2DS5, KIR3DS1, NKG2D, NKG2C, NKG2A, NKG2E, NKG2F, DNAM-1, 2B4, OX40, CD28, 4-1BB, CD27, CD81, CD2, CD5, TNFR-I, TNFR-II, Fas, CD30, CD40, CRTAM, TIGIT, CD96, SLAMF6, SLAMF7, CD100, CD160, CEACAM, ILT2, KLRG1, LAIR1 and CD161.

[1048] Aspect 156. A method of aspects 151, wherein the agent is an antibody, antibody, an antigen binding domain, non-Immunoglobulin antigen binding domain fragment, an autonomous antigen binding domain, a bispecific engager, a bispecific T cell engager (BiTE), a bispecific Killer engager (BiKE), a trispecific engager, a trispecific T cell engager, or a trispecific Killer engager (TriKE) that comprises at least one domain that can specifically bind to one or more extracellular domains of the naturally occurring receptors or variants or fragments thereof comprising the SAR.

[1049] Aspect 157. A method of aspects 151 or 156, wherein the agent specifically binds to: a) the extracellular domains of one or more naturally occurring receptors or variants or fragments thereof comprising a SAR; and/or b) the extracellular domains of one or more naturally occurring receptors that are not part of the SAR.

[1050] Aspect 158. A method of aspects 151 or 157, wherein the agent can specifically bind to the extracellular domain of one or more naturally occurring co-stimulatory receptors.

[1051] Aspect 159. A method of aspects 151 or 157, wherein the agent can specifically bind to the extracellular domain of one or more naturally occurring activating receptors.

[1052] Aspect 160. A method of aspects 151 or 157, wherein the agent can specifically bind to the extracellular domain of a SAR comprising a co-stimulatory domain.

[1053] Aspect 161. A method of aspects 151 or 157, wherein the agent can specifically bind to the extracellular domain of a SAR comprising an activation domain and a co-stimulatory domain.

[1054] Aspect 162. A method of aspect 154 or 155, wherein the SAR expresses the extracellular domain of an Fc receptor and the agent is an antibody, antibody, an antigen binding domain, non-Immunoglobulin antigen binding domain fragment, an autonomous antigen binding domain, a bispecific engager, a bispecific T cell engager (BiTE), a bispecific Killer engager (BiKE), a trispecific engager, a trispecific T cell engager, or a trispecific Killer engager (TRiKE) that comprises an Fc domain.

[1055] Aspect 163. A method of aspect 162, wherein the Fc receptor is one or more of CD16A, CD16B, CD64, CD32 or a variant or a fragment thereof.

[1056] Aspect 164. A method of aspect 151, wherein the target antigen is one or more of antigens listed in Table B.

[1057] Aspect 165. A method of aspect 148 or 149, wherein the subject is administered an effective amount of an immune effector cell of one of aspects 123-146 comprising a synthetic antigen receptor (SAR) molecule in combination with an agent that modulates the survival, proliferation, differentiation and/or efficacy of the immune cell, wherein the agent is selected from one or more of: a) a protein phosphatase inhibitor; b) a kinase inhibitor; c) a Lck kinase inhibitor; d) agents that bind to one or more antigens expressed on the SAR-expressing effector cell and one or more antigens expressed on a target cell; e) a cytokine; f) an inhibitor of an immune inhibitory molecule; g) an agent that decreases the level or activity of a TREG cell; h) an agent that increase the proliferation and/or persistence of SAR-modified cells; i) a chemokine; j) an agent that increases the expression of SAR; k) an agent that allows regulation of the expression or activity of SAR; 1) an agent that allows control over the survival and/or persistence of SAR-modified cells; m) an agent that controls the side effects of SAR-modified cells; n) a Brd4 inhibitor; o) an agent that delivers a therapeutic or prophylactic agent to the site of the disease; p) an agent that increases the expression of the target antigen against which SAR is directed; q) an agent that binds to a multipurpose switch co-expressed with the SAR; and r) an adenosine A2a receptor antagonist.

[1058] Aspect 166. A pharmaceutical composition comprising a SAR polypeptide molecule of aspect 1, a polynucleotide of aspect 118, a vector of aspect 119, a cell of any one of aspects 127-146, and/or an agent of aspect 151 and 165 and a pharmaceutically acceptable carrier.

[1059] Aspect 167. A method of preventing or treating a target antigen-associated disease in an individual in need thereof comprising administering to the individual an effective amount of the pharmaceutical composition of aspect 166.

[1060] Aspect 168. The method of aspect 167, wherein the target antigen-associated disease is selected from the group consisting of a proliferative disease, a precancerous condition, a cancer, an immune disease, an allergic disease, a degenerative disease, an infectious disease, and a non-cancer related indication.

[1061] Aspect 169. The use or method of aspect 168, wherein the cancer is a hematologic cancer chosen from one or more of chronic lymphocytic leukemia (CLL), acute leukemias, acute lymphoid leukemia (ALL), B-cell acute lymphoid leukemia (B-ALL), T-cell acute lymphoid leukemia (T-ALL), chronic myelogenous leukemia (CML), B cell prolymphocytic leukemia, blastic plasmacytoid dendritic cell neoplasm, Burkitt's lymphoma, diffuse large B cell lymphoma, primary effusion lymphoma, follicular lymphoma, hairy cell leukemia, small cell- or a large cell-follicular lymphoma, malignant lymphoproliferative conditions, MALT lymphoma, mantle cell lymphoma, marginal zone lymphoma, primary effusion lymphoma (PEL), multiple myeloma, myelodysplasia and myelodysplastic syndrome, non-Hodgkin's lymphoma, Hodgkin's lymphoma, plasmablastic lymphoma, plasmacytoid dendritic cell neoplasm, Waldenstrom macroglobulinemia, or pre-leukemia.

[1062] Aspect 170. The use or method of aspect 168, wherein the cancer is selected from the group consisting of colon cancer, rectal cancer, renal-cell carcinoma, liver cancer, non-small cell carcinoma of the lung, cancer of the small intestine, cancer of the esophagus, melanoma, bone cancer, pancreatic cancer, skin cancer, cancer of the head or neck, cutaneous or intraocular malignant melanoma, uterine cancer, ovarian cancer, rectal cancer, cancer of the anal region, stomach cancer, testicular cancer, uterine cancer, carcinoma of the fallopian tubes, carcinoma of the endometrium, carcinoma of the cervix, carcinoma of the vagina, carcinoma of the vulva, Hodgkin's Disease, non-Hodgkin's lymphoma, cancer of the endocrine system, cancer of the thyroid gland, cancer of the parathyroid gland, cancer of the adrenal gland, sarcoma of soft tissue, cancer of the urethra, cancer of the penis, solid tumors of childhood, cancer of the bladder, cancer of the kidney or ureter, carcinoma of the renal pelvis, neoplasm of the central nervous system (CNS), primary CNS lymphoma, tumor angiogenesis, spinal axis tumor, brain stem glioma, pituitary adenoma, Kaposi's sarcoma, Merkel cell cancer, epidermoid cancer, squamous cell cancer, T-cell lymphoma, environmentally induced cancers, combinations of said cancers, and metastatic lesions of said cancers.

[1063] Aspect 171. The use or method of aspect 168, wherein the disease is associated with infection by a virus selected from the group consisting of coronavirus, SARS-CoV2 and variants, HIV1, HIV2, HTLV1, Epstein Barr virus (EBV), cytomegalovirus (CMV), adenovirus, adeno-associated virus, BK virus, Human Herpesvirus 6, Human Herpesvirus 8 influenza virus, parainfluenza virus, avian flu virus, MERS and SARS coronaviruses, Crimean Congo Hemorrhagic fever virus, rhino virus, enterovirus, Dengue virus, West Nile virus, Ebola virus, Marburg virus, Lassa fever virus, zika virus, RSV, measles virus, mumps virus, rhino virus, varicella virus, herpes simplex virus 1 and 2, varicella zoster virus, HIV-1, HTLV1, Hepatitis virus, enterovirus, hepatitis B virus, Hepatitis C virus, Nipah and Rift valley fever viruses, Japanese encephalitis virus, Merkel cell polyomavirus, or is associated with infection with Mycobacterium tuberculosis, atypical mycobacteria species, Pneumocystis jirovecii, toxoplasmosis, rickettsia, nocardia, aspergillus, mucor, or candida.

[1064] Aspect 172. The use or method of aspect 168, wherein the disease is an immune or degenerative disease selected from the group consisting of diabetes mellitus, multiple sclerosis, rheumatoid arthritis, pemphigus vulgaris, ankylosing spondylitis, Hoshimoto's thyroiditis, SLE, sarcoidosis, scleroderma, mixed connective tissue disease, graft versus host disease or Alzheimer's disease.

[1065] Aspect 173. A method for investigating the transduction efficiency of a vector encoding a SAR and a multipurpose switch of aspect 93 which comprises the step of detecting expression of the multi-purpose switch on the surface of cells transfected or transduced with the vector.

[1066] Aspect 174. A method for selecting cells expressing a SAR of aspect 95, which comprises the following steps: i) detecting expression of the multipurpose switch on the surface of cells transfected or transduced with a vector according to aspect 140; and (ii) selecting cells which are identified as expressing the multipurpose switch.

[1067] Aspect 175. A method of preparing a purified population of cells enriched for cells expressing a SAR, which comprises the step of selecting cells expressing a SAR from a population of cells using a method according to aspect 174.

[1068] Aspect 176. A method of aspect 175, which comprises the following steps: (i) transducing or transfecting a population of cells isolated from a patient ex vivo with a vector according to aspect 140; and (ii) selecting cells expressing the SAR from the transduced/transfected population of cells by a method according to aspect 174.

[1069] Aspect 177. A cell population which is enriched for cells expressing a multipurpose switch polypeptide of aspects 94-117, and thus enriched for cells expressing a SAR.

[1070] Aspect 178. A method for tracking transduced cells in vivo which comprises the step of detection of expression of a multipurpose switch polypeptide according to any of aspects 173 at the cell surface.

[1071] Aspect 179. A method for deleting a cell of aspect 127, which comprises the step of exposing the cells to an agent that binds to the accessory module comprising the multipurpose switch.

[1072] Aspect 180. A method of aspect 179, wherein a) the multipurpose switch comprises a sequence with SEQ ID NO: 7843-7850 or a variant with 80% homology thereto and the agent is belantamab mafodotin; b) the multipurpose switch comprises a sequence with SEQ ID NO: 9620-9624 or a variant with 80% homology thereto and the agent is Rituximab or a CD20 antibody; c) the multipurpose switch comprises a sequence with SEQ ID NO: 9625 or a variant with 80% homology thereto and the agent is Herceptin, Enhertu or a Her2 targeted antibody; and d) the multipurpose switch comprises a sequence with SEQ ID NO:7850 or a variant with 80% homology thereto and the agent is Adcetris or a CD30 targeted antibody.

[1073] Aspect 181. A kit comprising at least one SAR polypeptide molecule of aspect 1, an accessory module of aspect 93, a multiple purpose switch of aspect 94, a recombinant polynucleotide of aspect 118, a recombinant expression system of aspect 119, a vector of aspect 123 or the cell of aspect 127, an agent of aspect 151 and/or 165 and a composition of aspect 166.

[1074] Aspect 182. A method of aspect 140, which is carried out a) ex vivo; b) in vivo; or c) both ex vivo and in vivo.

[1075] Aspect 183. A SAR of aspect 1, comprising at least two chains wherein a) a first polypeptide chain comprises a first antigen-binding domain comprising a Vα or a Vγ domain and a first Membrane associated module (MAM); and b) a second polypeptide chain comprises a second antigen-binding domain comprising a Vβ or a Vδ domain and a second Membrane associated module (MAM); wherein the Vα or Vγ domain of the first antigen-binding domain and the complementary Vβ or Vδ domain of the second antigen-binding domain form a TCR-Fv like antigen-binding module that specifically binds to a target antigen; and wherein the first MAM and the second MAM form a non-T cell receptor module (NTCRM) that is capable of activating at least one signaling pathway and/or recruiting at least one signaling adaptor.

[1076] Aspect 184. The SAR of aspect 183, wherein the first polypeptide chain further comprises a first peptide linker between the first antigen-binding domain and the first MAM, and the second polypeptide chain further comprises a second peptide linker between the second antigen-binding domain and the second MAM.

[1077] Aspect 185. The SAR of aspect 184, wherein the first and/or second peptide linkers comprise, individually, a constant domain or fragment thereof from an immunoglobulin or T cell receptor subunit.

[1078] Aspect 186. A SAR of aspect 183, wherein the first polypeptide further comprises a first cytosolic domain C-terminal to the first transmembrane/membrane-anchoring domain comprising the first MAM; and/or wherein the second polypeptide further comprises a second cytosolic domain C-terminal to the second transmembrane/membrane anchoring domain comprising the second MAM.

[1079] Aspect 187. The SAR of aspect 183, wherein the first polypeptide chain further comprises a first accessory intracellular domain comprising a co-stimulatory domain sequence C-terminal to the first transmembrane/membrane anchoring domain of the first MAM; and/or wherein the second polypeptide chain further comprises a second accessory intracellular domain comprising a co-stimulatory domain sequence C-terminal to the second transmembrane/membrane anchoring domain comprising the second MAM.

[1080] Aspect 188. A SAR of aspect 187, wherein the co-stimulatory domain is selected from CD28, 4-1BB, OX40, 2B4, CD27, CD81, CD2, CD5, BAFF-R, CD30, CD40, HVEM or ICOS, or a variant or a fragment thereof.

[1081] Aspect 189. A SAR of aspect 183, wherein the first and/or the second MAM and the NTCRM are comprised of the transmembrane/membrane anchored domain, optional cytosolic domain, optional hinge domain and/or optional extracellular domain of a non-T cell receptor and/or a signaling adaptor.

[1082] Aspect 190. A SAR of aspect 189, wherein a) the non T cell receptor is selected from the group consisting of CD16A, CD16B, CD64, CD32, NKp30, NKp44, NKp46, KIR2DL1, KIR2DL2, KIR2DL3, KIR2DL5A, KIR2DL5B, KIR3DL1, KIR3DL2, KIR3DL4, KIR2DL4, KIR2DS1, KIR2DS2, KIR2DS3, KIR2DS4, KIR2DS5, KIR3DS1, NKG2D, NKG2C, NKG2A, NKG2E, NKG2F, DNAM-1, 2B4, OX40, CD28, 4-1BB, CD27, CD81, CD2, CD5, TNFR-I, TNFR-II, Fas, CD30, CD40, CRTAM, TIGIT, CD96, SLAMF6, SLAMF7, CD100, CD160, CEACAM, ILT2, KLRG1, LAIR1, CD161, a variant of any of the foregoing and fragments thereof; and/or b) the signaling adaptor is selected from the group consisting of: CD3ƒ, FcRγ, DAP10, a variant of any of the foregoing and fragments thereof.

[1083] Aspect 191. A SAR of aspect 183, which when expressed in a non-T cell confers on it a T cell receptor like target binding recognition and/or recruitment of a at least one signaling adaptor and/or activation of at least one signaling pathway.

[1084] Aspect 192. A method of aspect 167, wherein the subject is further administered a therapeutic effective amount of a tyrosine kinase inhibitor to a) prevent or reverse toxicity due to administration of a pharmaceutical composition comprising SAR expressing effector cells; and/or b) prevent or reverse exhaustion of SAR expressing effector cells.

[1085] Aspect 193. A method of aspect 192, wherein the wherein the tyrosine kinase inhibitor is a Lck inhibitor.

[1086] Aspect 194. The method of aspect 192, wherein the tyrosine kinase inhibitor is dasatinib or ponatinib.

[1087] Aspect 195. The method of aspect 192, wherein treatment increases secretion of IL-2 by T cells in the subject.

[1088] Aspect 196. The method of aspect 192, wherein treatment decreases apoptosis of T cells in the subject.

[1089] Aspect 197. The method of aspect 192, wherein treatment decreases expression of at least one T cell exhaustion marker selected from the group consisting of PD-1, TIM-3, and LAG-3.

[1090] Aspect 198. The method of aspect 192, wherein treatment increases expression of CD62L or CCR7.

[1091] Aspect 199. The method of aspect 192, wherein multiple cycles of treatment are administered to the subject.

[1092] Aspect 200. The method of aspect 192, wherein the tyrosine kinase inhibitor is administered intermittently.

[1093] Aspect 201. The method of aspect 192, wherein the tyrosine kinase inhibitor is administered for a period of time sufficient to restore at least partial T cell function then discontinued.

[1094] Aspect 202. The method of aspect 192, wherein the tyrosine kinase inhibitor is administered orally.

[1095] Aspect 203. The method of aspect 192, wherein the toxicity related to genetically engineered T cell administered to a subject is cytokine release syndrome.

[1096] Aspect 204. The method of aspect 192, wherein the toxicity related to genetically engineered T cell administered to a subject is on-target off tumor toxicity or off-target off-tumor toxicity.

[1097] Aspect 205. The method of aspect 192, wherein the subject is human.

[1098] Aspect 206. A cell that is not a T cell with target recognition properties and function of a T cell, wherein the cell a) lacks the expression of one or all TCR constant chains or a fragment thereof selected from the group of TCRα, TCRβ, TCRγ, TCRδ or preTCR; and/or b) lacks the expression of one or more of CD3 chains selected from the group of CD3ε, CD3γ and/or CD36; and/or c) lacks the ability to form a functional TCR module (TCRM).

[1099] Aspect 207. A cell of aspect 206 which expresses a double chain receptor that comprises a TCRM and confers on the cell target recognition properties of a T cell.

[1100] Aspect 208. A cell of aspect 207, that is capable of expressing on cell surface a receptor that can form a TCR-Fv antigen binding module that specifically binds to a target antigen.

[1101] Aspect 209. A receptor of aspect 208, where the two variable domains comprising the TCR-Fv are not part of a single polypeptide chain.

[1102] Aspect 210. A cell of aspect 206, where the two variable domains comprising the TCR-Fv are a) Vα and VD, or b) Vγ and V6.

[1103] Aspect 211. A method of killing a target cell presenting a target antigen, comprising contacting the target cell with the effector cell of aspect 206, wherein the cell specifically recognizes the target antigen.

[1104] Aspect 212. A cell of aspect 210, which can kill a target cell expressing its target peptide antigen.

[1105] Aspect 213. A pharmaceutical composition comprising a cell of aspect 206 and a pharmaceutically acceptable carrier.

[1106] Aspect 214. A method of preventing or treating a target antigen-associated disease in an individual in need thereof comprising administering to the individual an effective amount of a cell of aspect 206 or the pharmaceutical composition of aspect 213.

[1107] Aspect 215. A method of making a non-T cell of aspect 206 with T cell receptor like antigen recognition.

[1108] Aspect 216. A method of aspect 215, wherein a non-T cell with TCR like antigen recognition does not express a) TCRα, TCRβ, TCRγ, TCRδ and preTCRα chains, or b) A dimer of TCRα and TCRβ chains, or c) A dimer of TCRγ and TCRS chains, or d) A dimer of preTCRα and TCRβ chains.

[1109] Aspect 217. A method of aspect 215, wherein the method does not involve a) exogenous expression of a TCR chain, or b) Exogenous expression of a CD3 chain selected from the group of CD3ε, CD3γ and CD36.

[1110] Aspect 218. A method of aspect 215, wherein the method involves a single genetic modification.

[1111] Aspect 219. A method of aspect 215, wherein the method involves introduction of one or two recombinant polynucleotides encoding a double chain receptor.

[1112] Aspect 220. A cell of aspect 210, which is a NK cell, iNKT (innate natural killer cell), g-NK cell, memory like NK cells, cytokine induced killer cell (CIK), iPSC, a modified HLA deficient iPSC, iPSC-derived NK cell, B cell, a macrophage/monocyte, granulocyte, a dendritic cell, an immortalized cell line, an immortalized NK cell line, NK92 cell line, NK92MI cell line, YTS cell, NKG cell line or a derivative thereof.

[1113] Aspect 221. An isolated fusion protein between a Type II transmembrane protein and a Type I transmembrane protein or a secreted protein with an N-terminal signal peptide.

[1114] Aspect 222. An isolated fusion protein of aspect 221, comprising the cytosolic, transmembrane and partial or entire extracellular domain of a Type II protein in fusion with the extracellular domain of a type I transmembrane protein or a secreted protein with an N-terminal signal peptide.

[1115] Aspect 223. An isolated fusion protein of aspect 221, where the N-terminus of a polypeptide encoding the entire or partial extracellular domain of the type I membrane protein or the secreted protein with an N-terminal signal peptide is operationally linked to the C-terminus of the Type II protein in N-terminus to C-terminus orientation.

[1116] Aspect 224. A method of making a fusion protein of aspect 221 comprising the steps of a) fusing in frame the 5′ end of a polynucleotide encoding the type I membrane protein or a secreted protein with an N-terminal signal peptide to the 3′ end of a nucleotide encoding the partial or entire extracellular domain of the type II protein; and b) introducing the recombinant polynucleotide in suitable cell so as to allow the expression of the fusion protein.

[1117] Aspect 225. An isolated fusion protein of aspect 221, where the fusion protein encodes for a chimeric antigen receptor or a synthetic antigen receptor targeting a specific antigen.

[1118] Aspect 226. A pharmaceutical composition comprising a cell made by aspect 224, expressing a fusion protein of aspect 221, and a pharmaceutically acceptable carrier.

[1119] Aspect 227. A method of treatment using a composition of aspect 226.

[1120] Aspect 228. A recombinant polynucleotide encoding a synthetic immune receptor comprising a sequence selected from the group consisting of SEQ ID NO:1600-2328, 4851-5129, 5451-6282, 7160-7170, 7601-7747, 8768-9602, 10817-10830 or a sequence with at least 75% identity to a nucleotide sequence encoding a synthetic immune receptor set forth in any one of the above.

[1121] Aspect 229. An amino acid sequence encoding a synthetic immune receptor polypeptide selected from the group consisting of SEQ ID NO:3994-4722, 5151-5429, 6283-7114, 7852-7862, 8293-8439, 9860-10694 or a sequence with at least 75% identity to an amino acid sequence encoding a synthetic immune receptor set forth in any one of the above.

### Examples

[1122] Cell lines engineered to express luciferases (e.g., GLuc or NLuc) for measuring cytotoxicity of different constructs targeting different cell surface and intracellular antigens are provided in Table A. Cell lines used in these experiments, target antigens on the cells lines and their growth media are shown in the following Table A. Cells were cultured at 37° C., in a 5% CO₂ humidified incubator. The cell lines were obtained from ATCC, NIH AIDS reagent program or were available in the laboratory.

TABLE A

| Cell line | Culture Conditions | Exemplary CAR Target Antigens Expressed |
|---|---|---|
| BC-1 | RPMI, 20% FCS | BCMA, GPRC, CD138 |
| BC-3 | RPMI, 20% FCS | BCMA, GPRC, CD138 |
| BCBL-1 | RPMI, 20% FCS | GPRC, CD138 |
| JSC-1 | RPMI, 20% FCS | GPRC, CD138 |
| MM1S | RPMI, 10% FCS | CD38, GPRC, CD44, CD200R |
| U266 | RPMI, 10% FCS | BCMA, WT1/HLA-A2+, CS1, CLL1, CD138, c-MET, |
| | | IL6R, CD179b, NY-ESO1/HLA-A2, NYBR, LAMP1 |
| L363 | RPMI, 10% FCS | BCMA, GPRC, WT1/HLA-A2+, CS1, CLL1, CD138, NY- |
| | | ESO1/HLA-A2, NYBR, LAMP1 |
| K562 | RPMI, 10% FCS | CD33, IL1Ra, TnAg |
| BV173 | RPMI, 10% FCS | CD123, CD179b, IL1Ra, WT1/HLA-A2+, CXCR4, FLT3, |
| | | CD179a |
| Nalm6 | RPMI, 10% FCS | CD19, CD20, CD22, CD179b, CD179a |
| HL60 | RPMI, 10% FCS | CD33, CD34, CLL1, IL6R, CD32, CD179 |
| U937 | RPMI, 10% FCS | CD4, CLL1 |
| RS:411 | RPMI, 20% FCS | CD19, Folate Receptor beta (FRbeta), TGFbeta, CD179b, |
| | | NKG2D, FLT3, CD179a |
| MV:411 | RPMI, 10% FCS | FLT3, CD123, FRbeta |
| Raji | RPMI, 10% FCS | CD19, CD20, CD22, BCMA, CD38, CD70, CD79, CLL1 |
| HEL-92.1.7 | RPMI, 10% FCS | MPL, CD33, CD32, CD200R |
| Jurkat | RPMI, 10% FCS | TnAg, TSLRP, TSHR, CD4, CD38 |
| Daudi | RPMI, 10% FCS | BCMA, FRbeta |
| REC-1 | RPMI, 10% FCS | NKG2D, ROR1 |
| KG-1 | RPMI, 20% FCS | CD33, CD34, CD123, TSLRP |
| CEM | RPMI, 10% FCS | CD5, CD43 |
| U937 | RPMI, 10% FCS | CD4, CLL1 |
| LAMA5 | RPMI, 10% FCS | WT1/HLA-A2 |
| A549 | DMEM, 10% FCS | ROR1, CD22, TIM1, CDH17 |
| HT29 | DMEM, 10% FCS | EGFR, SLEA, c-MET |
| Molm-13 | RPMI, 20% FCS | FLT3, IL6R, LAMP1, TSLRP, CD4, CSF2RA, CXCR4, |
| | | IL6R, CSF2RA, GPC3 |
| A431 | DMEM, 10% FCS | EGFR, Folate Receptor Alpha, Her3 |
| P19 | DMEM, 10% FCS | SSEA |
| THP-1 | RPMI, 10% FCS | CD32, CD33, CXCR4, CD123, CD44, IL6R, Folate |
| | | Receptor beta, CD70, LAMP1, FLT3, CSF2RA |
| U87MG | DMEM, 10% FCS | CD276, gpNMB, IL13RA2 |
| LoVo | DMEM, 10% FCS | Tissue Factor, CDH17, EGFR |
| SKOV-3 | DMEM, 10% FCS | FR1a, FSHR, Her2, Her3, LHR, MSLN, TIM1, EPCAM |
| NCI-H1993 | DMEM, 10% FCS | EGFR |
| Kasumi-1 | RPMI, 20% FCS | CLEC5A, PR1/HLA-A2, TGFbeta, |
| Jeko-1 | RPMI, 20% FCS | BCMA, ROR1 |
| PC-3 | DMEM, 10% FCS | CGH, TROP2, PSCA, PSMA. EPCAM, FSHR, CLD18.2A2 |
| HeLa | DMEM, 10% FCS | EGFR, FR1, MSLN, TSHR |
| LnCap | DMEM, 10% FCS | EGFR, FSHR, PSCA, PSMA, CD22, Her3, CD22, LHR, |
| OVCAR-3 | DMEM, 10% FCS | B7H4, CDH6, DLL3, FR1, FSH, LHR, MSLN, PTK7, |
| | | TnAg, TSHR, L1CAM |
| MEL-624 | DMEM, 10% FCS | CDH19, GD2, GD3, gp100/HLA-A2, gpNMB, HMWMAA, |
| | | NY-ESO1/HLA-A2, MART1/HLA-A2 |
| LS174-T | DMEM, 10% FCS | CEA |
| MEL-526 | DMEM, 10% FCS | GD2 |
| MDA- | DMEM, 10% FCS | CD324, Muc1 |
| MB231 | | |
| L1236 | RPMI, 20% FCS | CD30, CD23, PDL1 |
| L428 | RPMI, 20% FCS | CD30, CD123, CCR4, PDL1 |
| L540 | RPMI, 20% FCS | CD30, CCR4, PDL1 |
| Molt-16 | RPMI, 20% FCS | IL1ra, NKG2D |
| CEM | RPMI, 10% FCS | CD5 |
| MG-63 | DMEM, 10% FCS | IL13RA2 |
| Karpass-299 | RPMI, 20% FCS | Alk, GPRC, PDL1 |
| MCF7 | DMEM, 10% FCS | B7D4, CD276, TROP2, Her3, Muc1, LewisY, LHR |
| AA-2 | RPMI, 10% FCS | HIV1 env glycoprotein (gp120) |
| HL2/3 | DMEM, 10% FCS | HIV1 env glycoprotein (gp120) |
| TF228.1.16 | DMEM, 10% FCS | HIV1 env glycoprotein (gp120), CCR4 |
| TT | DMEM, 10% FCS | TGF-Beta, TSHR, GFRalpha4 |
| DMS79 | RPMI, 10% FCS | Fucosyl-GM1, Slea (CA19.9; Sialyl Lewis Antigen) |
| LAN-5 | DMEM, 10% FCS | ALK, DLL3, GFRalpha4, FUCOSYL-GM1 |
| PEER1 | RPMI, 10% FCS | TSHR |
| SK-MEL-37 | DMEM, 10% FCS | DLL3, GD2 |
| F9 | DMEM, 10% FCS | SSEA |
| HepG2 | DMEM, 10% FBS | GPC3, AFP/HLA-A2 |

[1123] Jurkat cell line (clone E6-1) engineered with a NFAT-dependent EGFP (or GFP) reporter gene and named JNG was a gift from Dr. Arthur Weiss at University of California San Francisco and have been described to study CAR-signaling ((Wu, C Y et al., Science 350:293-302,2015). Jurkat cells were maintained in RPMI-1640 medium supplemented with 1000 FBS. NK92MI cells were obtained from ATCC and were maintained as per the instructions provided. NK92 cells were also obtained from ATCC and maintained in RPMI medium with 20% o FBS and 200 U/mL of hIL2. T2 cells were from ATCC.

### Generation of Lentiviral Vectors Encoding SARs

[1124] The SAR constructs were cloned in the lentiviral, retroviral or sleeping beauty transposon vectors. Exemplary vectors are provided in SEQ ID NO: 1-6. Other vectors that can be used for generating SARs of the disclosure are known in the art. The psPAX2 vector was a gift from Didier Trono (Addgene plasmid #12260). The pLP/VSVG envelope plasmid and 293FT cells were obtained from Invitrogen (ThermoFisher Scientific). The retroviral transfer vector MSCVneo, MSCVhygro, and MSCVpac and the packaging vector pKAT have been described previously (PCT/US2018/53247). The methods for generation of SAR (e.g., 2^{nd} generation CARs, SIRs, Ab-TCR and TFP etc.), the generation and use of GGS-NLuc fusion proteins, and the generation and use of luciferase (e.g., GLuc and Luc146-1H2) reporter cell lines for measurement of cellular cytotoxicity using the Matador assays have been described (PCT/US2017/024843, PCT/US2017/025602, PCT/US2017/052344, PCT/US2017/064379 and PCT/US2018/53247), which are incorporated in their entirety by reference herein.

[1125] The sequences comprising the antigen binding domains of SAR are codon optimized and synthesized artificially using publically available software (e.g. ThermoFisher or IDT) and commercial vendors (e.g. IDT). The resulting fragments are PCR amplified and cloned in different vectors containing the different SIR backbones using standard Molecular Biology techniques. In general SAR constructs are typically cloned in a lentiviral vector. The sequences of the SIR constructs are confirmed using automated sequencing.

[1126] An exemplary SAR construct encoding vector is pCCLc-MNDU3-Nhe-CD8SP-R1-NY-ESO-IG4-Vb-Xho-TCROECD-Bam-CD3zECDTMCP-opt-F-P2A-Spe-SP-Bst-NY-ESO-IG4-Va-Mlu-TCRuECD-Kpn-CD3zECDTMCP-opt2-F-F2A-Xba-PAC-Sal-AWPRE (SEQ ID NO: 9366). This construct is cloned in the pCCLc-MNDU3-delta-WPRE lentiviral vector backbone (SEQ ID NO: 6). The vector comprises an MNDU3 promoter that drives the expression of a SAR construct comprising a nucleotide comprising a CD8 signal peptide (SEQ ID NO: 31), an EcoR I site, the Vβ/Vb domain of a TCR (IG4) targeting NY-ESO-1 (SEQ ID NO: 966), Xho I site, a TCRPECD linker (or TCR0-Ig3; SEQ ID NO: 1166), BamH I restriction site, a CD3zECDTMCP-opt signaling chain (SEQ ID NO: 1089) comprising the extracellular, transmembrane and cytoplasmic domain of human CD3z, a Furine cleavage site, a P2A cleavable linker, an Spe I restriction site, a signal peptide, a Bst I restriction site, Va/Va domain of a TCR (IG4) targeting NY-ESO-1 peptide/HLA-A2 (SEQ ID NO: 966), aMlu I site, a TCRUECD linker (or TCRa-Ig3; SEQ ID NO: 1168), a Kpn I restriction site, a second CD3zECDTMCP-opt2 signaling module (SEQ ID NO: 10816) comprising the extracellular, transmembrane and cytoplasmic domain of human CD3z, a Furine cleavage site, a F2A cleavable linker, an Xba I restriction site, a puromoycin resistance (PAC) cassette and a Sal I restriction site. The expression cassette has many convenient restriction sites so that the different modules comprising antigen binding domain fragments (e.g., Vb, Va, vL and vH domains), linkers (e.g., TCROECD, TCRUECD, IgCL or IgG-CHI), or signaling chains (e.g., CD3zECDTMCP-opt and opt2) can be cut out and replaced with the different modules. Thus, a person with ordinary skills in the art can use this vector and the sequence of the antigen binding domain (e.g., vL and vH domains of an antibody) to generate a SAR targeting any other new antigen and comprising different linkers and signaling chains.

### Lentivirus and Retrovirus Vectors

[1127] Lentiviruses were generated in 293FT cells by transfection of transfer plasmids encoding the different SAR constructs and 2^{nd} or 3^{rd} generation packaging plasmids using polyethylene amine (PEI) essentially as described previously (Natarajan et al, Scientific Reports, 10:2318) and PCT/US2018/53247. 293FT cells were grown in DMEM with 10% FCS (hereby referred to as DMEM-10). Approximately 48-72 hrs post-transfection, all media was collected, pooled and centrifuged at 1000 rpm for 1 minute to remove any cell debris and non-adherent cells. The cell-free supernatant was filtered through 0.45 μm syringe filter. In some cases, the supernatant was further concentrated by centrifugation at 18500 rpm for 2 hours at 4° C. The viral pellet was re-suspended in 1/10 of the initial volume in XVIVO medium. The virus was either used fresh to infect the target cells or stored frozen in aliquots at −80° C.

### Infection of T Cells, NK Cells and PBMC

[1128] Buffy coat cells were obtained from healthy de-identified adult donors from the Blood Bank at Children Hospital of Los Angeles and used to isolate peripheral blood mononuclear cells (PBMC) by Ficoll-Hypaque gradient centrifugation. PBMC were either used as such or used to isolate T cells or NK cells using magnetic microbeads (Miltenyi Biotech) and following the manufacturer's instructions. PBMC or isolated T cells were re-suspended in XVIVO medium (Lonza) supplanted with 10 ng/ml CD3 antibody, 10 ng/ml CD28 antibody and 100 IU recombinant human-IL2. Cells were cultured at 37° C., in a 5% C02 humidified incubator. Cells were activated in the above medium for 1 day prior to infection with lentiviral vectors. In general, primary cells (e.g., T cells) were infected in the morning using spin-infection (1800 rpm for 90 minutes at 37° C. with 300 μl of concentrated virus that had been re-suspended in XVIVO medium in the presence of 8 μg/ml of Polybrene® (Sigma, Catalog no. H9268). The media was changed in the evening and the infection was repeated for two more days for a total of 3 infections. After the 3rd infection, the cells were pelleted and resuspended in fresh XVIVO media containing 10 ng/ml CD3 antibody, 10 ng/ml CD28 antibody and 100 IU recombinant human-IL2 and supplemented with respective antibiotics (if indicated) and place in the cell culture flask for selection, unless indicated otherwise. Cells were cultured in the above medium for 10-15 days in case no drug selection was used and for 20-30 days in case drug-selection was used. For infection of JNG and cancer cell lines, approximately 500,000 cells were infected with 2 ml of the un-concentrated viral supernatant in a total volume of 3 ml with Polybrene® (Sigma, Catalog no. H9268). Then next morning, the cells were pelleted and resuspended in the media with respective antibiotics, where appropriate, and place in the cell culture flask for selection. Primary NK cells were stimulated with NK activation beads (Miltenyi Biotech) for 24-96 h prior to infection with concentrated lentiviral vectors without Polybrene®. Cells were expanded in IL-2 comprising NK medium before analysis.

[1129] Blood from a healthy donor was used to isolate NK cells using NK cell isolation kit (Miltenyi). NK92 cells were obtained from ATCC. NK Primary and NK92 cells were cultured in Minimum Essential Medium (MEM) Alpha without ribonucleosides and deoxy ribonucleosides supplemented with 20% Fetal bovine serum, 0.2 mM Inositol, 0.1 mM 2-Mercaptoethanol, 2 mM L-Glutamine, 1.5 g/L Sodium bicarbonate, 0.02 mM Folic Acid. For NK92 cells, medium was further supplemented with 200 IU/ml IL2. NK primary cells were cultured and activated with 500 IL/ml of IL2 for 7 days before infections. Lentiviral infections were done with concentrated lentivirus supernatant by spin infection in 6-well plates. For primary NK cells, approx. 4 million NK cells in 1.5 ml culture medium supplemented with 500 IU/ml IL2 and infected with 500p concentrated virus without polybrene. For NK92 cells, 6μg/ml polybrene was used. The plates were centrifuged at 2,800 rpm for 90 min at 32° C. for 5 hours. The medium was changed after 5 hours, and the infection was repeated next day.

[1130] Essentially a similar procedure as described above for lentivirus vector production was used for generation of retroviral vectors with the exception that 293FT cells were generally transfected in 10 cm tissue culture plates in 10 ml of DMEM-10 medium using 10 μg of retroviral construct, 4pg of pKAT and 2pg of VSVG plasmid. The virus collection and infection of target cells was carried out essentially as described above for lentiviral vectors.

### Antibodies, Peptides and Drugs

[1131] NY-ESO1 (SEQ ID NO:10880), MAGE-A3-270-270 (SEQ ID NO: 10878) and MAGE-A3-112-120 (SEQ ID NO: 10879) peptides were synthesized by Genscript. Digitonin was purchased from Sigma (Cat. no D141) and a stock solution of 100 mg/ml was made in DMSO. A diluted stock of 1 mg/ml was made in PBS. Final concentration of digitonin used for cell lysis was 30pg/ml unless indicated otherwise.

### ELISA

[1132] Human IL2, IFNγ, IL6 and TNFα were measured in the cell culture supernatant of CAR-expressing Jurkat-NFAT-GFP effector cells or T cells that had been co-cultured with the specific target cell lines for 24 to 96 hours using commercially available ELISA kits from R&D systems (Minneapolis, MN) and BD Biosciences and following the recommendations of the manufacturer.

### FACS Analysis for Detecting Expression of SAR

[1133] Mouse Anti-Human c-Myc APC-conjugated Monoclonal Antibody (Catalog #IC3696A) was from R&D Systems (Minneapolis, MN). Biotinylated protein L was purchased from GeneScript (Piscataway, NJ), reconstituted in phosphate buffered saline (PBS) at 1 mg/ml and stored at 4° C. Streptavidin-APC (SA1005) was purchased from ThermoFisher Scientific. APC-labelled NY-ESO-1/HLA-A2 and MAGE-A3 (270-279)-HLA-A2 tetramers were obtained from NIH tetramer facility at Emory University. They target NY-ESO1 (SEQ ID NO:10880) and MAGE-A3-270-279 (SEQ ID NO: 10878) peptides.

[1134] For detection of SARs using tetramer, 1×10⁶ cells were harvested and washed three times with 3 ml of ice-cold 1×PBS containing 4% bovine serum albumin (BSA) wash buffer. After wash, cells were resuspended in 0.1 ml of the ice-cold wash buffer containing 10 μl of APC-conjugated tetramer and incubated in dark for 1 hour followed by two washings with ice cold wash buffer before analysis by FACS.

[1135] For detection of SARs using Protein L staining, 1×10⁶ cells were harvested and washed three times with 3 ml of ice-cold 1×PBS containing 4% bovine serum albumin (BSA) wash buffer. After wash, cells were resuspended in 0.1 ml of the ice-cold wash buffer containing 1 μg of protein L at 4° C. for 1 hour. Cells were washed three times with ice-cold wash buffer, and then incubated (in the dark) with 10p of APC-conjugated streptavidin in 0.1 ml of the wash buffer for 30 minutes followed by two washings with ice cold wash buffer. FACS was done using FACSVerse analyzer from BD Biosciences.

### Cell Death Assay

[1136] To measure cell death, Matador assay based on ectopic cytosolic expression of Gluc, NLuc or thermostable beetle luciferase (LucPPe or Luc146-1H2) was utilized as described in PCT/US2017/052344 “A Non-Radioactive Cytotoxicity Assay”. Unless indicated otherwise, the target cells stably expressing the different luciferases were plated in triplicate in a 384 well plate in the media used for growing the target cells. Target cells which grow in suspension were generally plated at a concentration of 2-3×10⁴ per well, while target cells which grow as adherent monolayers were plated at a concentration of 1-2×10⁴ per well. Unless indicated otherwise, the target cells were cocultured with the genetically modified (i.e., expressing SAR) effector cells (e.g., T and NK cells or cell lines (NK92, NK92MI or THP cells) at an Effector: Target (E:T) ratio varying from 1:1 to 10:1 for 4 hours to 96 hours. In the case target cells grow as adherent cells (e.g., HeLa cells), they were allowed to attach to the bottom of the wells overnight before the T cells were added. In the case of GLuc expressing target cells, effector cell mediated induction of lysis of target cells was assayed by increase of luciferase activity as measured by BioTek synergy plate reader by directly injecting 0.5×CTZ assay buffer containing native coeloentrazine (Nanaolight). D-luciferin was used as a substrate for target cells expressing Luc146-1H2. Luciferase activity in wells containing media alone (Med) and in wells in which target cells were incubated with effector cells that were not infected (UI) with any SAR construct were used as controls, where indicated.

### Assay to Detect the Expression of Antigens on Target Cells and to Determine the Antigen Binding Activity of Various of Antigen Binding Moieties Used in the Construction of the SARs

[1137] The expression of antigens on target cells was determined by bioinformatics in combination with immunostaining with antibodies or a highly sensitive antigen detection assay as described in PCT/US2017/025602 and incorporated herein in its entirety by reference.

### The Immune Effector Cells Expressing SAR are Tested in the Following Assays to Identify the Functional SAR.

[1138] (A) Topanga Assay (NLuc binding assay): The control vector- and SAR-expressing Jurkat-NFAT-GFP, T cells or NK cells are stained with the target CD19-Nluc fusion protein and their ability to bind to the target antigen is assayed by measuring Nluc activity using the Topanga Assay. As shown in the following Figure, NK92MI cells expressing the novel next generation SAR (SEQ ID NO: 2275) in which the vL and vH fragments of a CD19 monoclonal hu-mROO5-1 are attached to the hinge, transmembrane and cytosolic domains of DAP10 via IgCL and IgG-CH1 linkers show increased binding to CD19-Nluc Topanga reagent as compared to control parental cells. The 2^{nd} generation CAR (SEQ ID NO: 5141) serves as a positive control.

TABLE 50

| | Average | SD |
|---|---|---|
| Parental | 16 | 2 |
| CD8SP-CD19-hu-mROO5-1-vL- IgCL-DAP10-opt1-F- | 2235 | 94 |
| P2A-Spe-IgSP- CD19-hu-mROO5-1-vH-IgG-CH1-DAP10- | | |
| opt2-F-F2A- PAC (SEQ ID NO: 2275) | | |
| CD8SP-FMC63-scFv-Myc-BBz-T2A-PAC (SEQ ID NO: | 4842 | 63 |
| 5141) | | |

[1139] The experiment is repeated with NK92MI cells expressing different next generation SARs. As shown in the following FIG., NK92MI cells expressing the SAR (SEQ ID NO: 2277) showed very high binding to CD19-Nluc fusion protein in the Topanga Assay. NK92MI cells expressing DAP10-SAR (SEQ ID NO: 2275) also showed modest CD 19-binding.

TABLE 51

| | Average | SD |
|---|---|---|
| Parental | 108 | 7 |
| SEQ ID NO: 2275 | 648 | 189 |
| SEQ ID NO: 2278 | 145 | 2.8284 |
| SEQ ID NO: 2277 | 49100 | 5081 |
| SEQ ID NO: 5141 | 1274 | 349 |

[1140] Assay for Cytotoxic Activity in vitro. The uninfected NK92 or T cells or those expressing a control vector or SAR are cocultured with the target cell lines expressing a non-secretory form of a luciferase (such as GLuc, NLuc, Turboluc 16 etc.) for 4-96 hours and induction of cell lysis examined by measuring the luciferase activity as described in PCT/US17/52344. As shown in the following Table, NK92MI cells expressing the SAR (SEQ ID NO: 2277) showed highest cytotoxicity as measured by Matador Assay. NK92MI cells expressing DAP10-SAR (SEQ ID NO: 2275) also showed modest cytotoxicity.

TABLE 52

| RAJI-MATADOR ASSAY | Average | SD |
|---|---|---|
| Medium | 9308 | 634 |
| Parental | 39075 | 3842 |
| SEQ ID NO: 2278 | 39424 | 366 |
| SEQ ID NO: 2275 | 53450 | 2739 |
| SEQ ID NO: 2277 | 89496 | 2318 |
| SEQ ID NO: 5141 | 37447 | 981 |

### NF-κB Activation Assay

[1141] Jurkat cells were engineered to express firefly luciferase cDNA (Luc) under NF-κB responsive promoter. The cells were subsequently infected with lentiviral vectors encoding the following SAR constructs to generate cells stably expressing the different SARs. The Jurkat-NF-κB cells expressing the different SARs were cocultured with RAJI-wt (CD19+ve) or RAJI-CD19-KO (CD19-null) cells for 24 hours and luciferase activity was measured.

TABLE 53

| | Average | | | Std Dev | | |
|---|---|---|---|---|---|---|
| | | Raji- | | | Raji- | |
| | | CD19- | | | CD19- | |
| SAR NAME | alone | KO | Raji | alone | KO | Raji |
| SEQ ID NO: 2275 | 448 | 681 | 991 | 79 | 113 | 91 |
| (SEQ ID NO: 2277) | 670 | 995 | 1602 | 137 | 118 | 224 |
| SEQ ID NO: 1860 | 572 | 1337 | 843 | 20 | 88 | 647 |
| SEQ ID NO: 5141 | 572 | 853 | 2104 | 74 | 4 | 952 |

[1142] The accompanying Table 53 shows induction of NF-κB activity by Jurkat cells expressing the SARs with SEQ ID NO: 2275 and 2277. There was no NF-κB induction by NKp46 SAR with SEQ ID NO: 1860.

[1143] Induction of NFAT promoter driven GFP expression. Jurkat-NFAT-GFP (JNG) cells are infected with lentiviral vectors encoding different SAR constructs and selected with puromycin. The control JNG cells and SAR-expressing JNG cells are cocultured for approximately 24 hours with different target cell lines expressing their cognate antigen(s). Thus, JNG cells expressing SARs targeting CD19 are co-cultured with CD19 antigen-expressing cell line RAJI and their ability to bind to the target antigen and induce cell signaling is assayed by measuring induction of GFP expression using Flow Cytometry. RAJI cells lacking CD19 (RAJI-CD19-KO) are used as negative controls. The induction of GFP expression is quantified as 1+, 2+, 3+ etc. depending on % of SAR expressing cells that induce GFP over the control cells. Thus, 1.6+ means that approximately 16% of JNG cells expressing the SAR showed GFP induction upon coculture with the target cells above the level seen with control JNG parental cells. The results in the following Table demonstrate activation of NFAT induced GFP expression upon expression of most single chain and double chain SAR constructs. The results also show induction of NFAT by double chain heterodimeric SAR constructs, such as SARs represented by SEQ ID NO: 2276, 2280, 2314-2316, 2319-2326. The results further show that the SAR constructs expressing at least one chain with full extracellular domain of CD16A not only respond to cells expressing the antigen(s) targeted by their antigen binding domain (e.g., BCMA-FHVH) but also retain the ability to bind to Fc region of an antibody targeting a different antigen. Thus, in an exemplary embodiment, JNG cells expressing the SAR construct CD8SP-Sph-BCMA-FHVH93-Kpn-G4S-EcoR1-CD16A-F158V-FL-F-P2A-Spe-IgHSP-Apa-CD20-VHH-USC1-2HC2D6-Bam-G4S-Bst-CD16A-F158V-FL-v2-F2A-Xba-PAC(SEQ ID NO: 2283) induces NFAT-driven GFP when co-cultured with RAJI (CD19+ and BCMA+) and L363 (CD19-ve/BCMA+) cell lines via its antigen binding domains BCMA-FHVH93 and CD20-VHH-USC1-2HC2D6, respectively. More importantly, JNG cells expressing this SAR (SEQ ID NO: 2283) construct fail to induce GFP when co-cultured with Her2-expressing SKOV3 cells. However, strong induction of GFP is observed when the JNG cells expressing this SAR are co-cultured with SKOV3 cells in the presence of Herceptin (1pg/ml) that can bind to either of the two CD16A-F158V-FL chains comprising this SAR construct. Essentially similar results are obtained when the experiment is repeated with JNG cells expressing the SAR construct CD8SP-Sph-BCMA-FHVH93-Kpn-G4S-EcoR1-CD16A-V158A-FL-F-P2A-Spe-IgHSP-Apa-CD20-VHH-USC1-2HC2D6-Bam-G4S-Bst-CD19-hu-mROO5-1-vH-Mlu-[hTCRa-T48C-opt]-F-F2A-Xba-PAC (SEQ ID NO: 2314). This construct is a double chain heterodimeric SAR in which one signaling chain comprises of CD16A-V158A-FL and the other signaling chain comprises of [hTCRa-T48C-opt]. In contrast, the SAR constructs represented by SEQ ID NO: 2315 and 2316 that comprise a CD16A chain (CD16-V158A-D2TMCP-v1) lacking the first Ig like domain fail to induce GFP when co-cultured with SKOV3 cells in the presence of Herceptin. However, these SAR constructs can still activate GFP upon co-culture with RAJI cells, suggesting functional signaling by the CD20-VHH-USC1-2HC2D6-Bam-G4S-Bst-CD19-hu-mROO5-1-vH-Mlu-[hTCRa-T48C-opt] chain present in this construct. On the other hand, the JNG cells expressing this SAR fail to induce GFP upon co-culture with L363 cells suggesting that the BCMA-FHVH93-Kpn-CD16-V158A-D2TMCP chain is not expressed or is not functionally active. Similarly, JNG cells expressing the construct CD8SP-Sph-BCMA-FHVH93-Kpn-CD16-V158A-D2TMCP-v1-F-P2A-Spe-IgHSP-Apa-CD20-VHH-USC1-2HC2D6-Bam-CD16-F158V-S197P-D2TMCP-v3-F-F2A-Xba-PAC (SEQ ID NO: 2322) fail to induce GFP when co-cultured with RAJI or L363 cells. Further, these cells fail to induce GFP when co-cultured with SKOV3 cells in the presence of Herceptin. These results suggest that neither BCMA-FHVH93-Kpn-CD16-V158A-D2TMCP-v1 nor CD20-VHH-USC1-2HC2D6-Bam-CD16-F158V-S197P-D2TMCP-v3 chains is functionally expressed.

[1144] The results further demonstrate that JNG cells expressing a number of double chain constructs comprising vL and vH fragments attached to two separate chains are capable of inducing GFP upon co-culture with their cognate antigen expressing cells. Exemplary such constructs are represented by 2275-2278, 2280-2282, 2319, 2321, 2300, 2323-2326. These results demonstrate that vL and vH fragments can assemble to form a functional Fv capable of binding to the cognate antigen and transmitting a signal even when they are attached to two separate chains. This is observed when the two chains are structurally distinct and not known to hetero or homo-dimerize. Exemplary such double chain heterodimeric constructs are represented by SEQ ID NO: 2276, 2280, 2323-2326.

[1145] The results further demonstrate that SAR constructs comprising one or two chains encoding the entire extracellular, transmembrane and cytosolic domain of CD16 (e.g., SEQ ID NO:3843, 3853 and 3863) show strong induction of NFAT-driven GFP as compared to SAR constructs encoding CD16 chains that are missing the first Ig domain of CD16 (e.g., SEQ ID NO: 3844, 3854, and 3864). Further, SARs constructs comprising CD16 one or two chains encoding the entire extracellular, transmembrane and cytosolic domain of CD16 (e.g., SEQ ID NO:3843, 3853 and 3863) in general show stronger induction of NFAT-driven GFP. Similarly, JNG cells expressing the SAR constructs (e.g., SEQ ID NO: 2297) comprising the entire extracellular, transmembrane and cytosolic domain of NKp30 (e.g., NKp30-ECDTMCP-opt1 or opt2) represented by SEQ ID NO: 3763 or 3769 show strong induction of NFAT-driven GFP when co-cultured with their cognate antigen expressing cell lines.

TABLE 54

| SEQ | | NFAT-GFP |
|---|---|---|
| ID NO | NAME OF THE SIR CONSTRUCT | ASSAY |
| 2275 | CD8SP-CD19-hu-mROO5-1-vL-IgCL-DAP10-opt1-F-P2A-IgSP- | RAJI (+1.5), |
| | CD19-hu-mROO5-1-vH-Ig1CH1-DAP10-opt2-F-F2A-PAC | RAJI−CD19− |
| | | KO (−) |
| 2276 | CD8SP-hCD19-EUK-5-13-vL-IgCL-CD3zECDTMCP-opt-F-P2A- | RAJI (+1.3) |
| | SP-hCD19-EUK-5-13-vH-IgG1-CH1-CD16A-Hinge-TM-CP- | |
| | F158V-F-P2A-PAC | |
| 2277 | CD8SP-hCD19-EUK-5-13-vL-IgCL-CD3zECDTMCP-opt-F-P2A- | RAJI (+1.5) |
| | SP-hCD19-EUK-5-13-vH-IgG1-CH1-CD3zECDTMCP-opt2-F- | |
| | F2A-PAC | |
| 2279 | CD8SP-CD19-hu-mROO5-1-CD8-hing-NKG2D-TM-2B4z-F- | RAJI (+2.5), |
| | P2A-CD3z-P2A-SynthK13-Flag-F-P3A-PAC | RAJI−CD19− |
| | | KO (−) |
| 2280 | CD8SP-CD19-hu-mROO5-1-vL-IgCL-NC-D2GKN-ECD-TM-CP- | RAJI (+0.6) |
| | opt1-F-P2A-CD19-hu-mROO5-1-vH-Hinge-TM-CP-NKp46-opt2- | |
| | F-F2A-PAC | |
| 2281 | CD8SP-CD19-hu-mROO5-1-vL-NKp46-Hinge-TM-CP-opt1-F- | RAJI (+1.4) |
| | P2A-IgSP-CD19-hu-mROO5-1-vH-NKp46-Hinge-TM-CP-opt2-F- | |
| | F2A-PAC | |
| 2283 | CD8SP-BCMA-FHVH93-G4S-CD16A-F158V-FL-F-P2A-IgHSP- | RAJI (+4.2), |
| | CD20-VHH-USC1-2HC2D6-G4S-CD16A-F158V-FL-v2-F2A- | L363 (+1.4), |
| | PAC | SKOV3 (−), |
| | | SKOV3 + |
| | | Herceptin (+7.1) |
| 2314 | CD8SP-BCMA-FHVH93-G4S-CD16A-V158A-FL-F-P2A-IgHSP- | RAJI (+2.9), |
| | CD20-VHH-USC1-2HC2D6-G4S-CD19-hu-mROO5-1-vH- | L363 (+1.1), |
| | [hTCRa-T48C-opt]-F-F2A-PAC | SKOV3 (−), |
| | | SKOV3 + |
| | | Herceptin (+6.5) |
| 2315 | CD8SP-BCMA-FHVH93-G4S-CD16A-V158A-D2TMCP-v1-F- | RAJI (+2.8), |
| | P2A-IgHSP-CD20-VHH-USC1-2HC2D6-G4S-CD19-hu-mR005- | L363 (+/−), |
| | 1-vH-[hTCRa-T48C-opt]-F-F2A-PAC | SKOV3 (−), |
| | | SKOV3 + |
| | | Herceptin (−) |
| 2316 | CD8SP-BCMA-FHVH93-CD16-V158A-D2TMCP-v1-F-P2A- | RAJI (+4.4), |
| | IgHSP-CD20-VHH-USC1-2HC2D6-G4S-CD19-hu-mROO5-1-vH- | L363 (−), |
| | [hTCRa-T48C-opt]-F-F2A-PAC | SKOV3 (−), |
| | | SKOV3 + |
| | | Herceptin (−) |
| 2317 | CD8SP-BCMA-FHVH93-G4S-CD16-V158A-D2TMCP-v1-F- | RAJI (−), |
| | P2A-PAC | L363 (−) |
| 2318 | SP-CD20-VHH-USC1-2HC2D6-G4S-CD16A-F158V-FL-v2-F2A- | RAJI (+3.5) |
| | PAC | |
| 1638 | CD8SP-BCMA-FHVH93-G4S-CD16A-V158-FL-F-P2A-PAC- | L363 (+2) |
| 2319 | CD8SP-CD19-hu-mROO5-1-vL-NKp30-ECDTMCP-opt1-F-P2A- | RAJI (+0.8) |
| | IgSP-CD19-hu-mROO5-1-vH-NKp46-Hinge-TM-CP-opt2-F-F2A- | |
| | PAC | |
| | CD8SP-NKp30-Ig-Hinge-opt1-G4S-humROO5-vL-[hTCRb- | RAJI (+1.3) |
| | S57C]-F-P2A-IgHSP-CD20-VHH-USC1-2HC2D6-G4S-CD19-hu- | |
| | mROO5-1-vH-[hTCRa-T48C-opt]-F-F2A-PAC | |
| | CD8SP-NKp44-Ig-opt1-[hTCRb-S57C]-F-P2A-IgHSP-CD20- | RAJI (+0.8) |
| | VHH-USC1-2HC2D6-G4S-CD19-hu-mROO5-1-vH-[hTCRa- | |
| | T48C-opt]-F-F2A-PAC | |
| | CD8SP-NKp44-Ig-opt1-G4S-humROO5-vL-[hTCRb-S57C]-F- | RAJI (+0.5) |
| | P2A-IgHSP-CD20-VHH-USC1-2HC2D6-G4S-CD19-hu-mROO5- | |
| | 1-vH-[hTCRa-T48C-opt]-F-F2A-PAC | |
| 2320 | CD8SP-BCMA-FHVH93-G4S-NKp44-Hinge-TMCP-opt1-F-P2A- | RAJI (+1.1), |
| | IgHSP-CD20-VHH-USC1-2HC2D6-G4S-CD16A-v158-FL-v2- | L363 (+/−), |
| | F2A-PAC | SKOV3 (−), |
| | | SKOV3 + |
| | | Herceptin (+6.2) |
| 2321 | CD8-hCD19-EUK-5-13-vL-IgCL-NKp44-ECDTMCP-opt1-F- | RAJI (+0.3) |
| | P2A-SP-hCD19-EUK-5-13-vH-IgG1-CH1-CD3zECDTMCP-opt2- | |
| | F-F2A-PAC | |
| | CD19-hu-mROO5-1-vL-NKp44-ECDTMCP-opt1-F-P2A-IgSP- | RAJI (+0.5) |
| | CD19-hu-mROO5-1-vH-NKp46-Hinge-TM-CP-opt2-F-F2A-PAC- | |
| | (100620-BBW1) | |
| 2300 | CD8SP-CD19-hu-mROO5-1-vL-NKp44-Hinge-TMCP-opt1-F- | RAJI (+0.4) |
| | P2A-IgSP-CD19-hu-mROO5-1-vH-NKp44-Hinge-TMCP-opt2-F- | |
| | F2A-PAC | |
| | CD8SP-hCD19-EUK-5-13-vL-IgCL-mutCD3z-ECDTM-2B4CP- | RAJI (+0.2) |
| | opt1-CD3zCP-opt1-F-P2A-dSPE-IgSP-hCD19-EUK-5-13-vH- | |
| | IgG1-CH1-DAP10-opt2-CD3zCP-opt2-F-F2A-PAC | |
| 2322 | CD8SP-BCMA-FHVH93-CD16-V158A-D2TMCP-v1-F-P2A- | RAJI (+/−), |
| | IgHSP-CD20-VHH-USC1-2HC2D6-CD16-F158V-S197P- | L363 (−), |
| | D2TMCP-v3-F-F2A-PAC | SKOV3 (−), |
| | | SKOV3 + |
| | | Herceptin (−) |
| 2323 | CD8-hCD19-EUK-5-13-vL-IgCL-NKp30-Hinge-TMCP-opt1-F- | RAJI (+0.4) |
| | P2A-SP-hCD19-EUK-5-13-vH-IgG1-CHI-CD3zECDTMCP-opt2- | |
| | F-F2A-PAC | |
| 2325 | CD8SP-NKp30-Ig-Hinge-opt1-[hTCRb-S57C]-F-P2A-IgHSP- | RAJI (+0.6) |
| | CD20-VHH-USC1-2HC2D6-G4S-CD19-hu-mROO5-1-vH- | |
| | [hTCRa-T48C-opt]-F-F2A-PAC | |
| 2324 | CD8-hCD19-EUK-5-13-vL-IgCL-NKp44-Hinge-TMCP-opt1-F- | RAJI (+0.4) |
| | P2A-SP-hCD19-EUK-5-13-vH-IgG1-CH1-CD3zECDTMCP-opt2- | |
| | F-F2A-PAC | |
| 2326 | hCD19-EUK-5-13-vL-IgCL-CD8-hinge-NKG2D-TM-2B4-CP-opt- | RAJI (+0.4) |
| | 1-CD3zCP-opt1-F-P2A-dSPE-IgSP-hCD19-EUK-5-13-vH-IgG1- | |
| | CH1-DAP10-opt2-CD3zCP-opt2-F-F2A-dXba-PAC | |
| 2293 | CD8SP-CD19-hu-mROO5-1-vL-NKp30-ECDTMCP-opt1-F-P2A- | RAJI (+0.3) |
| | SP-CD19-hu-mROO5-1-vH-NKp30-ECDTMCP-opt2-F-F2A-PAC | |
| 2294 | CD8SP-NKp30-Ig-Hinge-opt1-G4S-humROO5-vL-[hTCRb- | RAJI (+1.2) |
| | S57C]-F-P2A-IgHSP-NKp30-Ig-Hinge-opt2-G4S-CD19-hu- | |
| | mROO5-1-vH-[hTCRa-T48C-opt]-F-F2A-PAC | |
| 2296 | CD8SP-BCMA-FHVH93-G4S-NKp44-Hinge-ECDTMCP-opt1-F- | RAJI (+0.3), |
| | P2A-IgHSP-CD20-VHH-USC1-2HC2D6-G4S-NKp44-Hinge- | L363 (−) |
| | ECDTMCP-opt2-F2A-PAC | |
| 2297 | CD8SP-BCMA-FHVH93-G4S-NKp30-ECDTMCP-opt1-F-P2A- | RAJI (+1.2), |
| | IgHSP-CD20-VHH-USC1-2HC2D6-G4S-NKp30-ECDTMCP- | L363 (+1.1) |
| | opt2-F-F2A-PAC | |
| 2300 | CD8SP-CD19-hu-mROO5-1-vL-NKp44-Hinge-TMCP-opt1-F- | RAJI (+0.4) |
| | P2A-IgSP-CD19-hu-mROO5-1-vH-NKp44-Hinge-TMCP-opt2-F- | |
| | F2A-PAC | |
| 2299 | CD8SP-CD19-hu-mROO5-1-vL-NKp44-ECDTMCP-opt1-F-P2A-IgSP-CD19-hu- | |
| | mROO5-1-vH-NKp44-ECDTMCP-opt2-F-F2A-PAC | |
| 2292 | CD8SP-hCD19-EUK-5-13-vL-IgCL-NKp30-ECDTMCP-opt1-F- | RAJI (−) |
| | P2A-SP-hCD19-EUK-5-13-vH-IgG1-CH1-NKp30-ECDTMCP- | |
| | opt2-F-F2A-PAC | |
| 2298 | CD8-hCD19-EUK-5-13-vL-IgCL-NKp44-ECDTMCP-opt1-F- | RAJI (−) |
| | P2A-SP-hCD19-EUK-5-13-vH-IgG1-CH1-NKp44-ECDTMCP- | |
| | opt2-F-F2A-PAC | |
| 2299 | CD8-hCD19-EUK-5-13-vL-IgCL-NKp30-ECDTMCP-opt1-F- | RAJI (+1.1) |
| | P2A-SP-hCD19-EUK-5-13-vH-IgG1-CH1-CD3zECDTMCP-opt2- | |
| | F-F2A-PAC | |
| 2299 | CD8-hCD19-EUK-5-13-vL-IgCL-Xho-NKp30-ECDTMCP-opt1-F-P2A- | RAJI +1.1 |
| | Spe-SP-Bst-hCD19-EUK-5-13-vH-IgG1-CH1-Mlu-CD3zECDTMCP- | |
| | opt2-F-F2A-PAC | |

[1146] A number of double chain SIR with deleted TCRα, β, γ and δ chains were constructed and expressed in JNG cells. As shown in the following Table, surprisingly, SIRs with deleted TCRα, β, γ or δ chains (SEQ ID NO: 7619-7625 and showed strong NFAT-GFP activity when expressed in JNG cells. Thus, deleted TCRα, β, γ or δ chains can be used to generate a diverse panel of SIR with varying expression and signaling activity to generate a diverse immune response.

TABLE 55

| SEQ ID | | JURKAT NFAT- |
|---|---|---|
| NO (DNA) | Name of fragment | GFP ASSAY |
| 7601 | CD8SP-BCMA-FHVH93-G4S-CD16A-V158-FL-F-P2A-PAC | L363 +2 |
| 7602 | CD20-Ubli-NKp44-ECDTMCP-opt2-F-F2A-PAC | |
| 7603 | BCMA-J6M0-NKp44-ECDTMCP-opt2-F-F2A-PAC | L363 +1 |
| 7604 | CD22-h10F4v2-NKp44-ECDTMCP-opt2-F-F2A-PAC | RAJI +0.5 |
| 7605 | 8SP-BCMA917-vHH-E59D-NKp44-ECDTMCP-opt2F2A-PAC | L363 +1 |
| 7606 | CD8SP-PSMA-USC76-chVH-NKp44-ECDTMCP-opt2-F-F2A- | LnCAP +0.5 |
| | PAC | |
| 7607 | CD8SP-CD19-hu-mROO5-1-scFv-NKp30-ECDTMCP-opt2-F- | RAJI +3.5 |
| | F2A-PAC | |
| 7608 | FMC64-NKp30-ECDTMCP-opt2-F-F2A-PAC | RAJI +2.5 |
| 7609 | CD20-2F2-NKp30-ECDTMCP-opt2-F-F2A-PAC | RAJI +2 |
| 7610 | CD8SP-Hu161-2-NKp30-ECDTMCP-opt2-F-F2A-PAC | HEL +0.5 |
| 7611 | BCMA-J6M0-NKp30-ECDTMCP-opt2-F-F2A-PAC | L363 +1 |
| 7612 | CD22-h10F4v2-NKp30-ECDTMCP-opt2-F-F2A-PA | RAJI +0.5 |
| 7613 | CD8SP-hu-HA22-1-NKp30-ECDTMCP-opt2-F-F2A-PAC | RAJI +1 |
| 7614 | CD8SP-CD20-VHH-USC1-2HC2D6-NKp30-ECDTMCP-opt2-F- | RAJI +2 |
| | F2A-PAC | |
| 7615 | CD8SP-CD38-331-vHH-D64E-NKp30-ECDTMCP-opt2-F-F2A- | L363 +1 |
| | PAC | |
| 7616 | CD8SP-BCMA917-vHH-E59D-NKp30-ECDTMCP-opt2-F-F2A- | L363 +1 |
| | PAC | |
| 7617 | CD8SP-PSMA-USC76-chVH-NKp30-ECDTMCP-opt2-F-F2A- | LnCAP +1.5 |
| | PAC | |
| 7618 | CD8SP-BCMA-FHVH93-G4S-NKp46-opt1-F-P2A::Xba-PAC | L363 +0.5 |
| 7619 | CD19-hu-mROO5-1-vL-huTCRg-F-P2A-SP-CD19-hu-mROO5- | RAJI +1.5 |
| | 1-vH-huTCRd-d2-F-F2A-PAC | |
| 7620 | CD19-hu-mROO5-1-vL-huTCRg-d1-F-P2A-SP-CD19-hu- | RAJI +3 |
| | mROO5-1-vH-huTCRd-d2-F-F2A-PAC | |
| 7621 | CD19-hu-mROO5-1-vL-huTCRg-d2-F-P2A-SP-CD19-hu- | RAJI +3.5 |
| | mROO5-1-vH-huTCRd-d2-F-F2A-PAC | |
| 7622 | CD19-hu-mROO5-1-vL-huTCRg-d8-F-P2A-SP-CD19-hu- | RAJI +2 |
| | mROO5-1-vH-huTCRd-d2-F-F2A-PAC | |
| 7623 | CD19-hu-mROO5-1-vL-huTCRg-d11-F-P2A-CD19-hu-mROO5- | RAJI +1 |
| | 1-vH-huTCRd-d2-F-F2A-PAC | |
| 7624 | CD19-hu-mROO5-1-vL-huTCRg-d16-F-P2A-CD19-hu-mROO5- | RAJI +1 |
| | 1-vH-huTCRd-d2-F-F2A-PAC | |
| 7625 | CD19-hu-mROO5-1-vL-huTCRg-d21-F-P2A-CD19-hu-mROO5- | RAJI +1 |
| | 1-vH-huTCRd-d2-F-F2A-PAC | |
| 7626 | CD8SP-BCMA-FHVH93-G4S-CD16A-V158-FL-F-P2A-IgHSP- | RAJI+, |
| | CD20-VHH-USC1-2HCD26-GS4-KIR2DL1-ECDTMCP-opt2-F- | L363+ |
| 7627 | CD8SP-BCMA-FHVH93-G4S-CD16A-V158-FL-F-P2A-IgHSP- | RAJI 0.5+, |
| | CD20-VHH-USC1-2HCD26-GS4-OX40-ECDTMCP-opt2-F- | L363 1.5+ |
| | F2A-PAC | |
| 7628 | CD19-hu-mROO5-1-vL-huTCRg-d3-F-P2A-SP-CD19-hu- | RAJI +5 |
| | mROO5-1-vH-huTCRd-d2-F-F2A-PAC | |
| 7629 | CD19-hu-mROO5-1-vL-huTCRg-d4-F-P2A-SP-CD19-hu- | RAJI +4.5 |
| | mROO5-1-vH-huTCRd-d2-F-F2A-PAC | |
| 7630 | CD19-hu-mROO5-1-vL-huTCRg-d31-F-P2A-SP-CD19-hu- | RAJI +1.5 |
| | mROO5-1-vH-huTCRd-d2-F-F2A-PAC | |
| 7631 | CD19-hu-mROO5-1-vL-huTCRg-d9-F-P2A-SP-CD19-hu- | RAJI +1.5 |
| | mROO5-1-vH-huTCRd-d2-F-F2A-PAC | |
| 7632 | CD19-hu-mROO5-1-vL-huTCRg-d26-F-P2A-SP-CD19-hu- | RAJI +2.5 |
| | mROO5-1-vH-huTCRd-d2-F-F2A-PAC | |
| 7633 | CD8SP-BCMA-FHVH93-G4S-CD16A-V158-FL-F-P2A-IgHSP- | RAJI 0.5+, |
| | CD20-VHH-USC1-2HCD26-GS4-CD32-ECDTMCP-opt2-F- | L363 1.0+ |
| | F2A-PAC | |
| 7634 | CD19-hu-mROO5-1-vL-huTCRg-d5-F-P2A-SP-CD19-hu- | RAJI+ |
| | mROO5-1-vH-huTCRd-d4-F-F2A-PAC | |
| 7635 | CD19-hu-mROO5-1-vL-huTCRg-F-P2A-SP-CD19-hu-mROO5- | RAJI 2.5+ |
| 7636 | CD8SP-CD19-hu-mROO5-1-scFv-G3S-NKp46-ECDTMCP-opt2- | RAJI+/− |
| | F-F2A-PAC | |
| 7637 | CD8SP-CD19-hu-mROO5-1-scFv-G3S-CD3e-ECDTMCP-d9- | RAJI 1.5+ |
| | opt2-F-F2A-PAC | |
| 7638 | CD8SP-CD19-hu-mROO5-1-scFv-G3S-CD3e-ECDTMCP-d18- | RAJI −ve |
| | opt2-F-F2A-PAC | |
| 7639 | CD8SP-hCD19-EUK-5-13-vL-IgCL-NKp30-Hinge-TMCP-opt1- | RAJI +0.4 |
| | F-P2A-SP-hCD19-EUK-5-13-vH-IgG1-CH1-CD3zECDTMCP- | |
| | opt2-F-F2A-PAC | |
| 7640 | CD8SP-NKp30-Ig-Hinge-opt1-[hTCRb-S57C]-F-P2A-IgHSP- | RAJI +0.6 |
| | CD20-VHH-USC1-2HC2D6-G4S-CD19-hu-mROO5-1-vH- | |
| | [hTCRa-T48C-opt]-F-F2A-PAC | |
| 7641 | CD8SP-hCD19-EUK-5-13-vL-IgCL-NKp44-Hinge-TMCP-opt1- | RAJI +0.4 |
| | F-P2A-SP-hCD19-EUK-5-13-vH-IgG1-CH1-CD3zECDTMCP- | |
| | opt2-F-F2A-PAC | |
| 7642 | CD8-hCD19-EUK-5-13-vL-IgCL-CD3zECDTMCP-opt-F-P2A- | RAJI +0.1 |
| | SP-hCD19-EUK-5-13-vH-IgG1-CH1-CD16A-v158-S197P-FL- | |
| | v3-F-F2A-PAC | |
| 7643 | CD8SP-CD19-hu-mROO5-vL-IgCL-CD3zECDTMCP-opt-F- | RAJI +0.8 |
| | P2A-SP-CD19-hu-mROO5-vH-IgGA1-CHI-CD3zECDTMCP- | |
| | opt2-F-F2A-PAC | |
| 7644 | CD8SP-CD19-hu-mROO5-vL-IgCL-CD3zECDTMCP-opt-F- | RAJI +1.1 |
| | P2A-SP-CD19-hu-mROO5-vH-IgG2-1C-CHI-CD3zECDTMCP- | |
| | opt2-F-F2A-PAC | |
| 7645 | CD8SP-CD19-hu-mROO5-vL-IgCL-CD3zECDTMCP-opt-F- | RAJI +0.9 |
| | P2A-SP-CD19-hu-mROO5-vH-IgD-CHI-CD3zECDTMCP-opt2- | |
| | F-F2A-PAC | |
| 7646 | CD8SP-CD19-hu-mROO5-vL-IgCL-CD3zECDTMCP-opt-F- | RAJI +1 |
| | P2A-SP-CD19-hu-mROO5-vH-IgG2-0C-CD3zECDTMCP-opt2- | |
| | F-F2A-PAC | |
| 7647 | CD8SP-CD19-hu-mROO5-vL-IgCL-CD3zECDTMCP-opt-F- | RAJI +1.3 |
| | P2A-SP-CD19-hu-mROO5-vH-IgGA2-CHI-CD3zECDTMCP- | |
| | opt2-F-F2A-PAC | |
| 7648 | CD8SP-CD19-hu-mROO5-vL-IgCL-CD3zECDTMCP-opt-F- | RAJI +1.1 |
| | P2A-SP-CD19-hu-mROO5-vH-IgE-CHI-CD3zECDTMCP-opt2- | |
| | F-F2A-PAC | |
| 7649 | CD8SP-CD19-hu-mROO5-vL-IgCL-CD3zECDTMCP-opt-F- | RAJI +3.1; |
| | P2A-SP-CD19-hu-mROO5-vH-IgG4-CHI-CD3zECDTMCP-opt2- | with Dasatinib |
| | F-F2A-PAC | (+2.3) |
| 7650 | CD8SP-CD19-hu-mROO5-vL-IgCL-CD3zECDTMCP-opt-F- | RAJI +0.7 |
| | P2A-SP-CD19-hu-mROO5-vH-IgG3-CHI-CD3zECDTMCP-opt2- | |
| | F-F2A-PAC | |
| 7651 | CD8-hCD19-EUK-5-13-vL-IgCL-CD8-hinge-NKG2D-TM-2B4- | RAJI +0.4 |
| | CP-opt-1-CD3zCP-opt1-F-P2A-IgSP-hCD19-EUK-5-13-vH- | |
| | IgG1-CH1-DAP10-opt2-CD3zCP-opt2-F-F2A-PAC | |
| 7652 | CD8SP-CD19-hu-mROO5-vL-IgCL-CD3zECDTMCP-opt-F- | RAJI +1.7 |
| | P2A-SP-CD19-hu-mROO5-vH-IgM-CHI-CD3zECDTMCP-opt2- | |
| | F-F2A-PAC | |
| 7653 | CD19-hu-mROO5-1-vL-NKp30-ECDTMCP-opt1-F-P2A-IgSP- | RAJI +0.3 |
| | CD19-hu-mROO5-1-vH-NKp30-ECDTMCP-opt2-F-F2A-PAC | |
| 7654 | CD8SP-NKp30-Ig-Hinge-opt1-G4S-humROO5-vL-[hTCRb- | RAJI +1.2, |
| | S57C]-F-P2A-IgHSP-NKp30-Ig-Hinge-opt2-G4S-CD19-hu- | Hela +1.1, |
| | mROO5-1-vH-[hTCRa-T48C-opt]-F-F2A-PAC | K562 +2.5 |
| 7655 | CD8SP-NKp44-Ig-opt1-[hTCRb-S57C]-F-P2A-IgHSP-NKp30-Ig- | K562 +0.1 |
| | Hinge-opt2-[hTCRa-T48C-opt]-F-F2A-PAC | |
| 7656 | CD8SP-BCMA-FHVH93-G4S-NKp44-Hinge-ECDTMCP-opt1- | RAJI +0.3 |
| | F-P2A-IgHSP-CD20-VHH-USC1-2HCD26-G4S-NKp44-Hinge- | |
| | ECDTMCP-opt2-F2A-PAC | |
| 7657 | CD8SP-BCMA-FHVH93-G4S-NKp30-ECDTMCP-opt1-F-P2A- | RAJI +1.7, |
| | IgHSP-CD20-VHH-USC1-2HC2D6-G4S-NKp30-ECDTMCP- | RAJI + 100 nM |
| | opt2-F-F2A-PAC | Dasatinib +0.8; |
| | | L363 +1 |
| 7658 | CD19-hu-mROO5-1-vL-NKp44-Hinge-TMCP-opt1-F-P2A-IgSP- | RAJI +0.3, |
| | CD19-hu-mROO5-1-vH-NKp44-Hinge-TMCP-opt2-F-F2A-PAC | RAJI + 100 nM |
| | | Dasatinib −ve |
| 7659 | CD19-hu-mROO5-1-vL-NKp44-ECDTMCP-opt1-F-P2A-IgSP- | RAJI +1 |
| | CD19-hu-mROO5-1-vH-NKp44-ECDTMCP-opt2-F-F2A-PAC | |
| 7660 | FMC64-CD16A-v158-S197P-FL-v3-F-F2A-PAC | RAJI +0.5 |
| 7661 | CD20-2F2-CD16A-v158-S197P-FL-v3-F-F2A-PAC | RAJI +0.6 |
| 7662 | CD20-Ubli-CD16A-v158-S197P-FL-v3-F-F2A-PAC | RAJI +0.1 |
| 7663 | CD8SP-Hu161-2-CD16A-v158-S197P-FL-v3-F-F2A-PAC | HEL +0.2 |
| 7664 | BCMA-J6M0-CD16A-v158-S197P-FL-v3-F-F2A-PAC | L363 +0.8 |
| 7665 | CD8SP-SC22-HA22-CD16A-v158-S197P-FL-v3-F-F2A-PAC | RAJI +1.5 |
| 7666 | CD22-h10F4v2-CD16A-v158-S197P-FL-v3-F-F2A-PAC | RAJI +0.6 |
| 7667 | CD8SP-hu-HA22-1-CD16A-v158-S197P-FL-v3-F-F2A-PAC | RAJI +1.5 |
| 7668 | hCD19-Bu12-CD16A-v158-S197P-FL-v3-F-F2A-PAC | RAJI +0.3 |
| 7669 | CD8SP-CD20-VHH-USC1-2HC2D6-CD16A-v158-S197P-FL-v3- | RAJI +3.2, |
| | F-F2A-PAC | SKOV3 −ve, |
| | | SKOV3 + |
| | | Herceptin +5.8 |
| 7670 | CD8SP-CD38-331-vHH-D64E-CD16A-v158-S197P-FL-v3-F- | L363 +0.7 |
| | F2A-PAC | |
| 7671 | CD8SP-CD38-331-vHH-S53E-CD16A-v158-S197P-FL-v3-F- | Self-activation |
| | F2A-PAC | |
| 7672 | CD8SP-BCMA917-vHH-E59D-CD16A-v158-S197P-FL-v3-F- | L363 +0.2 |
| | F2A-PAC | |
| 7673 | CD8SP-SARScov2-CR3022-CD16A-v158-S197P-FL-v3-F-F2A- | |
| | PAC | |
| 7674 | CD8SP-CD19-hu-mROO5-vL-IgCL-Hinge-CD16A-v158-S197P- | RAJI +1.7, |
| | FL-v3-F-F2A-SP-CD19-hu-mROO5-vH-IgG1-CH1- | RAJI + 100 nM |
| | CD3zECDTMCP-opt2-F-F2A-PAC | Dasatinib +0.8; |
| | | SKOV3 +0.3, |
| | | SKOV3 plus |
| | | Herceptin 0.2 |
| 7675 | CD8-hCD19-EUK-5-13-vL-IgCL-mutCD3z-ECDTM-2B4CP- | RAJI +2 |
| | opt1-CD3zCP-opt1-F-P2A-IgSP-hCD19-EUK-5-13-vH-IgG1- | |
| | CH1-mutCD3z-ECDTM-2B4CP-opt2-CD3zCP-opt2-F-F2A-PAC | |
| 7676 | CD8SP-CD19-hu-mROO5-1-CD16A-v158-S197P-FL-v3-F-F2A- | RAJI +3 |
| | PAC | |
| 7677 | IgHSP-CD20-VHH-USC1-2HCD26-G4S-CD16A-v158-FL-v2- | RAJI +3.5 |
| | F2A-PAC | |
| 7678 | CD8SP-BCMA-FHVH93-G4S-CD16A-V158-FL-F-P2A::Xba- | L363 +2 |
| | PAC | |
| 7679 | CD8SP-CD19-hu-mROO5-1-scFv-CD16A-v158-S197P-FL-v3 | RAJI +2 |

[1147] Induction of NFAT promoter driven GFP expression. Jurkat-NFAT-GFP (TNG) cells are infected with lentiviral vectors encoding different CD16-SAR constructs comprising scFv or vHH domains as the antigen binding domains and CD16A-F158V-S 197P-FL-v3 as the signaling chain. The cells are expanded for 4 days without drug selection. The control JNG cells and SAR-expressing JNG cells are cocultured for approximately 24 hours with different target cell lines expressing their cognate antigen(s). Thus, JNG cells expressing SARs targeting CD19 are co-cultured with CD19 antigen-expressing cell line RAJI and their ability to bind to the target antigen and induce cell signaling is assayed by measuring induction of GFP expression using Flow Cytometry. The results show induction of NFAT-driven GFP expression by JNG cells expressing different SARs when co-cultured with cell lines expressing their target antigen. Essentially similar results are obtained when the experiment is repeated with other CD16 SAR constructs listed in Tables 36-38 of provisional application.

TABLE 56

| | SEQ ID | | NFAT-GFP |
|---|---|---|---|
| TARGET | NO | NAME OF THE SAR CONSTRUCT | ASSAY |
| CD19 | | FMC64-Mlu-CD16A-v158-S197P-FL-v3 | RAJI +0.5 |
| CD20 | 4861 | CD8SP-CD20-2F2-scFv-CD16A-F158V-S197P- | RAJI +0.2 |
| | | FL-v3 | |
| BCMA | 4854 | CD8SP-BCMA-J6M0-scFv-CD16A-F158V- | L363 +0.2 |
| | | S197P-FL-v3 | |
| CD22 | 4983 | CD8SP-CD22-HA22-scFv-CD16A-F158V-S197P- | RAJI +0.1 |
| | | FL-v3 | |
| CD22 | 4863 | CD8SP-CD22-h10F4v2-scFv-CD16A-F158V- | RAJI +0.1 |
| | | S197P-FL-v3 | |
| CD19 | 4858 | CD8SP-CD19Bu12-scFv-CD16A-F158V-S197P- | RAJI +0.3 |
| | | FL-v3 | |
| CD20 | 5047 | CD8SP-CD20-VHH-USC1-CD16A-F158V-S197P- | RAJI +2.6 |
| | | FL-v3 | |

[1148] JNG and NK92 cells expressing the different SAR constructs were generated and tested for NFAG-GFP assay and cytotoxicity assay (Matador assay) using the cell lines expressing their target antigen as described in the preceding sections. A summary of the results of different SAR constructs represented by with their SEQ ID NO and target antigen is provided below. Fold induction in the Matador assay was calculated as increase in luciferase activity upon co-culture of target cells with the SAR-expressing NK92 cells as compared to the luciferase activity observed upon co-culture with control NK92 cells. Co-culture assay was conducted for 2 h at E:T ratios between 0.3:1 to 1:1.

TABLE 57

| SEQ ID | | | NK92- Matador |
|---|---|---|---|
| NO (DNA) | TARGET | JNG Assay (NFAT-GFP) | Assay |
| 9245 | CD19 | RAJI(−), RS4−11(−) | RS411(+4.5) |
| 9246 | CD19 | L363(−), U266(−), HepG2(−) | |
| 9247 | CD19 | RAJI(+1) | |
| 9248 | CD19 | RAJI(+1) | |
| 9249 | CD19 | RAJI(−) | RS411(+1.1) |
| 9250 | CD19 | RAJI(+2) | |
| 9251 | CD19 | RAJI(+3) | |
| 9252 | CD19 | RAJI(+/−) | |
| 9253 | CD19 | RAJI(+1) | |
| 9254 | CD19 | RAJI(+/−) | RS411(+2.3) |
| 9255 | CD19 | RAJI2+ | |
| 9256 | CD19 | RAJI(+/−) | |
| 9257 | CD19 | RAJI(+1) | |
| 9258 | CD19 | RAJI(+1.5) | RS411(+26.1) |
| 9259 | CD19 | RAJI(+2) | RS411(+45.1) |
| 9260 | CD19 | RAJI(+2.5) | RS411(+28.8) |
| 9261 | CD19 | RAJI(+2) | RS411(+24.2) |
| 9262 | CD19 | RAJI(+1.5) | ND |
| 9263 | CD19 | RAJI(+1) | ND |
| 9264 | CD19 | RAJI(+/−) | ND |
| 9265 | CD19 | RAJI(+1) | ND |
| 9266 | CD19 | RAJI(+1) | ND |
| 9267 | CD19 | RAJI(+/−) | ND |
| 9268 | CD19 | RAJI(+1) | ND |
| 9269 | CD19 | RAJI(+1) | |
| 9270 | CD19 | RAJI(+1) | RS411(+11.2) |
| 9271 | CD19 | RAJI(+/−) | ND |
| 9272 | CD19 | RAJI(+/−) | RS411(+2.3) |
| 9273 | CD19 | RAJI(+/−) | |
| 9274 | CD19 | RAJI(+/−) | |
| 9275 | CD19 | RAJI(+/−) | RS411(+1.5) |
| 9276 | CD19 | RAJI(+/−) | ND |
| 9277 | CD19 | RAJI(+1) | ND |
| 9278 | CD19 | RAJI(+1) | RS411(+3.4) |
| 9279 | BCMA, | L363(+1.5), U266(+1), LNCaP(+/−) | ND |
| | PSMA | | |
| 9280 | BCMA, | L363(+1.5), U266(+1), LNCaP(+/−) | ND |
| | PSMA | | |
| 9281 | BCMA, | L363(+1.5), U266(+1), LNCaP(−) | ND |
| | PSMA | | |
| 9282 | BCMA, | L363(+1.5), U266(+1.5), LNCaP(−) | ND |
| | PSMA | | |
| 9283 | BCMA, | L363(+1.5), U266(+1.5), LNCaP(+1) | ND |
| | PSMA | | |
| 9284 | BCMA, | RAJI(+/−) | RS411(+1.1) |
| | PSMA | | |
| 9285 | CD19 | RAJI(+1) | ND |
| 9286 | CD19 | RAJI(+1) | ND |
| 9287 | CD19 | RAJI(+/−) | ND |
| 9288 | CD19 | RAJI(+3) | ND |
| 9289 | CD19 | RAJI(+/−) | ND |
| 9290 | CD19 | RAJI(+1) | ND |
| 9291 | CD19 | ND | RS411(+1.1) |
| 9292 | CD19 | ND | RS411(+1.1) |
| 9293 | CD19 | RAJI(+1.5) | ND |
| 9294 | CD19 | RAJI(+/−) | ND |
| 9295 | CD19 | RAJI(+/−) | ND |
| 9296 | CD19 | RAJI(+1) | ND |
| 9297 | CD19 | RAJI(+1) | ND |
| 9298 | CD19 | RAJI(+/−) | ND |
| 9299 | CD19 | RAJI(+1) | ND |
| 9300 | CD19 | RAJI(+1) | ND |
| 9301 | CD19 | RAJI(+/−) | ND |
| 9302 | CD19 | ND | RS411(+1.8) |
| 9303 | CD19 | ND | RS411(+1.5) |
| 9304 | CD19 | RAJI(+1) | ND |
| 9305 | CD19 | RAJI(+1) | RS411(+11.2) |
| 9306 | CD20 | RAJI(+/−) | RS411(−), |
| | | | RAJI(+1.1) |
| 9307 | CD20 | RAJI(+/−) | RS411(−), |
| | | | RAJI(+1.1) |
| 9314 | CD19 | RAJI(−) | |
| 9315 | CD19 | RAJI(−) | RS411(+1.4) |
| 9316 | CD19 | RAJI(+1.5) | |
| 9317 | CD19 | RAJI(−) | |
| 9318 | CD19 | RAJI(−) | RS411(+1.1) |
| 9319 | CD19 | RAJI(−) | |
| 9321 | CD19 | RAJI(−) | |
| 9323 | CD19 | RAJI(+/−) | ND |
| 9324 | CD19 | L363(−), U266(−) | |
| 9325 | CD19 | RAJI(+/−) | ND |
| 9329 | CD19 | RAJI(−) | ND |
| 9330 | CD19 | RAJI(−) | ND |
| 9331 | CD19 | RAJI(+/−) | ND |
| 9332 | CD19 | RAJI(+2) | ND |
| 9333 | CD19 | RAJI(−) | ND |
| 9334 | CD19 | RAJI(−) | ND |
| 9335 | CD19 | RAJI(+2.5) | ND |
| 9339 | CD19 | RAJI(+1.5) | |

### NK92 Cells Expressing the CD19-TARGETED SARs Demonstrate Cytotoxicity Towards CD19-Expressing NALM6 and RAJI Cells

[1149] NK92 cells were infected with lentiviral vectors encoding the indicated CD19-TARGETED SAR constructs. The cells were selected in puromycin. Parental NK92 cells or SAR-expressing NK92 cells were co-cultured with the indicated target cell lines stably expressing Gluc at an Effector: Target (E:T) ratio of 0.25:1 for 4 hours in duplicate. At the end of the co-culture period, Gluc activity was measured by Matador assay following addition of CTZ assay buffer. The results show specific increase in Gluc activity in cultures containing Nalm6-Gluc and RAJI-Gluc cells upon co-culture with NK92 cells expressing the different CD19-TARGETED SARs. In contrast, there is no significant increase in GLuc activity in cultures containing RAJI-CD19-KO, U927 and THP-1 cells, which lack CD 19 expression. This demonstrates the specificity of the assay. The NK92 cells expressing the conventional 2^{nd} generation CAR (SEQ ID NO: 5441) showed the highest cytotoxicity towards Nalm6 and RAJI cells but also show non-specific cytotoxicity towards RAJI-CD19-KO, U937 and THP-1 cells.

TABLE 58
MATADOR ASSAY

| GLUC VALUE | | | | | | STD-DEV | | | | |
|---|---|---|---|---|---|---|---|---|---|---|
| SEQ ID | | | Raji- | | | | | Raji- | | |
| NO of | | | CD19 | | | | | CD19 | | |
| SAR | Nalm6 | Raji | KO | U937 | THP1 | Nalm6 | Raji | KO | U937 | THP1 |
| Parental | 1527 | 13326 | 6018 | 2409 | 2110 | 618 | 321 | 373 | 127 | 48 |
| NK92 | | | | | | | | | | |
| SEQ ID | 7002 | 23248 | 6424 | 2761 | 1973 | 194 | 246 | 1299 | 257 | 18 |
| NO: 5134 | | | | | | | | | | |
| SEQ ID | 9550 | 29486 | 9444 | 4957 | 2148 | 69 | 160 | 245 | 64 | 185 |
| NO: 5137 | | | | | | | | | | |
| SEQ ID | 5984 | 22941 | 7527 | 3470 | 2167 | 603 | 156 | 92 | 122 | 60 |
| NO: 2291 | | | | | | | | | | |
| SEQ ID | 6525 | 23767 | 7369 | 2852 | 2034 | 100 | 261 | 711 | 8 | 64 |
| NO: 5138 | | | | | | | | | | |
| SEQ ID | 3237 | 14857 | 5994 | 2306 | 2073 | 30 | 389 | 314 | 64 | 105 |
| NO: 5136 | | | | | | | | | | |
| SEQ ID | 2240 | 16922 | 6943 | 3501 | 1975 | 120 | 1003 | 410 | 12 | 34 |
| NO: 2289 | | | | | | | | | | |
| SEQ ID | 20882 | 35788 | 13510 | 7612 | 5388 | 1030 | 66 | 438 | 183 | 420 |
| NO: 5441 | | | | | | | | | | |
| SEQ ID | 11722 | 23869 | 7729 | 2920 | 2304 | 289 | 234 | 514 | 64 | 88 |
| NO: 5440 | | | | | | | | | | |
| SEQ ID | 12025 | 22126 | 7659 | 2761 | 2302 | 239 | 1570 | 141 | 201 | 192 |
| NO: 5139 | | | | | | | | | | |

### Matador Assay

[1150] NK92 paratent and NK92 cells expressing the indicated SARs and RS4; 11-Gluc target cells were co-incubated in E:T ratios of 0.3:1 and 1:1, which is 5,000:15,000 cells and 15,000:15,000 cells in each case. After 2-hour incubation, cell death was measured using Matador assay by addition of coeleleterazine. Results are shown in FIG. 6 and show effective induction of cell death by SAR with SEQ ID NO: 7695, 7692 and 7607.

### Matador Assay

[1151] NK92 paratent and NK92 cells expressing the indicated SARs and RS4; 11-Gluc target cells were co-incubated in E:T ratios of 0.3:1 and 1:1, which is 5,000:15,000 cells and 15,000:15,000 cells in each case. After 2-hour incubation, cell death was measured using Matador assay by addition of coeleleterazine. Results are shown in FIG. 7 and show effective induction of cell death by SAR with SEQ ID NO: 7679.

### Matador Assay

[1152] NK92 paratent and NK92 cells expressing the indicated SARs and L363-Gluc target cells were co-incubated in E:T ratios of 0.3:1 and 1:1, which is 5,000:15,000 cells and 15,000:15,000 cells in each case. After 2-hour incubation, cell death was measured using Matador assay by addition of coeleleterazine. Results are shown in FIG. 8 and show effective induction of cell death by SAR with SEQ ID NO: 7679.

### Matador Assay

[1153] NK92 paratent and NK92 cells expressing the indicated SARs and RS4; 11-Gluc target cells were co-incubated in E:T ratios of 0.3:1 and 1:1, which is 5,000:15,000 cells and 15,000:15,000 cells in each case. After 2-hour incubation, cell death was measured using Matador assay by addition of coeleleterazine. As shown both SAR constructs, comprising hu-mROO5-1-scFv, CD28 hinge region and NKp44-Hinge-TMCP or NKp46-Hinge-TMCP induced effective cell death. The results are shown in FIG. 9.

### Matador Assay

[1154] NK92 paratent and NK92 cells expressing the indicated SARs and RS4; 11-Gluc target cells were co-incubated in E:T ratios of 0.3:1 and 1:1, which is 5,000:15,000 cells and 15,000:15,000 cells in each case. After 2-hour incubation, cell death was measured using Matador assay by addition of coeleleterazine. Results are shown in FIG. 10

### Matador Assay

[1155] NK92 paratent and NK92 cells expressing the indicated SARs and L363-Gluc target cells were co-incubated in E:T ratios of 0.3:1 and 1:1, which is 5,000:15,000 cells and 15,000: 15,000 cells in each case. The NK92 and NK92-SAR cells also co-expressed a membrane anchored form of IL2 (SEQ ID NO: 7133). After 2-hour incubation, cell death was measured using Matador assay by addition of coeleleterazine. Results are shown in FIG. 11.

### Matador Assay

[1156] NK92 cells were engineered to express the SAR constructs NKG2D-opt2-G4Sx3-Bst-Her2-47D5-vHH-Mlu-F-F2A-Xba-PAC (SEQ ID NO: 7696) and NKG2D-opt2-G4Sx3-Bst-Her3-21F06-vHH-Mlu-F-F2A-Xba-PAC (SEQ ID NO: 7697). The NK92 paratent and NK92 cells expressing the SARs are co-cultured with SKOV3-Gluc target cells at an E:T ratios of 1:1. Cell death was measured using Matador assay by addition of coeleleterazine. Results show increase in Gluc activity upon co-culture with NK92 cells expressing the SAR constructs with SEQ ID NO: 7696 and 7697, reflecting induction of cell death.

### SAR-NK Cells

[1157] NY-ESO1-Tetramer-APC (HLA-A*02:01 human NY-ESO1 157-165 C165V APC-Labeled Tetramer) that target NY-ESO1 (157-165) peptide (SEQ ID NO: 10880) were obtained from NIH tetramer facility. JNG cells infected with NY-ESO1-SIR (061621-SCjJ7; SEQ ID NO: 9366) were selected with puromycin. The stable cells were stained with NY-ESO1-Tetramer-APC (HLA-A*02:01 human NY-ESO1 157-165 C165V APC-Labeled Tetramer) for 30 min at room temperature in dark and analyzed by flow cytometry. JNG cells expressing NY-ESO1 SAR were APC positive (10%) as compared to JNG-UI cells (1.42%). Similarly, 293FT cells transiently transfected with NY-ESO1-SAR (061621-SCjJ7; SEQ ID NO: 9366) and stained with NY-ESO1-tetramer-APC were 52.3% APC positive as compared to 293FT un-transfected cells (0.97%). The experiment was repeated with a construct in which the Va domain of the SAR was replaced by a different Va domain (SEQ ID NO: 8514). 293FT cells transfected with this SAR construct showed >70% staining with the NY-ESO1-tetramer-APC demonstrating that the platform can be used to construct different SAR with TCR like binding ability and comprising different variable domains. Next, the linker domains (i.e., TCRa-Ig3 and TCRb-Ig3) and signaling modules (e.g., CD3zECDTMCP-opt and CD3zECDTMCP opt2) of the NY-ESO1-SIR (061621-SCjJ7; SEQ ID NO: 9366) constructs were replaced by different linkers (e.g., IgCL, IgG-CHI etc.) and signaling modules comprising different signaling adaptors and variants and fragments thereof. The resulting SAR constructs are represented by SEQ ID NO: 9427-9434. The constructs showed increased staining with the NY-ESO1-tetramer-APC when transfected in 293FT cells. Other exemplary constructs targeting NY-ESO1 and comprising different backbones are represented by SEQ ID NO: 9356-9426 and are tested similarly. uTCR-SAR constructs targeting MAGE-A3 (112-120)/HLA-A2, (SEQ ID NO: 9439-9506, 9517-9518) are tested similarly using a MAGE-A3 (112-120)-tetramer-APC obtained from NIH tetramer facility.

[1158] THP-1 cells are stably transduced with the lentiviral vector encoding uTCR-SAR NY-ESO1-SAR (061621-SCjJ7; SEQ ID NO: 9366). The cells show increase in staining with the NY-ESO1-tetramer-APC and increase in phagocytosis of target cells with surface NY-ESO1/HLA-A2 complex expression.

[1159] A concentrated lentiviral vector encoding NY-ESO1-SAR (061621-SCjJ7; SEQ ID NO: 9366) was used to infect NK92 cell line, primary T cells and primary NK cells. Following infection, cells were stained with the NY-ESO1-tetramer-APC as above. Expression of the NY-ESO1-SAR (061621-SCjJ7; SEQ ID NO: 9366) resulted in increase in APC+ve cells in NK92 cell line from 4.93% to 84.06%, in primary NK cells from 3.3% to 10.98% and in primary T cells from 29% to 59.3%. These results demonstrate that NY-ESO1-SAR can be functionally expressed in variety of cell line, including both T cells and non-T cells and can confer TCR-like binding ability on those cells.

[1160] NK92, primary NK, and primary T cells expressing NY-ESO1-SAR (061621-SCjJ7; SEQ ID NO: 9366) were grown for 1 day in XVIVO medium supplemented with 50 IU/ml IL2. Co-cultured with T2-cells expressing GLuc in the presence and absence of a NYESO peptide (10μM), a CD28 agonist antibody (1 μg/ml), NY-ESO-1 peptide+CD28 antibody was carried out. T2 cells were load with the NY-ESO1 peptide for 30 min at 37C. In addition, T2 cells infected with a lentiviral vector (020122-BBjV1) expressing an exogenous HLA-A2 coding sequence along with an NY-ESO-1 coding sequence were included as controls. In addition, Gluc expressing L363 (NY-ESO1+/HLA-A2+) and U266 (NY-ESO1+/HLA-A2+) cells. L363 and U266 cells transduced with the 020122-BBjV1 vector were included. All target and effector cells were plated at an E:T ratio 1:1 in a white 384-well plate for 4h in XVIVO media without any supplements. Target cells were used at 10 thousand cells/well in 30μl of medium. Matador assay was performed after injection of 15μl of 1:100 CTZ assay buffer in PBS in a well-mode using an automated dispenser. Luminescence was read for 5 seconds. The results showed a marked increase in Gluc activity reflecting cell death in cultures of U266-Gluc cells with NK92, primary NK and primary T cells that had been infected with the NY-ESO1-SAR (061621-SCjJ7; SEQ ID NO: 9366) as compared to the uninfected control cells. The Gluc activity increased from 23356 in cultures of NK92 to 334646 in NK92 expressing NY-ESO1-SAR. The Gluc activity increased from 17788 in cultures of primary NK cells to 162764 in primary NK expressing NY-ESO1-SAR. The Gluc activity increased from 2183 in cultures of primary T cells to 491493 in primary T cells expressing NY-ESO1-SAR. Similarly, expression of NY-ESO1-SAR (061621-SCjJ7; SEQ ID NO: 9366) in NK92, primary NK and primary T cells showed increased cytotoxicity towards L363 cells and L363 cells stably transduced with the 020122-BBjV1 vector as compared to the uninfected control cells. Finally, expression of NY-ESO1-SAR (061621-SCjJ7; SEQ ID NO: 9366) in NK92 and primary NK cells showed increased cytotoxicity towards T2 cells that had been load with the NY-ESO1 peptide as compared to T2 cells that had been loaded with the peptide.

[1161] Control T2 cells or T2 cells that had been loaded with the NY-ESO1 peptide were plated at 50K cells/well in100μl culture medium in a 96 well U bottom plate. Control effector cells (NK92 and primary T cells) or effector cells that had been infected with the NY-ESO1-SAR encoding lentiviral vector (061621-SCjJ7; SEQ ID NO: 9366) were added at an E:T ratio of 1:1. After 24h, supernatant was collected for ELISA. The results showed increase in IFNγ and TNFα production in T2 cells that been loaded with the NY-ESO1 peptide when co-cultured with the NK92 cells and primary T cells expressing the NY-ESO1-SAR (061621-SCjJ7; SEQ ID NO: 9366) as compared to uninfected control cells (FIG. 13). This effect was specific to T2 cells that been loaded with the NY-ESO1 peptide and was not seen to the same magnitude in T2 cells that had not been loaded with the NY-ESO1 peptide.

[1162] NK92, primary NK and primary T cells are infected with a lentiviral construct expressing a uTCR-SAR CD8SP-MAGE-A3-112-120-Vb-TCRb-S57C-ECD-CD3zECDTMCP-opt-F-P2A-MAGE-A3-112-120-Va-TCRa-T48C-ECD-CD3zECDTMCP-opt2 (SEQ ID NO: 9450) targeting a MAGE-A3 peptide (112-120) in complex with HLA-A2. The experiment is repeated as above using T2 cells that had been loaded with the MAGE-A3 peptide (SEQ ID NO: 10879). Co-culture with uTCR-SAR expressing cells is shown to result in increase in cytotoxicity and cytokine (IFNγ and TNFα) production as compared with co-culture with untransduced cells. T2 cells that are not loaded with the peptide serve as negative control.

[1163] Essentially a similar approach as described above can be used to generate primary macrophage expressing uTCR-SAR targeting NY-ESO1, MAGE-A3 and other intracellular peptide antigens.

[1164] Essentially a similar approach as described above can be used to generate and test uTCR-SAR targeting other peptide antigens. The SEQ ID of several additional exemplary unispecific and bispecific uTCR-SAR constructs comprising the variable domains of TCR targeting NY-ESO1, MAGE-A3, MC7.G5 (an HLA-independent TCR) and Vd2/Vg9 (a yδ TCR) are presented in SEQ ID NO: 9355-9602. These constructs can be expressed in primary NK cells, primary T cells, NK cell lines, iPSC cells, hematopoietic cells and other effector cells (e.g., CIK, memory like NK, g-NK dendritic cells etc.) and tested for activity using techniques known in the art.

### Expression of CD19-TARGETED SARs on THP-1 Cells

[1165] THP-1 (Monocyte) cells obtained from ATCC were infected with lentiviral vectors encoding the indicated SAR constructs targeting CD19. The cells were selected in puromycin. The ability of CD19-Targeted SAR-expressing THP-1 cells to bind to CD19 extracellular domain was tested by Topanga assay using FLAG-CD19-ECD-GGSG-NLuc-AcV5 (SEQ ID NO: 3675) as described previously (Gopalakrishnan, R et al, Sci. Reports, 9:1957, 2019). The results show increased binding of the CD19 Topanga reagent to THP-1 cells expressing the SARs represented by SEQ ID NO: 2312, 2291, 5138, 2313 as compared to the parental THP-1 cells. These results demonstrate that these SARs can be functionally expressed on the surface of THP-1 cells of monocyte lineage and show increased binding to CD19 target antigen.

TABLE 59
TOPANGA ASSAY

| SEQ ID NO | CELL LINE | Average | STD DEV |
|---|---|---|---|
| | THP1-Parental | 119 | 7 |
| SEQ ID | CD8SP-hCD19-EUK-5-13-vL-IgCL-NKp46-Hinge- | 969 | 240 |
| NO: 2312 | TM-CP-opt2-F-F2A-SP-hCD19-EUK-5-13-vH-IgG1- | | |
| | CH1-NKp46-Hinge-TM-CP-opt1-F-P2A-PAC | | |
| SEQ ID | CD8SP-hCD19-EUK-5-13-vL-IgCL-Xho- | 1651 | 183 |
| NO: 2291 | CD3zECDTMCP-opt-F-P2A-Spe-SP-Bst-hCD19- | | |
| | EUK-5-13-vH-IgG1-CH1-Mlu-CD3zECDTMCP- | | |
| | opt2-F-F2A-PAC | | |
| SEQ ID | CD8SP-FMC63-vL-V5-[hTCRbECD-Bam- | 719 | 98 |
| NO: 5138 | CD3zECDTM-28z-opt]-F-P2A-SP-FMC63-vH-Myc- | | |
| | [hTCRaECD-Kpn-CD3zECDTM-28z-opt2]-F-F2A- | | |
| | PAC | | |
| SEQ ID | CD8SP-hCD19-EUK-5-13-vL-IgCL-Bam-DAP10- | 706 | 9 |
| NO: 2313 | opt1-Spe-CD3zCP-opt1-F-P2A-dSPE-IgSP-Bst- | | |
| | hCD19-EUK-5-13-vH-IgG1-CH1-Kpn-DAP10-opt2- | | |
| | Xba-CD3zCP-opt2-F-F2A-dXba-Nde-PAC | | |

### THP-1 Cells Expressing CD19-TARGETED SAR Demonstrate Increased Phagocytosis of CD19+ RAJI Cells

[1166] 7.5×10⁴ THP-1 cells expressing the indicated SAR constructs against CD19 and THP-1 parental cells were differentiated to monocyte/macrophage lineage using 1 ng/mL of PMA (phorbol 12-myristate 13-acetate) in RPMI with 10% FBS for 48 hours in triplicate in two sets. The cells became adherent and were washed twice. 7.5×110⁴ RAJI-Nluc and RAJI-CD19-KO-Nluc cells target cells were then added to the appropriate wells for 3-4 hours. Suspension cells were removed and the plate was washed twice. 500 μL of EDTA in PBS was added and incubated for 5 minutes at 37° C. The cells were scrapped off, put them into tubes and spun at 1000 rpm for 5 minutes at 4° C. The PBS was removed and 100 μL 1×Renilla Luciferase Assay Lysis Buffer (Promega) was added to the tubes and incubated on ice for 10 minutes. Samples were spun at 12,000 for 10 minutes at 4° C. 25μL of supernatant was collected in triplicate with 25μL of CTZ (Coelentrazine) assay buffer was added and luminescence was measured using a plate reader. As shown in the following Table 60, THP-1 cells expressing SARs with SEQ ID NO: 2291 and 5138 showed higher NLuc activity as compared to THP-1 parental cells upon co-culture with RAJI cells. These results demonstrate increased phagocytosis of CD19-expressing RAJI cells by the CD19-TARGETED-SAR expressing THP-1 cells. In contrast, THP-1 cells expressing SARs with SEQ ID NO: 2291 and 5138 showed no increase in NLuc activity as compared to THP-1 parental cells upon co-culture with RAJI-CD19-KO cells that lack CD19 expression.

TABLE 60

| | Average | | | STD DEV | | |
|---|---|---|---|---|---|---|
| | | | +RAJI- | | | +RAJI- |
| SEQ ID NO | Alone | +RAJI | CD19-KO | Alone | +RAJI | CD19-KO |
| THP1-Parental | 32 | 40943 | 5053 | 7 | 34225 | 791 |
| SEQ ID NO: | 173 | 93208 | 3106 | 153 | 32938 | 1559 |
| 2291 | | | | | | |
| SEQ ID NO: | 272 | 163293 | 3013 | 29 | 35872 | 1628 |
| 5138 | | | | | | |
| RAJI | 13509 | | | 232 | | |
| RAJI-CD19-KO | 412 | | | 15.3 | | |

### Expression of Multipurpose Switches.

[1167] NK92 cells were stably transduced with lentiviral vectors encoding a SAR and coexpressing accessory module comprising different membrane anchored cytokines or multipurpose switches. Exemplary constructs expressing a Synth-IL2-tBCMA-L24 multipurpose switch are represented by SEQ ID NO: 8509-8512. The NK92 cells were withdrawn from IL2 following infection. The co-expression of accessory modules represented by SEQ ID NO: 7133-7137, 7151-7157 and 8529-8534 resulted in survival of NK92 cells when grown in medium lacking IL2, while the control untransduced NK92 cells died. The NK92 cells expressing the different SAR constructs showed robust expression and activity of the SAR as measured by Matador assay. The NK92 cells expressing the multiple purpose switches representing IL2-tHer2 (SEQ ID NO: 8533) IL2-RQR8 (SEQ ID NO: 8529) and IL2-tBCMA (SEQ ID NO: 7151) were stained with Herceptin, Rituximab and J6M0 antibodies that bind to Her2, RQR8 and BCAM respectively and were found to show positive staining. In addition, NK92 cells expressing IL2-RQR8 (SEQ ID NO: 8529) also show staining with QBEND-10 antibody that binds to CD34. JNG cells expressing the above multipurpose switches also show cell surface expression of the multipurpose switch when detected using the above-described antibodies. These results show that SAR expressing cells can be detected, isolated and purified by staining with the antibodies that bind to the multipurpose switch followed by cell sorting (e.g., flow sorting or magnetic sorting). These results further show that SAR expressing cells can be eliminated by staining with the antibodies that bind to the multipurpose switch followed by negative selection using cell sorting (e.g., flow sorting or magnetic sorting). Furthermore, cells expressing the multipurpose switch are killed by treatment with an antibody that binds to the switch, such as Herceptin, rituximab, J6M0 or a BCMA-ADC.

[1168] It was also observed that constructs in which the accessory modules are expressed using a short internal promoter (e.g., EFS, EFS2, RSV etc.) show superior expression of the SAR and the accessory module. This was particularly seen in the case of SAR constructs that have two chains.

[1169] Use of autologous SAR-T cells targeting multiple antigens for adoptive cell therapy. Patients many different diseases, including infectious diseases (e.g., HIV1, EBV, CMV, HTLV1, etc.), degenerative diseases (e.g., Alzheimer's disease), autoimmune disease (e.g., pemphigous vulgaris), allergic diseases (e.g., chronic idiopathic urticarial) and multiple cancers are enrolled in an IRB approved phase I clinical trial of immunotherapy with adoptively transferred autologous SAR-T cells targeting different disease causing or disease associated antigens. The SAR for different diseases are selected based on the known expression of their target antigen in the disease causing or disease associated cells. Where possible, the expression of the SAR target on the disease causing or disease associated cells is confirmed by binding with ABD-GGS-NLuc fusion protein in which the antigen binding domain of SAR fused to non-secretory form of NLuc protein via a flexible linker. Alternatively, immunohistochemistry or flow cytometry using commercially available antibodies is used to confirm the expression of the SAR target on disease causing or disease associated cells. T cells are collected from the subject using leukapheresis, transduced with the appropriate SAR encoding lentivirus vector and expanded ex vivo using CD3/CD28 beads. After the resulting cell products have undergone quality control testing (including sterility and tumor specific cytotoxicity tests), they are cryopreserved. Meanwhile, study participants commence with lymphodepletive chemotherapy (30 mg/m²/day fludarabine plus 500 mg/m²/day cyclophosphamide x 3 days). One day after completion of their lymphodepleting regimen, the study participant receives transduced lymphocytes infused intravenously followed by high-dose (720,000 IU/kg) IL-2 (Aldesleukin; Prometheus, San Diego, CA) every 8 hours to tolerance. The previously stored SAR-T cell product is transported, thawed and infused at the patient's bedside. The dose of SAR-T product varies from 1×10⁴ SAR+ve CD3 cells/kg to 5×10⁹ SAR+ve CD3 cells/kg as per the study protocol. The SAR-T product may be administered in a single infusion or split infusions. Research participants can be pre-medicated at least 30 minutes prior to T cell infusion with 15 mg/kg of acetaminophen P.O. (max. 650 mg.) and diphenhydramine 0.5-1 mg/kg I.V. (max dose 50 mg). The study participant may optionally receive daily injections of human IL-2. Clinical and laboratory correlative follow-up studies can then be performed at the physician's discretion.

[1170] Use of allogeneic SAR-T cells for adoptive cells therapy. Patients with relapsed Acute Lymphocytic Leukemia or high-risk intermediate grade B-cell lymphomas who have undergone an allogeneic bone marrow transplant may receive immunotherapy with adoptively transferred allogeneic SAR-T cells. A leukapheresis product collected from the donor (same donor as used for the allogeneic transplant) undergoes selection of CD3 positive T lymphocytes using the CliniMACS Prodigy® System from Miltenyi Biotec and following the manufacturer's recommendations. The expression of TRAC and 02M is eliminated by CRISP9 mediated knock-out using techniques known in the art and T cells lacking cell surface expression of TCR/CD3 complex and HLA are selected. Cells are activate using a CD3 and CD28 magnetic bead-based artificial antigen presenting cells and transduced with clinical grade CD20-targeted SAR virus (e.g., CD8SP-CD20-VHH-USC1-CD16A-F158V-S197P-FL-v3 (SEQ ID NO: 5047]). Cells are expanded for 9-12 days in a closed system. After the resulting cell products have undergone quality control testing (including sterility and tumor specific cytotoxicity tests), they are cryopreserved. Meanwhile, study participants commence with lymphodepletive chemotherapy (30 mg/m²/day fludarabine plus 500 mg/m²/day cyclophosphamide x 3 days). One day after completion of their lymphodepleting regimen, the study participant receives transduced lymphocytes infused intravenously followed by high-dose (720,000 IU/kg) IL-2 (Aldesleukin; Prometheus, San Diego, CA) every 8 hours to tolerance. The SAR-T cell product is transported, thawed and infused at the patient's bedside. The dose of SAR-T product may vary from 1×10⁴ SAR+ve CD3 cells/kg to 5×10⁹ SAR+ve CD3 cells/kg as per the study protocol. The SAR product may be administered in a single infusion or split infusions. Research participants can be pre-medicated at least 30 minutes prior to SAR-T cell infusion with 15 mg/kg of acetaminophen P.O. (max. 650 mg.) and diphenhydramine 0.5-1 mg/kg I.V. (max dose 50 mg). Clinical and laboratory correlative follow-up studies can then be performed at the physician's discretion, and may include quantitative RT-PCR studies for the presence of CD20-expressing ALL/lymphoma cells and/or the adoptively transferred T cells; FDG-PET and/or CT scans; bone marrow examination for disease specific pathologic evaluation; lymph node biopsy; and/or long-term follow up per the guidelines set forth by the FDA's Biologic Response Modifiers Advisory Committee that apply to gene transfer studies. Use of immunosuppressive drugs is also at the discretion of the physician. Essentially a similar approach can be used to treat other diseases using allogeneic immune cells (e.g., T cells) expressing the SAR of the disclosure where the SAR targets an antigen or antigens expressed on the disease causing or disease-associated cells. Essentially a similar protocol is used to test other SAR constructs listed in Tables 36-38.

### Use of Autologous or Allogeneic NK Cells Expressing SAR

[1171] A leukapheresis product collected from the donor (same donor as used for the allogeneic transplant) undergoes selection of NK cells using the CliniMACS Prodigy® System from Miltenyi Biotec and following the manufacturer's recommendations. NK cells are activated using hIL2 for 3-5 days and then transduced with a lentivirus vector encoding a CD20-targeted SAR (e.g., CD8SP-CD20-VHH-USC1-CD16A-F158V-S197P-FL-v3 (SEQ ID NO: 5047]). The lentivirus also encodes for a membrane anchored form of IL2 (SEQ ID NO: 1330). NK cells are expanded ex vivo for 15 days in the presence of artificial antigen presenting K562 cells (aAPCs) expressing human CD20 with 50 units/mL of hIL-2. After the resulting cell products have undergone quality control testing (including sterility and tumor specific cytotoxicity tests), they are cryopreserved. Meanwhile, study participants commence with lymphodepletive chemotherapy (30 mg/m2/day fludarabine plus 500 mg/m2/day cyclophosphamide x 3 days). One day after completion of their lymphodepleting regimen, the study participant receives transduced NK cells infused intravenously followed by high-dose (720,000 IU/kg) IL-2 every 8 hours to tolerance. The SAR-NK cell product is transported, thawed and infused at the patient's bedside. The dose of SAR-NK product may vary from 1×10⁴ SAR+ve NK cells/kg to 5×10⁹ SAR+ve NK cells/kg as per the study protocol. The SAR-NK product may be administered in a single infusion or split infusions.

Generation of iPSC-Derived NK Cells Expressing SAR

[1172] The CD19-targeted SAR construct CD8SP-CD19-FHVH-354-CD16A-F158V-S197P-FL-v3 (SEQ ID NO: 5042) will be expressed in two different cord stem cell derived iPSC cell lines (606A1, NCRM-1) and a peripheral blood derived iPSC cell line (648A1). Single cell clones expressing SAR as determined by binding with Topanga reagent and FACS using anti-FLAG-FITC will be isolated, expanded and undergo QC analysis (e.g., Chromosomal Integrity, pluripotency, identity confirmation, mycoplasma and sterility). Several independent clones derived from each iPSC cell line will be frozen in liquid nitrogen to serve as master cell banks.

[1173] The derivation of NK cells from iPSCs and SAR transfected iPSCs will be performed using protocols known in the art. Briefly, 3,000 TrypLE-adapted iPSCs will be seeded in 96-well round-bottom plates with APEL culture containing 40 ng/ml human Stem Cell Factor (SCF), 20 ng/ml human Vascular Endothelial Growth Factor (VEGF), and 20 ng/ml recombinant human Bone Morphogenetic Protein 4 (BMP-4). After day 11 of hematopoietic differentiation, cells will be evaluated for hematopoietic progenitor cells by flow cytometry for CD34+/CD43+ and CD34+/CD45+.

[1174] Spin embryoid bodies (EBs) will be then directly transferred into each well of uncoated 24-well plates under a condition of NK cell culture. Cells will then further differentiated into NK cells using 5 ng/mL IL-3 (first week only), 10 ng/mL IL-15, 20 ng/mL IL-7, 20 ng/mL SCF, and 10 ng/mL flt3 ligand for 28-32 days. Half-media changes will be performed weekly. NK cells will be harvested for expansion using irradiated mbIL-21 expressing artificial antigen presenting K562 cells (aAPCs) expressing human CD19 in the presence of 50 units/mL of hIL-2. After in vitro potency testing using Matador assay, the cells will be used for in vivo studies using NALM6 xenograft model in NSG mice. After additional sterility and potency assays, the cells will be used for human clinical trial for treatment of patients with CD19 expressing B cell acute lymphocytic leukemia (B-ALL), chronic lymphocytic leukemia and diffuse large B cell lymphoma.

[1175] Essentially a similar procedure would be used for generation of iPSC derived T cells expressing SAR of the disclosure using protocols for differentiation of iPSC into T cells known in the art.

### Generation and Use of NK92 Cells Expressing SARs

[1176] cGMP grade NK92 cells will be transduced with a lentivirus vector encoding a CD20-targeted SAR (e.g., CD8SP-CD20-VHH-USC1-CD16A-F158V-S197P-FL-v3 (SEQ ID NO: 5047]). The lentivirus also encodes for a membrane anchored form of IL2 (SEQ ID NO: 1330). NK92 cells are expanded ex vivo for 15 days in the presence of artificial antigen presenting K562 cells (aAPCs) expressing human CD20 and 50 units/mL of hIL-2. The cells will be y-irradiated. After the resulting cell products have undergone quality control testing (including sterility and tumor specific in vitro and in vivo cytotoxicity tests), the cells will be cryopreserved. Meanwhile, study participants commence with lymphodepletive chemotherapy (30 mg/m2/day fludarabine plus 500 mg/m2/day cyclophosphamide×3 days). One day after completion of their lymphodepleting regimen, the study participant receives transduced NK92 cells infused intravenously. The dose of SAR-NK product may vary from 1×10⁴ SAR+ve NK92 cells/kg to 5×10⁹ SAR+ve NK92 cells/kg as per the study protocol. The SAR-NK92 product may be administered in a single infusion or split infusions.

[1177] Generation of hematopoietic stem cells engineered to express a SAR CD34 positive hematopoietic stem cells are purified from G-CSF mobilized leukapheresis product and transduced with a lentiviral vector encoding a CD19-targeted SAR represented by CD8SP-CD19-FHVH-354-CD16A-F158V-S197P-FL-v3 (SEQ ID NO: 5042). The expression of endogenous CD19 in the hematopoietic stem cells is optionally eliminated using techniques described in U.S. Ser. No. 10/660,919. The subject receives myeloablative chemotherapy followed by infusion of gene-modified stem cells. Essentially a similar approach is used to express a CD33-targeted SAR (e.g., SEQ ID NO: 4871) in combination with elimination of endogenous CD33 in hematopoietic stem cells. Essentially a similar approach is used to express an MPL-targeted SAR (e.g., SEQ ID NO: 4919) in combination with elimination of endogenous MPL in hematopoietic stem cells.

### Generation and Use of SAR Expressing Macrophage/Monocytes

[1178] A CD19-targeted SAR represented by CD8SP-CD19-FHVH-354-CD16A-F158V-S197P-FL-v3 (SEQ ID NO: 5042) is expressed in macrophage/monocytes and used for the treatment of CD19-expressing lymphoma using methods described in WO2019152781.

[1179] SAR-T/NK Cell Hepatic Arterial Infusion. In addition to intravenous infusion, SAR-T and SAR-NK cells can be infused intra-arterially to provide high concentration of SAR-expressing cells in a local area or organ involved with a disease.

[1180] Intraperitoneal administration of SAR-T/NK cells. SAR-T/NK cells can also be administered intraperitoneally, essentially as described in Koneru M et al (Journal of Translational Medicine; 2015; 13:102).

[1181] Use of SAR-T/NK cells for intratumoral injection. SAR-T/NK cells can also be administered intra-tumorally, essentially as described in Brown C E, et al, Clin Cancer Res. 2015 September 15; 21(18): 4062-4072.

### Combination of Different SAR-Expressing Cells

[1182] The patient may receive a combination of different SAR expressing cells that target one or more than one antigen. For example, a patient may receive CD19-targeted SAR-T and CD20-targeted SAR-NK and CD22-targeted SAR-macrophages. Alternatively, a subject may receive CD19-targeted SAR-T, CD19-targeted SAR-NK cells and CD19-targeted SAR-macrophages.

[1183] The combination of SARs may be used to fine tune the immune response so that signaling is triggered only upon a threshold effect is achieved. Thus, an NK cell expressing a SAR targeting BCMA with SEQ ID NO: 7601 and a SAR targeting CD19 with SEQ ID NO: 7607 may show an additive or a synergistic effect when exposed to cells expressing both BCMA and CD19. The additive/synergistic effects can be achieved by targeting of different antigens (e.g., BCMA and CD19). Another approach to achieve additive/synergistic effect is through targeting of the same antigen but via different SAR receptors that comprise different signaling chains. For example, NK cells expressing a CD19-SAR with SEQ ID NO: 7607 (CD8SP-CD19-hu-mROO5-1-scFv-NKp30-ECDTMCP-opt2-F-F2A-PAC) can also co-express another CD19-SAR with SEQ ID NO: 7676 (CD8SP-CD19-hu-mROO5-1-CD16A-v158-S197P-FL-v3-F-F2A-PAC). In an alternate embodiment, the two SAR may target different epitopes of the same antigen. For example, NK cells expressing a CD19-SAR with SEQ ID NO: 7607 (CD8SP-CD19-hu-mROO5-1-scFv-NKp30-ECDTMCP-opt2-F-F2A-PAC) can also co-express another CD19-SAR with SEQ ID NO: 7660 (FMC64-CD16A-v158-S197P-FL-v3-F-F2A-PAC) or a CD19-SAR with SEQ ID NO: 7668 (hCD19-Bul2-CD16A-v158-S197P-FL-v3-F-F2A-PAC).

[1184] In another embodiment, a SAR comprising CD16 signaling chains can be combined with a SAR comprising NKp30, NKp44, NKp44, NKG2D, Dap10 and/or CD3z signaling chains to have additive/synergistic effects. In another embodiment, a SAR comprising NKp30 signaling chains can be combined with a SAR comprising CD16, NKp44, NKp46, NKG2D, Dap10 and/or CD3z signaling chains to have additive/synergistic effects. Similarly, a SAR comprising NKp44 signaling chains can be combined with a SAR comprising CD16, NKp30, NKp46, NKG2D, Dap10 and/or CD3z signaling chains to have additive/synergistic effects. Similarly, a SAR comprising NKp46 signaling chains can be combined with a SAR comprising CD16, NKp30, NKp44, NKG2D, Dap10 and/or CD3z signaling chains to have additive/synergistic effects. Similarly, a SAR comprising DAP10 signaling chains can be combined with a SAR comprising CD16, NKp30, NKp44, NKp46, NKG2D, and/or CD3z signaling chains to have additive/synergistic effects. Similarly, a SAR comprising CD3z signaling chains can be combined with a SAR comprising CD16, NKp30, NKp44, NKp46, NKG2D, and/or DAP10 signaling chains to have additive/synergistic effects. Similarly, a SAR comprising NKG2D signaling chains can be combined with a SAR comprising CD16, NKp30, NKp44, NKp46, CD3z, and/or DAP10 signaling chains to have additive/synergistic effects.

The application's sequence listing, which the Patent Office published only in electronic form, follows.

SEQUENCE LISTING (12311 sequences)

SEQ ID NO: 1 - DNA, 7484 bp, Artificial Sequence
  Synthetic Polynucleotide
aatgtagtcttatgcaatactcttgtagtcttgcaacatggtaacgatgagttagcaacatgccttacaaggagagaaaaagcaccgtgcatgccgattggtggaagtaaggtggtacgatcgtgccttattaggaaggcaacagacgggtctgacatggattggacgaaccactgaattgccgcattgcagagatattgtatttaagtgcctagctcgatacataaacgggtctctctggttagaccagatctgagcctgggagctctctggctaactagggaacccactgcttaagcctcaataaagcttgccttgagtgcttcaagtagtgtgtgcccgtctgttgtgtgactctggtaactagagatccctcagacccttttagtcagtgtggaaaatctctagcagtggcgcccgaacagggacttgaaagcgaaagggaaaccagaggagctctctcgacgcaggactcggcttgctgaagcgcgcacggcaagaggcgaggggcggcgactggtgagtacgccaaaaattttgactagcggaggctagaaggagagagatgggtgcgagagcgtcagtattaagcgggggagaattagatcgcgatgggaaaaaattcggttaaggccagggggaaagaaaaaatataaattaaaacatatagtatgggcaagcagggagctagaacgattcgcagttaatcctggcctgttagaaacatcagaaggctgtagacaaatactgggacagctacaaccatcccttcagacaggatcagaagaacttagatcattatataatacagtagcaaccctctattgtgtgcatcaaaggatagagataaaagacaccaaggaagctttagacaagatagaggaagagcaaaacaaaagtaagaccaccgcacagcaagcggccgctgatcttcagacctggaggaggagatatgagggacaattggagaagtgaattatataaatataaagtagtaaaaattgaaccattaggagtagcacccaccaaggcaaagagaagagtggtgcagagagaaaaaagagcagtgggaataggagctttgttccttgggttcttgggagcagcaggaagcactatgggcgcagcgtcaatgacgctgacggtacaggccagacaattattgtctggtatagtgcagcagcagaacaatttgctgagggctattgaggcgcaacagcatctgttgcaactcacagtctggggcatcaagcagctccaggcaagaatcctggctgtggaaagatacctaaaggatcaacagctcctggggatttggggttgctctggaaaactcatttgcaccactgctgtgccttggaatgctagttggagtaataaatctctggaacagatttggaatcacacgacctggatggagtgggacagagaaattaacaattacacaagcttaatacactccttaattgaagaatcgcaaaaccagcaagaaaagaatgaacaagaattattggaattagataaatgggcaagtttgtggaattggtttaacataacaaattggctgtggtatataaaattattcataatgatagtaggaggcttggtaggtttaagaatagtttttgctgtactttctatagtgaatagagttaggcagggatattcaccattatcgtttcagacccacctcccaaccccgaggggacccgacaggcccgaaggaatagaagaagaaggtggagagagagacagagacagatccattcgattagtgaacggatctcgacggtatcggttaacttttaaaagaaaaggggggattggggggtacagtgcaggggaaagaatagtagacataatagcaacagacatacaaactaaagaattacaaaaacaaattacaaaattcaaaattttatcgataagctttgcaaagatggataaagttttaaacagagaggaatctttgcagctaatggaccttctaggtcttgaaaggagtgcctcgtgaggctccggtgcccgtcagtgggcagagcgcacatcgcccacagtccccgagaagttggggggaggggtcggcaattgaaccggtgcctagagaaggtggcgcggggtaaactgggaaagtgatgtcgtgtactggctccgcctttttcccgagggtgggggagaaccgtatataagtgcagtagtcgccgtgaacgttctttttcgcaacgggtttgccgccagaacacaggtaagtgccgtgtgtggttcccgcgggcctggcctctttacgggttatggcccttgcgtgccttgaattacttccacctggctgcagtacgtgattcttgatcccgagcttcgggttggaagtgggtgggagagttcgaggccttgcgcttaaggagccccttcgcctcgtgcttgagttgaggcctggcctgggcgctggggccgccgcgtgcgaatctggtggcaccttcgcgcctgtctcgctgctttcgataagtctctagccatttaaaatttttgatgacctgctgcgacgctttttttctggcaagatagtcttgtaaatgcgggccaagatctgcacactggtatttcggtttttggggccgcgggcggcgacggggcccgtgcgtcccagcgcacatgttcggcgaggcggggcctgcgagcgcggccaccgagaatcggacgggggtagtctcaagctggccggcctgctctggtgcctggcctcgcgccgccgtgtatcgccccgccctgggcggcaaggctggcccggtcggcaccagttgcgtgagcggaaagatggccgcttcccggccctgctgcagggagctcaaaatggaggacgcggcgctcgggagagcgggcgggtgagtcacccacacaaaggaaaagggcctttccgtcctcagccgtcgcttcatgtgactccacggagtaccgggcgccgtccaggcacctcgattagttctcgaccttttggagtacgtcgtctttaggttggggggaggggttttatgcgatggagtttccccacactgagtgggtggagactgaagttaggccagcttggcacttgatgtaattctccttggaatttgccctttttgagtttggatcttggttcattctcaagcctcagacagtggttcaaagtttttttcttccatttcaggtgtcgtgaggaattagcttggtactaatacgactcactatagggagacccaagctggctaggtaagcttgatatcgaattcctgcagcccgggggatctgctagcgtcgactccggatgatcagggccctgtacagatatcgacaatcaacctctggattacaaaatttgtgaaagattgactggtattcttaactatgttgctccttttacgctatgtggatacgctgctttaatgcctttgtatcatgctattgcttcccgtatggctttcattttctcctccttgtataaatcctggttgctgtctctttatgaggagttgtggcccgttgtcaggcaacgtggcgtggtgtgcactgtgtttgctgacgcaacccccactggttggggcattgccaccacctgtcagctcctttccgggactttcgctttccccctccctattgccacggcggaactcatcgccgcctgccttgcccgctgctggacaggggctcggctgttgggcactgacaattccgtggtgttgtcggggaagctgacgtcctttccatggctgctcgcctgtgttgccacctggattctgcgcgggacgtccttctgctacgtcccttcggccctcaatccagcggaccttccttcccgcggcctgctgccggctctgcggcctcttccgcgtcttcgccttcgccctcagacgagtcggatctccctttgggccgcctccccgcctggaattcgagctcggtacctttaagaccaatgacttacaaggcagctgtagatcttagccactttttaaaagaaaaggggggactggaagggctaattcactcccaacgaagacaagatctgctttttgcttgtactgggtctctctggttagaccagatctgagcctgggagctctctggctaactagggaacccactgcttaagcctcaataaagcttgccttgagtgcttcaagtagtgtgtgcccgtctgttgtgtgactctggtaactagagatccctcagacccttttagtcagtgtggaaaatctctagcagtagtagttcatgtcatcttattattcagtatttataacttgcaaagaaatgaatatcagagagtgagaggaacttgtttattgcagcttataatggttacaaataaagcaatagcatcacaaatttcacaaataaagcatttttttcactgcattctagttgtggtttgtccaaactcatcaatgtatcttatcatgtctggctctagctatcccgcccctaactccgcccatcccgcccctaactccgcccagttccgcccattctccgccccatggctgactaattttttttatttatgcagaggccgaggccgcctcggcctctgagctattccagaagtagtgaggaggcttttttggaggcctagggacgtacccaattcgccctatagtgagtcgtattacgcgcgctcactggccgtcgttttacaacgtcgtgactgggaaaaccctggcgttacccaacttaatcgccttgcagcacatccccctttcgccagctggcgtaatagcgaagaggcccgcaccgatcgcccttcccaacagttgcgcagcctgaatggcgaatgggacgcgccctgtagcggcgcattaagcgcggcgggtgtggtggttacgcgcagcgtgaccgctacacttgccagcgccctagcgcccgctcctttcgctttcttcccttcctttctcgccacgttcgccggctttccccgtcaagctctaaatcgggggctccctttagggttccgatttagtgctttacggcacctcgaccccaaaaaacttgattagggtgatggttcacgtagtgggccatcgccctgatagacggtttttcgccctttgacgttggagtccacgttctttaatagtggactcttgttccaaactggaacaacactcaaccctatctcggtctattcttttgatttataagggattttgccgatttcggcctattggttaaaaaatgagctgatttaacaaaaatttaacgcgaattttaacaaaatattaacgcttacaatttaggtggcacttttcggggaaatgtgcgcggaacccctatttgtttatttttctaaatacattcaaatatgtatccgctcatgagacaataaccctgataaatgcttcaataatattgaaaaaggaagagtatgagtattcaacatttccgtgtcgcccttattcccttttttgcggcattttgccttcctgtttttgctcacccagaaacgctggtgaaagtaaaagatgctgaagatcagttgggtgcacgagtgggttacatcgaactggatctcaacagcggtaagatccttgagagttttcgccccgaagaacgttttccaatgatgagcacttttaaagttctgctatgtggcgcggtattatcccgtattgacgccgggcaagagcaactcggtcgccgcatacactattctcagaatgacttggttgagtactcaccagtcacagaaaagcatcttacggatggcatgacagtaagagaattatgcagtgctgccataaccatgagtgataacactgcggccaacttacttctgacaacgatcggaggaccgaaggagctaaccgcttttttgcacaacatgggggatcatgtaactcgccttgatcgttgggaaccggagctgaatgaagccataccaaacgacgagcgtgacaccacgatgcctgtagcaatggcaacaacgttgcgcaaactattaactggcgaactacttactctagcttcccggcaacaattaatagactggatggaggcggataaagttgcaggaccacttctgcgctcggcccttccggctggctggtttattgctgataaatctggagccggtgagcgtgggtctcgcggtatcattgcagcactggggccagatggtaagccctcccgtatcgtagttatctacacgacggggagtcaggcaactatggatgaacgaaatagacagatcgctgagataggtgcctcactgattaagcattggtaactgtcagaccaagtttactcatatatactttagattgatttaaaacttcatttttaatttaaaaggatctaggtgaagatcctttttgataatctcatgaccaaaatcccttaacgtgagttttcgttccactgagcgtcagaccccgtagaaaagatcaaaggatcttcttgagatcctttttttctgcgcgtaatctgctgcttgcaaacaaaaaaaccaccgctaccagcggtggtttgtttgccggatcaagagctaccaactctttttccgaaggtaactggcttcagcagagcgcagataccaaatactgttcttctagtgtagccgtagttaggccaccacttcaagaactctgtagcaccgcctacatacctcgctctgctaatcctgttaccagtggctgctgccagtggcgataagtcgtgtcttaccgggttggactcaagacgatagttaccggataaggcgcagcggtcgggctgaacggggggttcgtgcacacagcccagcttggagcgaacgacctacaccgaactgagatacctacagcgtgagctatgagaaagcgccacgcttcccgaagggagaaaggcggacaggtatccggtaagcggcagggtcggaacaggagagcgcacgagggagcttccagggggaaacgcctggtatctttatagtcctgtcgggtttcgccacctctgacttgagcgtcgatttttgtgatgctcgtcaggggggcggagcctatggaaaaacgccagcaacgcggcctttttacggttcctggccttttgctggccttttgctcacatgttctttcctgcgttatcccctgattctgtggataaccgtattaccgcctttgagtgagctgataccgctcgccgcagccgaacgaccgagcgcagcgagtcagtgagcgaggaagcggaagagcgcccaatacgcaaaccgcctctccccgcgcgttggccgattcattaatgcagctggcacgacaggtttcccgactggaaagcgggcagtgagcgcaacgcaattaatgtgagttagctcactcattaggcaccccaggctttacactttatgcttccggctcgtatgttgtgtggaattgtgagcggataacaatttcacacaggaaacagctatgaccatgattacgccaagcgcgcaattaaccctcactaaagggaacaaaagctggagctgcaagctt

SEQ ID NO: 2 - DNA, 6883 bp, Artificial Sequence
  Synthetic Polynucleotide
aatgtagtcttatgcaatactcttgtagtcttgcaacatggtaacgatgagttagcaacatgccttacaaggagagaaaaagcaccgtgcatgccgattggtggaagtaaggtggtacgatcgtgccttattaggaaggcaacagacgggtctgacatggattggacgaaccactgaattgccgcattgcagagatattgtatttaagtgcctagctcgatacataaacgggtctctctggttagaccagatctgagcctgggagctctctggctaactagggaacccactgcttaagcctcaataaagcttgccttgagtgcttcaagtagtgtgtgcccgtctgttgtgtgactctggtaactagagatccctcagacccttttagtcagtgtggaaaatctctagcagtggcgcccgaacagggacttgaaagcgaaagggaaaccagaggagctctctcgacgcaggactcggcttgctgaagcgcgcacggcaagaggcgaggggcggcgactggtgagtacgccaaaaattttgactagcggaggctagaaggagagagatgggtgcgagagcgtcagtattaagcgggggagaattagatcgcgatgggaaaaaattcggttaaggccagggggaaagaaaaaatataaattaaaacatatagtatgggcaagcagggagctagaacgattcgcagttaatcctggcctgttagaaacatcagaaggctgtagacaaatactgggacagctacaaccatcccttcagacaggatcagaagaacttagatcattatataatacagtagcaaccctctattgtgtgcatcaaaggatagagataaaagacaccaaggaagctttagacaagatagaggaagagcaaaacaaaagtaagaccaccgcacagcaagcggccgctgatcttcagacctggaggaggagatatgagggacaattggagaagtgaattatataaatataaagtagtaaaaattgaaccattaggagtagcacccaccaaggcaaagagaagagtggtgcagagagaaaaaagagcagtgggaataggagctttgttccttgggttcttgggagcagcaggaagcactatgggcgcagcgtcaatgacgctgacggtacaggccagacaattattgtctggtatagtgcagcagcagaacaatttgctgagggctattgaggcgcaacagcatctgttgcaactcacagtctggggcatcaagcagctccaggcaagaatcctggctgtggaaagatacctaaaggatcaacagctcctggggatttggggttgctctggaaaactcatttgcaccactgctgtgccttggaatgctagttggagtaataaatctctggaacagatttggaatcacacgacctggatggagtgggacagagaaattaacaattacacaagcttaatacactccttaattgaagaatcgcaaaaccagcaagaaaagaatgaacaagaattattggaattagataaatgggcaagtttgtggaattggtttaacataacaaattggctgtggtatataaaattattcataatgatagtaggaggcttggtaggtttaagaatagtttttgctgtactttctatagtgaatagagttaggcagggatattcaccattatcgtttcagacccacctcccaaccccgaggggacccgacaggcccgaaggaatagaagaagaaggtggagagagagacagagacagatccattcgattagtgaacggatctcgacggtatcggttaacttttaaaagaaaaggggggattggggggtacagtgcaggggaaagaatagtagacataatagcaacagacatacaaactaaagaattacaaaaacaaattacaaaattcaaaattttatcgataagctttgcaaagatggataaagttttaaacagagaggaatctttgcagctaatggaccttctaggtcttgaaaggagtgcctcgtgaggctccggtgcccgtcagtgggcagagcgcacatcgcccacagtccccgagaagttggggggaggggtcggcaattgaaccggtgcctagagaaggtggcgcggggtaaactgggaaagtgatgtcgtgtactggctccgcctttttcccgagggtgggggagaaccgtatataagtgcagtagtcgccgtgaacgttctttttcgcaacgggtttgccgccagaacacaggtaagtgccgtgtgtggttcccgcgggcctggcctctttacgggttatggcccttgcgtgccttgaattacttccacctggctgcagtacgtgattcttgatcccgagcttcgggttggaagtgggtgggagagttcgaggccttgcgcttaaggagccccttcgcctcgtgcttgagttgaggcctggcctgggcgctggggccgccgcgtgcgaatctggtggcaccttcgcgcctgtctcgctgctttcgataagtctctagccatttaaaatttttgatgacctgctgcgacgctttttttctggcaagatagtcttgtaaatgcgggccaagatctgcacactggtatttcggtttttggggccgcgggcggcgacggggcccgtgcgtcccagcgcacatgttcggcgaggcggggcctgcgagcgcggccaccgagaatcggacgggggtagtctcaagctggccggcctgctctggtgcctggcctcgcgccgccgtgtatcgccccgccctgggcggcaaggctggcccggtcggcaccagttgcgtgagcggaaagatggccgcttcccggccctgctgcagggagctcaaaatggaggacgcggcgctcgggagagcgggcgggtgagtcacccacacaaaggaaaagggcctttccgtcctcagccgtcgcttcatgtgactccacggagtaccgggcgccgtccaggcacctcgattagttctcgaccttttggagtacgtcgtctttaggttggggggaggggttttatgcgatggagtttccccacactgagtgggtggagactgaagttaggccagcttggcacttgatgtaattctccttggaatttgccctttttgagtttggatcttggttcattctcaagcctcagacagtggttcaaagtttttttcttccatttcaggtgtcgtgaggaattagcttggtactaatacgactcactatagggagacccaagctggctaggtaagcttgatatcgaattcctgcagcccgggggatctgctagcgtcgacggcgaatccggactatagtgtcacctaaatgctagacgtacctttaagaccaatgacttacaaggcagctgtagatcttagccactttttaaaagaaaaggggggactggaagggctaattcactcccaacgaagacaagatctgctttttgcttgtactgggtctctctggttagaccagatctgagcctgggagctctctggctaactagggaacccactgcttaagcctcaataaagcttgccttgagtgcttcaagtagtgtgtgcccgtctgttgtgtgactctggtaactagagatccctcagacccttttagtcagtgtggaaaatctctagcagtagtagttcatgtcatcttattattcagtatttataacttgcaaagaaatgaatatcagagagtgagaggaacttgtttattgcagcttataatggttacaaataaagcaatagcatcacaaatttcacaaataaagcatttttttcactgcattctagttgtggtttgtccaaactcatcaatgtatcttatcatgtctggctctagctatcccgcccctaactccgcccatcccgcccctaactccgcccagttccgcccattctccgccccatggctgactaattttttttatttatgcagaggccgaggccgcctcggcctctgagctattccagaagtagtgaggaggcttttttggaggcctagggacgtacccaattcgccctatagtgagtcgtattacgcgcgctcactggccgtcgttttacaacgtcgtgactgggaaaaccctggcgttacccaacttaatcgccttgcagcacatccccctttcgccagctggcgtaatagcgaagaggcccgcaccgatcgcccttcccaacagttgcgcagcctgaatggcgaatgggacgcgccctgtagcggcgcattaagcgcggcgggtgtggtggttacgcgcagcgtgaccgctacacttgccagcgccctagcgcccgctcctttcgctttcttcccttcctttctcgccacgttcgccggctttccccgtcaagctctaaatcgggggctccctttagggttccgatttagtgctttacggcacctcgaccccaaaaaacttgattagggtgatggttcacgtagtgggccatcgccctgatagacggtttttcgccctttgacgttggagtccacgttctttaatagtggactcttgttccaaactggaacaacactcaaccctatctcggtctattcttttgatttataagggattttgccgatttcggcctattggttaaaaaatgagctgatttaacaaaaatttaacgcgaattttaacaaaatattaacgcttacaatttaggtggcacttttcggggaaatgtgcgcggaacccctatttgtttatttttctaaatacattcaaatatgtatccgctcatgagacaataaccctgataaatgcttcaataatattgaaaaaggaagagtatgagtattcaacatttccgtgtcgcccttattcccttttttgcggcattttgccttcctgtttttgctcacccagaaacgctggtgaaagtaaaagatgctgaagatcagttgggtgcacgagtgggttacatcgaactggatctcaacagcggtaagatccttgagagttttcgccccgaagaacgttttccaatgatgagcacttttaaagttctgctatgtggcgcggtattatcccgtattgacgccgggcaagagcaactcggtcgccgcatacactattctcagaatgacttggttgagtactcaccagtcacagaaaagcatcttacggatggcatgacagtaagagaattatgcagtgctgccataaccatgagtgataacactgcggccaacttacttctgacaacgatcggaggaccgaaggagctaaccgcttttttgcacaacatgggggatcatgtaactcgccttgatcgttgggaaccggagctgaatgaagccataccaaacgacgagcgtgacaccacgatgcctgtagcaatggcaacaacgttgcgcaaactattaactggcgaactacttactctagcttcccggcaacaattaatagactggatggaggcggataaagttgcaggaccacttctgcgctcggcccttccggctggctggtttattgctgataaatctggagccggtgagcgtgggtctcgcggtatcattgcagcactggggccagatggtaagccctcccgtatcgtagttatctacacgacggggagtcaggcaactatggatgaacgaaatagacagatcgctgagataggtgcctcactgattaagcattggtaactgtcagaccaagtttactcatatatactttagattgatttaaaacttcatttttaatttaaaaggatctaggtgaagatcctttttgataatctcatgaccaaaatcccttaacgtgagttttcgttccactgagcgtcagaccccgtagaaaagatcaaaggatcttcttgagatcctttttttctgcgcgtaatctgctgcttgcaaacaaaaaaaccaccgctaccagcggtggtttgtttgccggatcaagagctaccaactctttttccgaaggtaactggcttcagcagagcgcagataccaaatactgttcttctagtgtagccgtagttaggccaccacttcaagaactctgtagcaccgcctacatacctcgctctgctaatcctgttaccagtggctgctgccagtggcgataagtcgtgtcttaccgggttggactcaagacgatagttaccggataaggcgcagcggtcgggctgaacggggggttcgtgcacacagcccagcttggagcgaacgacctacaccgaactgagatacctacagcgtgagctatgagaaagcgccacgcttcccgaagggagaaaggcggacaggtatccggtaagcggcagggtcggaacaggagagcgcacgagggagcttccagggggaaacgcctggtatctttatagtcctgtcgggtttcgccacctctgacttgagcgtcgatttttgtgatgctcgtcaggggggcggagcctatggaaaaacgccagcaacgcggcctttttacggttcctggccttttgctggccttttgctcacatgttctttcctgcgttatcccctgattctgtggataaccgtattaccgcctttgagtgagctgataccgctcgccgcagccgaacgaccgagcgcagcgagtcagtgagcgaggaagcggaagagcgcccaatacgcaaaccgcctctccccgcgcgttggccgattcattaatgcagctggcacgacaggtttcccgactggaaagcgggcagtgagcgcaacgcaattaatgtgagttagctcactcattaggcaccccaggctttacactttatgcttccggctcgtatgttgtgtggaattgtgagcggataacaatttcacacaggaaacagctatgaccatgattacgccaagcgcgcaattaaccctcactaaagggaacaaaagctggagctgcaagctt

SEQ ID NO: 3 - DNA, 5150 bp, Artificial Sequence
  Synthetic Polynucleotide
tgaaagaccccacctgtaggtttggcaagctagcttaagtaacgccattttgcaaggcatggaaaatacataactgagaatagagaagttcagatcaaggttaggaacagagagacagcagaatatgggccaaacaggatatctgtggtaagcagttcctgccccggctcagggccaagaacagatggtccccagatgcggtcccgccctcagcagtttctagagaaccatcagatgtttccagggtgccccaaggacctgaaatgaccctgtgccttatttgaactaaccaatcagttcgcttctcgcttctgttcgcgcgcttctgctccccgagctcaataaaagagcccacaacccctcactcggcgcgccagtcctccgatagactgcgtcgcccgggtacccgtattcccaataaagcctcttgctgtttgcatccgaatcgtggactcgctgatccttgggagggtctcctcagattgattgactgcccacctcgggggtctttcatttggaggttccaccgagatttggagacccctgcccagggaccaccgacccccccgccgggaggtaagctggccagcggtcgtttcgtgtctgtctctgtctttgtgcgtgtttgtgccggcatctaatgtttgcgcctgcgtctgtactagttagctaactagctctgtatctggcggacccgtggtggaactgacgagttctgaacacccggccgcaaccctgggagacgtcccagggactttgggggccgtttttgtggcccgacctgaggaagggagtcgatgtggaatccgaccccgtcaggatatgtggttctggtaggagacgagaacctaaaacagttcccgcctccgtctgaatttttgctttcggtttggaaccgaagccgcgcgtcttgtctgctgcagcgctgcagcatcgttctgtgttgtctctgtctgactgtgtttctgtatttgtctgaaaattagggccagactgttaccactcccttaagtttgaccttaggtcactggaaagatgtcgagcggatcgctcacaaccagtcggtagatgtcaagaagagacgttgggttaccttctgctctgcagaatggccaacctttaacgtcggatggccgcgagacggcacctttaaccgagacctcatcacccaggttaagatcaaggtcttttcacctggcccgcatggacacccagaccaggtcccctacatcgtgacctgggaagccttggcttttgacccccctccctgggtcaagccctttgtacaccctaagcctccgcctcctcttcctccatccgccccgtctctcccccttgaacctcctcgttcgaccccgcctcgatcctccctttatccagccctcactccttctctaggcgccggaattagatctcctaggatccaagaattcggctcgagttcgaagggacgcgtaatgtcgacatcgataaaataaaagattttatttagtctccagaaaaaggggggaatgaaagaccccacctgtaggtttggcaagctagcttaagtaacgccattttgcaaggcatggaaaatacataactgagaatagagaagttcagatcaaggttaggaacagagagacagcagaatatgggccaaacaggatatctgtggtaagcagttcctgccccggctcagggccaagaacagatggtccccagatgcggtcccgccctcagcagtttctagagaaccatcagatgtttccagggtgccccaaggacctgaaatgaccctgtgccttatttgaactaaccaatcagttcgcttctcgcttctgttcgcgcgcttctgctccccgagctcaataaaagagcccacaacccctcactcggcgcgccagtcctccgatagactgcgtcgcccgggtacccgtgtatccaataaaccctcttgcagttgcatccgacttgtggtctcgctgttccttgggagggtctcctctgagtgattgactacccgtcagcgggggtctttcatgggtaacagtttcttgaagttggagaacaacattctgagggtaggagtcgaatattaagtaatcctgactcaattagccactgttttgaatccacatactccaatactcctgaaatagttcattatggacagcgcagaagagctggggagaattaattcgtaatcatggtcatagctgtttcctgtgtgaaattgttatccgctcacaattccacacaacatacgagccggaagcataaagtgtaaagcctggggtgcctaatgagtgagctaactcacattaattgcgttgcgctcactgcccgctttccagtcgggaaacctgtcgtgccagctgcattaatgaatcggccaacgcgcggggagaggcggtttgcgtattgggcgctcttccgcttcctcgctcactgactcgctgcgctcggtcgttcggctgcggcgagcggtatcagctcactcaaaggcggtaatacggttatccacagaatcaggggataacgcaggaaagaacatgtgagcaaaaggccagcaaaaggccaggaaccgtaaaaaggccgcgttgctggcgtttttccataggctccgcccccctgacgagcatcacaaaaatcgacgctcaagtcagaggtggcgaaacccgacaggactataaagataccaggcgtttccccctggaagctccctcgtgcgctctcctgttccgaccctgccgcttaccggatacctgtccgcctttctcccttcgggaagcgtggcgctttctcatagctcacgctgtaggtatctcagttcggtgtaggtcgttcgctccaagctgggctgtgtgcacgaaccccccgttcagcccgaccgctgcgccttatccggtaactatcgtcttgagtccaacccggtaagacacgacttatcgccactggcagcagccactggtaacaggattagcagagcgaggtatgtaggcggtgctacagagttcttgaagtggtggcctaactacggctacactagaaggacagtatttggtatctgcgctctgctgaagccagttaccttcggaaaaagagttggtagctcttgatccggcaaacaaaccaccgctggtagcggtggtttttttgtttgcaagcagcagattacgcgcagaaaaaaaggatctcaagaagatcctttgatcttttctacggggtctgacgctcagtggaacgaaaactcacgttaagggattttggtcatgagattatcaaaaaggatcttcacctagatccttttaaattaaaaatgaagttttaaatcaatctaaagtatatatgagtaaacttggtctgacagttaccaatgcttaatcagtgaggcacctatctcagcgatctgtctatttcgttcatccatagttgcctgactccccgtcgtgtagataactacgatacgggagggcttaccatctggccccagtgctgcaatgataccgcgagacccacgctcaccggctccagatttatcagcaataaaccagccagccggaagggccgagcgcagaagtggtcctgcaactttatccgcctccatccagtctattaattgttgccgggaagctagagtaagtagttcgccagttaatagtttgcgcaacgttgttgccattgctacaggcatcgtggtgtcacgctcgtcgtttggtatggcttcattcagctccggttcccaacgatcaaggcgagttacatgatcccccatgttgtgcaaaaaagcggttagctccttcggtcctccgatcgttgtcagaagtaagttggccgcagtgttatcactcatggttatggcagcactgcataattctcttactgtcatgccatccgtaagatgcttttctgtgactggtgagtactcaaccaagtcattctgagaatagtgtatgcggcgaccgagttgctcttgcccggcgtcaatacgggataataccgcgccacatagcagaactttaaaagtgctcatcattggaaaacgttcttcggggcgaaaactctcaaggatcttaccgctgttgagatccagttcgatgtaacccactcgtgcacccaactgatcttcagcatcttttactttcaccagcgtttctgggtgagcaaaaacaggaaggcaaaatgccgcaaaaaagggaataagggcgacacggaaatgttgaatactcatactcttcctttttcaatattattgaagcatttatcagggttattgtctcatgagcggatacatatttgaatgtatttagaaaaataaacaaataggggttccgcgcacatttccccgaaaagtgccacctgacgtctaagaaaccattattatcatgacattaacctataaaaataggcgtatcacgaggccctttcgtctcgcgcgtttcggtgatgacggtgaaaacctctgacacatgcagctcccggagacggtcacagcttgtctgtaagcggatgccgggagcagacaagcccgtcagggcgcgtcagcgggtgttggcgggtgtcggggctggcttaactatgcggcatcagagcagattgtactgagagtgcaccatatgcggtgtgaaataccgcacagatgcgtaaggagaaaataccgcatcaggcgccattcgccattcaggctgcgcaactgttgggaagggcgatcggtgcgggcctcttcgctattacgccagctggcgaaagggggatgtgctgcaaggcgattaagttgggtaacgccagggttttcccagtcacgacgttgtaaaacgacggcgcaaggaatggtgcatgcaaggagatggcgcccaacagtcccccggccacggggcctgccaccatacccacgccgaaacaagcgctcatgagcccgaagtggcgagcccgatcttccccatcggtgatgtcggcgatataggcgccagcaaccgcacctgtggcgccggtgatgccggccacgatgcgtccggcgtagaggcgattagtccaatttgttaaagacaggatatcagtggtccaggctctagttttgactcaacaatatcaccagctgaagcctatagagtacgagccatagataaaataaaagattttatttagtctccagaaaaaggggggaa

SEQ ID NO: 4 - DNA, 7172 bp, Artificial Sequence
  Synthetic Polynucleotide
cccgactggaaagcgggcagtgagcgcaacgcaattaatgtgagttagctcactcattaggcaccccaggctttacactttatgcttccggctcgtatgttgtgtggaattgtgagcggataacaatttcacacaggaaacagctatgaccatgattacgccaagcgcgcaattaaccctcactaaagggaacaaaagctggagctgcaagcttggccattgcatacgttgtatccatatcataatatgtacatttatattggctcatgtccaacattaccgccatgttgacattgattattgactagttattaatagtaatcaattacggggtcattagttcatagcccatatatggagttccgcgttacataacttacggtaaatggcccgcctggctgaccgcccaacgacccccgcccattgacgtcaataatgacgtatgttcccatagtaacgccaatagggactttccattgacgtcaatgggtggagtatttacggtaaactgcccacttggcagtacatcaagtgtatcatatgccaagtacgccccctattgacgtcaatgacggtaaatggcccgcctggcattatgcccagtacatgaccttatgggactttcctacttggcagtacatctacgtattagtcatcgctattaccatggtgatgcggttttggcagtacatcaatgggcgtggatagcggtttgactcacggggatttccaagtctccaccccattgacgtcaatgggagtttgttttggcaccaaaatcaacgggactttccaaaatgtcgtaacaactccgccccattgacgcaaatgggcggtaggcgtgtacggtgggaggtctatataagcagagctcgtttagtgaaccggggtctctctggttagaccagatctgagcctgggagctctctggctaactagggaacccactgcttaagcctcaataaagcttgccttgagtgcttcaagtagtgtgtgcccgtctgttgtgtgactctggtaactagagatccctcagacccttttagtcagtgtggaaaatctctagcagtggcgcccgaacagggacttgaaagcgaaagggaaaccagaggagctctctcgacgcaggactcggcttgctgaagcgcgcacggcaagaggcgaggggcggcgactggtgagtacgccaaaaattttgactagcggaggctagaaggagagagatgggtgcgagagcgtcagtattaagcgggggagaattagatcgcgatgggaaaaaattcggttaaggccagggggaaagaaaaaatataaattaaaacatatagtatgggcaagcagggagctagaacgattcgcagttaatcctggcctgttagaaacatcagaaggctgtagacaaatactgggacagctacaaccatcccttcagacaggatcagaagaacttagatcattatataatacagtagcaaccctctattgtgtgcatcaaaggatagagataaaagacaccaaggaagctttagacaagatagaggaagagcaaaacaaaagtaagaccaccgcacagcaagcggccgctgatcttcagacctggaggaggagatatgagggacaattggagaagtgaattatataaatataaagtagtaaaaattgaaccattaggagtagcacccaccaaggcaaagagaagagtggtgcagagagaaaaaagagcagtgggaataggagctttgttccttgggttcttgggagcagcaggaagcactatgggcgcagcgtcaatgacgctgacggtacaggccagacaattattgtctggtatagtgcagcagcagaacaatttgctgagggctattgaggcgcaacagcatctgttgcaactcacagtctggggcatcaagcagctccaggcaagaatcctggctgtggaaagatacctaaaggatcaacagctcctggggatttggggttgctctggaaaactcatttgcaccactgctgtgccttggaatgctagttggagtaataaatctctggaacagatttggaatcacacgacctggatggagtgggacagagaaattaacaattacacaagcttaatacactccttaattgaagaatcgcaaaaccagcaagaaaagaatgaacaagaattattggaattagataaatgggcaagtttgtggaattggtttaacataacaaattggctgtggtatataaaattattcataatgatagtaggaggcttggtaggtttaagaatagtttttgctgtactttctatagtgaatagagttaggcagggatattcaccattatcgtttcagacccacctcccaaccccgaggggacccgacaggcccgaaggaatagaagaagaaggtggagagagagacagagacagatccattcgattagtgaacggatctcgacggtatcgataagctaattcacaaatggcagtattcatccacaattttaaaagaaaaggggggattggggggtacagtgcaggggaaagaatagtagacataatagcaacagacatacaaactaaagaattacaaaaacaaattacaaaaattcaaaattttcgggtttattacagggacagcagagatccagtttgggaattagcttgatcgattagtccaatttgttaaagacaggatatcagtggtccaggctctagttttgactcaacaatatcaccagctgaagcctatagagtacgagccatagatagaataaaagattttatttagtctccagaaaaaggggggaatgaaagaccccacctgtaggtttggcaagctaggatcaaggttaggaacagagagacagcagaatatgggccaaacaggatatctgtggtaagcagttcctgccccggctcagggccaagaacagttggaacagcagaatatgggccaaacaggatatctgtggtaagcagttcctgccccggctcagggccaagaacagatggtccccagatgcggtcccgccctcagcagtttctagagaaccatcagatgtttccagggtgccccaaggacctgaaatgaccctgtgccttatttgaactaaccaatcagttcgcttctcgcttctgttcgcgcgcttctgctccccgagctcaataaaagagcccacaacccctcactcggcgcgatctagatctcgaatcgaattcgtcgactgatccgataatcaacctctggattacaaaatttgtgaaagattgactggtattcttaactatgttgctccttttacgctatgtggatacgctgctttaatgcctttgtatcatgctattgcttcccgtatggctttcattttctcctccttgtataaatcctggttgctgtctctttatgaggagttgtggcccgttgtcaggcaacgtggcgtggtgtgcactgtgtttgctgacgcaacccccactggttggggcattgccaccacctgtcagctcctttccgggactttcgctttccccctccctattgccacggcggaactcatcgccgcctgccttgcccgctgctggacaggggctcggctgttgggcactgacaattccgtggtgttgtcggggaaatcatcgtcctttccttggctgctcgcctgtgttgccacctggattctgcgcgggacgtccttctgctacgtcccttcggccctcaatccagcggaccttccttcccgcggcctgctgccggctctgcggcctcttccgcgtcttcgccttcgccctcagacgagtcggatctccctttgggccgcctccccgcatcggatcaaattcgagctcggtacctttaagaccaatgacttacaaggcagctgtagatcttagccactttttaaaagaaaaggggggactggaagggctaattcactcccaacgaagacaagatctgctttttgcttgtactgggtctctctggttagaccagatctgagcctgggagctctctggctaactagggaacccactgcttaagcctcaataaagcttgccttgagtgcttcaagtagtgtgtgcccgtctgttgtgtgactctggtaactagagatccctcagacccttttagtcagtgtggaaaatctctagcagtagtagttcatgtcatcttattattcagtatttataacttgcaaagaaatgaatatcagagagtgagaggaacttgtttattgcagcttataatggttacaaataaagcaatagcatcacaaatttcacaaataaagcatttttttcactgcattctagttgtggtttgtccaaactcatcaatgtatcttatcatgtctggctctagctatcccgcccctaactccgcccatcccgcccctaactccgcccagttccgcccattctccgccccatggctgactaattttttttatttatgcagaggccgaggccgcctcggcctctgagctattccagaagtagtgaggaggcttttttggaggcctagggacgtacccaattcgccctatagtgagtcgtattacgcgcgctcactggccgtcgttttacaacgtcgtgactgggaaaaccctggcgttacccaacttaatcgccttgcagcacatccccctttcgccagctggcgtaatagcgaagaggcccgcaccgatcgcccttcccaacagttgcgcagcctgaatggcgaatgggacgcgccctgtagcggcgcattaagcgcggcgggtgtggtggttacgcgcagcgtgaccgctacacttgccagcgccctagcgcccgctcctttcgctttcttcccttcctttctcgccacgttcgccggctttccccgtcaagctctaaatcgggggctccctttagggttccgatttagtgctttacggcacctcgaccccaaaaaacttgattagggtgatggttcacgtagtgggccatcgccctgatagacggtttttcgccctttgacgttggagtccacgttctttaatagtggactcttgttccaaactggaacaacactcaaccctatctcggtctattcttttgatttataagggattttgccgatttcggcctattggttaaaaaatgagctgatttaacaaaaatttaacgcgaattttaacaaaatattaacgcttacaatttaggtggcacttttcggggaaatgtgcgcggaacccctatttgtttatttttctaaatacattcaaatatgtatccgctcatgagacaataaccctgataaatgcttcaataatattgaaaaaggaagagtatgagtattcaacatttccgtgtcgcccttattcccttttttgcggcattttgccttcctgtttttgctcacccagaaacgctggtgaaagtaaaagatgctgaagatcagttgggtgcacgagtgggttacatcgaactggatctcaacagcggtaagatccttgagagttttcgccccgaagaacgttttccaatgatgagcacttttaaagttctgctatgtggcgcggtattatcccgtattgacgccgggcaagagcaactcggtcgccgcatacactattctcagaatgacttggttgagtactcaccagtcacagaaaagcatcttacggatggcatgacagtaagagaattatgcagtgctgccataaccatgagtgataacactgcggccaacttacttctgacaacgatcggaggaccgaaggagctaaccgcttttttgcacaacatgggggatcatgtaactcgccttgatcgttgggaaccggagctgaatgaagccataccaaacgacgagcgtgacaccacgatgcctgtagcaatggcaacaacgttgcgcaaactattaactggcgaactacttactctagcttcccggcaacaattaatagactggatggaggcggataaagttgcaggaccacttctgcgctcggcccttccggctggctggtttattgctgataaatctggagccggtgagcgtgggtctcgcggtatcattgcagcactggggccagatggtaagccctcccgtatcgtagttatctacacgacggggagtcaggcaactatggatgaacgaaatagacagatcgctgagataggtgcctcactgattaagcattggtaactgtcagaccaagtttactcatatatactttagattgatttaaaacttcatttttaatttaaaaggatctaggtgaagatcctttttgataatctcatgaccaaaatcccttaacgtgagttttcgttccactgagcgtcagaccccgtagaaaagatcaaaggatcttcttgagatcctttttttctgcgcgtaatctgctgcttgcaaacaaaaaaaccaccgctaccagcggtggtttgtttgccggatcaagagctaccaactctttttccgaaggtaactggcttcagcagagcgcagataccaaatactgttcttctagtgtagccgtagttaggccaccacttcaagaactctgtagcaccgcctacatacctcgctctgctaatcctgttaccagtggctgctgccagtggcgataagtcgtgtcttaccgggttggactcaagacgatagttaccggataaggcgcagcggtcgggctgaacggggggttcgtgcacacagcccagcttggagcgaacgacctacaccgaactgagatacctacagcgtgagctatgagaaagcgccacgcttcccgaagggagaaaggcggacaggtatccggtaagcggcagggtcggaacaggagagcgcacgagggagcttccagggggaaacgcctggtatctttatagtcctgtcgggtttcgccacctctgacttgagcgtcgatttttgtgatgctcgtcaggggggcggagcctatggaaaaacgccagcaacgcggcctttttacggttcctggccttttgctggccttttgctcacatgttctttcctgcgttatcccctgattctgtggataaccgtattaccgcctttgagtgagctgataccgctcgccgcagccgaacgaccgagcgcagcgagtcagtgagcgaggaagcggaagagcgcccaatacgcaaaccgcctctccccgcgcgttggccgattcattaatgcagctggcacgacaggttt

SEQ ID NO: 5 - DNA, 7181 bp, Artificial Sequence
  Synthetic Polynucleotide
cccgactggaaagcgggcagtgagcgcaacgcaattaatgtgagttagctcactcattaggcaccccaggctttacactttatgcttccggctcgtatgttgtgtggaattgtgagcggataacaatttcacacaggaaacagctatgaccatgattacgccaagcgcgcaattaaccctcactaaagggaacaaaagctggagctgcaagcttggccattgcatacgttgtatccatatcataatatgtacatttatattggctcatgtccaacattaccgccatgttgacattgattattgactagttattaatagtaatcaattacggggtcattagttcatagcccatatatggagttccgcgttacataacttacggtaaatggcccgcctggctgaccgcccaacgacccccgcccattgacgtcaataatgacgtatgttcccatagtaacgccaatagggactttccattgacgtcaatgggtggagtatttacggtaaactgcccacttggcagtacatcaagtgtatcatatgccaagtacgccccctattgacgtcaatgacggtaaatggcccgcctggcattatgcccagtacatgaccttatgggactttcctacttggcagtacatctacgtattagtcatcgctattaccatggtgatgcggttttggcagtacatcaatgggcgtggatagcggtttgactcacggggatttccaagtctccaccccattgacgtcaatgggagtttgttttggcaccaaaatcaacgggactttccaaaatgtcgtaacaactccgccccattgacgcaaatgggcggtaggcgtgtacggtgggaggtctatataagcagagctcgtttagtgaaccggggtctctctggttagaccagatctgagcctgggagctctctggctaactagggaacccactgcttaagcctcaataaagcttgccttgagtgcttcaagtagtgtgtgcccgtctgttgtgtgactctggtaactagagatccctcagacccttttagtcagtgtggaaaatctctagcagtggcgcccgaacagggacttgaaagcgaaagggaaaccagaggagctctctcgacgcaggactcggcttgctgaagcgcgcacggcaagaggcgaggggcggcgactggtgagtacgccaaaaattttgactagcggaggctagaaggagagagatgggtgcgagagcgtcagtattaagcgggggagaattagatcgcgatgggaaaaaattcggttaaggccagggggaaagaaaaaatataaattaaaacatatagtatgggcaagcagggagctagaacgattcgcagttaatcctggcctgttagaaacatcagaaggctgtagacaaatactgggacagctacaaccatcccttcagacaggatcagaagaacttagatcattatataatacagtagcaaccctctattgtgtgcatcaaaggatagagataaaagacaccaaggaagctttagacaagatagaggaagagcaaaacaaaagtaagaccaccgcacagcaagcggccgctgatcttcagacctggaggaggagatatgagggacaattggagaagtgaattatataaatataaagtagtaaaaattgaaccattaggagtagcacccaccaaggcaaagagaagagtggtgcagagagaaaaaagagcagtgggaataggagctttgttccttgggttcttgggagcagcaggaagcactatgggcgcagcgtcaatgacgctgacggtacaggccagacaattattgtctggtatagtgcagcagcagaacaatttgctgagggctattgaggcgcaacagcatctgttgcaactcacagtctggggcatcaagcagctccaggcaagaatcctggctgtggaaagatacctaaaggatcaacagctcctggggatttggggttgctctggaaaactcatttgcaccactgctgtgccttggaatgctagttggagtaataaatctctggaacagatttggaatcacacgacctggatggagtgggacagagaaattaacaattacacaagcttaatacactccttaattgaagaatcgcaaaaccagcaagaaaagaatgaacaagaattattggaattagataaatgggcaagtttgtggaattggtttaacataacaaattggctgtggtatataaaattattcataatgatagtaggaggcttggtaggtttaagaatagtttttgctgtactttctatagtgaatagagttaggcagggatattcaccattatcgtttcagacccacctcccaaccccgaggggacccgacaggcccgaaggaatagaagaagaaggtggagagagagacagagacagatccattcgattagtgaacggatctcgacggtatcgataagctaattcacaaatggcagtattcatccacaattttaaaagaaaaggggggattggggggtacagtgcaggggaaagaatagtagacataatagcaacagacatacaaactaaagaattacaaaaacaaattacaaaaattcaaaattttcgggtttattacagggacagcagagatccagtttgggaattagcttgatcgattagtccaatttgttaaagacaggatatcagtggtccaggctctagttttgactcaacaatatcaccagctgaagcctatagagtacgagccatagatagaataaaagattttatttagtctccagaaaaaggggggaatgaaagaccccacctgtaggtttggcaagctaggatcaaggttaggaacagagagacagcagaatatgggccaaacaggatatctgtggtaagcagttcctgccccggctcagggccaagaacagttggaacagcagaatatgggccaaacaggatatctgtggtaagcagttcctgccccggctcagggccaagaacagatggtccccagatgcggtcccgccctcagcagtttctagagaaccatcagatgtttccagggtgccccaaggacctgaaatgaccctgtgccttatttgaactaaccaatcagttcgcttctcgcttctgttcgcgcgcttctgctccccgagctcaataaaagagcccacaacccctcactcggcgcgatctagatctcgaatcgaattcgccgctagcgtcgactgatccgataatcaacctctggattacaaaatttgtgaaagattgactggtattcttaactatgttgctccttttacgctatgtggatacgctgctttaatgcctttgtatcatgctattgcttcccgtatggctttcattttctcctccttgtataaatcctggttgctgtctctttatgaggagttgtggcccgttgtcaggcaacgtggcgtggtgtgcactgtgtttgctgacgcaacccccactggttggggcattgccaccacctgtcagctcctttccgggactttcgctttccccctccctattgccacggcggaactcatcgccgcctgccttgcccgctgctggacaggggctcggctgttgggcactgacaattccgtggtgttgtcggggaaatcatcgtcctttccttggctgctcgcctgtgttgccacctggattctgcgcgggacgtccttctgctacgtcccttcggccctcaatccagcggaccttccttcccgcggcctgctgccggctctgcggcctcttccgcgtcttcgccttcgccctcagacgagtcggatctccctttgggccgcctccccgcatcggatcaaattcgagctcggtacctttaagaccaatgacttacaaggcagctgtagatcttagccactttttaaaagaaaaggggggactggaagggctaattcactcccaacgaagacaagatctgctttttgcttgtactgggtctctctggttagaccagatctgagcctgggagctctctggctaactagggaacccactgcttaagcctcaataaagcttgccttgagtgcttcaagtagtgtgtgcccgtctgttgtgtgactctggtaactagagatccctcagacccttttagtcagtgtggaaaatctctagcagtagtagttcatgtcatcttattattcagtatttataacttgcaaagaaatgaatatcagagagtgagaggaacttgtttattgcagcttataatggttacaaataaagcaatagcatcacaaatttcacaaataaagcatttttttcactgcattctagttgtggtttgtccaaactcatcaatgtatcttatcatgtctggctctagctatcccgcccctaactccgcccatcccgcccctaactccgcccagttccgcccattctccgccccatggctgactaattttttttatttatgcagaggccgaggccgcctcggcctctgagctattccagaagtagtgaggaggcttttttggaggcctagggacgtacccaattcgccctatagtgagtcgtattacgcgcgctcactggccgtcgttttacaacgtcgtgactgggaaaaccctggcgttacccaacttaatcgccttgcagcacatccccctttcgccagctggcgtaatagcgaagaggcccgcaccgatcgcccttcccaacagttgcgcagcctgaatggcgaatgggacgcgccctgtagcggcgcattaagcgcggcgggtgtggtggttacgcgcagcgtgaccgctacacttgccagcgccctagcgcccgctcctttcgctttcttcccttcctttctcgccacgttcgccggctttccccgtcaagctctaaatcgggggctccctttagggttccgatttagtgctttacggcacctcgaccccaaaaaacttgattagggtgatggttcacgtagtgggccatcgccctgatagacggtttttcgccctttgacgttggagtccacgttctttaatagtggactcttgttccaaactggaacaacactcaaccctatctcggtctattcttttgatttataagggattttgccgatttcggcctattggttaaaaaatgagctgatttaacaaaaatttaacgcgaattttaacaaaatattaacgcttacaatttaggtggcacttttcggggaaatgtgcgcggaacccctatttgtttatttttctaaatacattcaaatatgtatccgctcatgagacaataaccctgataaatgcttcaataatattgaaaaaggaagagtatgagtattcaacatttccgtgtcgcccttattcccttttttgcggcattttgccttcctgtttttgctcacccagaaacgctggtgaaagtaaaagatgctgaagatcagttgggtgcacgagtgggttacatcgaactggatctcaacagcggtaagatccttgagagttttcgccccgaagaacgttttccaatgatgagcacttttaaagttctgctatgtggcgcggtattatcccgtattgacgccgggcaagagcaactcggtcgccgcatacactattctcagaatgacttggttgagtactcaccagtcacagaaaagcatcttacggatggcatgacagtaagagaattatgcagtgctgccataaccatgagtgataacactgcggccaacttacttctgacaacgatcggaggaccgaaggagctaaccgcttttttgcacaacatgggggatcatgtaactcgccttgatcgttgggaaccggagctgaatgaagccataccaaacgacgagcgtgacaccacgatgcctgtagcaatggcaacaacgttgcgcaaactattaactggcgaactacttactctagcttcccggcaacaattaatagactggatggaggcggataaagttgcaggaccacttctgcgctcggcccttccggctggctggtttattgctgataaatctggagccggtgagcgtgggtctcgcggtatcattgcagcactggggccagatggtaagccctcccgtatcgtagttatctacacgacggggagtcaggcaactatggatgaacgaaatagacagatcgctgagataggtgcctcactgattaagcattggtaactgtcagaccaagtttactcatatatactttagattgatttaaaacttcatttttaatttaaaaggatctaggtgaagatcctttttgataatctcatgaccaaaatcccttaacgtgagttttcgttccactgagcgtcagaccccgtagaaaagatcaaaggatcttcttgagatcctttttttctgcgcgtaatctgctgcttgcaaacaaaaaaaccaccgctaccagcggtggtttgtttgccggatcaagagctaccaactctttttccgaaggtaactggcttcagcagagcgcagataccaaatactgttcttctagtgtagccgtagttaggccaccacttcaagaactctgtagcaccgcctacatacctcgctctgctaatcctgttaccagtggctgctgccagtggcgataagtcgtgtcttaccgggttggactcaagacgatagttaccggataaggcgcagcggtcgggctgaacggggggttcgtgcacacagcccagcttggagcgaacgacctacaccgaactgagatacctacagcgtgagctatgagaaagcgccacgcttcccgaagggagaaaggcggacaggtatccggtaagcggcagggtcggaacaggagagcgcacgagggagcttccagggggaaacgcctggtatctttatagtcctgtcgggtttcgccacctctgacttgagcgtcgatttttgtgatgctcgtcaggggggcggagcctatggaaaaacgccagcaacgcggcctttttacggttcctggccttttgctggccttttgctcacatgttctttcctgcgttatcccctgattctgtggataaccgtattaccgcctttgagtgagctgataccgctcgccgcagccgaacgaccgagcgcagcgagtcagtgagcgaggaagcggaagagcgcccaatacgcaaaccgcctctccccgcgcgttggccgattcattaatgcagctggcacgacaggttt

SEQ ID NO: 6 - DNA, 6554 bp, Artificial Sequence
  Synthetic Polynucleotide
cccgactggaaagcgggcagtgagcgcaacgcaattaatgtgagttagctcactcattaggcaccccaggctttacactttatgcttccggctcgtatgttgtgtggaattgtgagcggataacaatttcacacaggaaacagctatgaccatgattacgccaagcgcgcaattaaccctcactaaagggaacaaaagctggagctgcaagcttggccattgcatacgttgtatccatatcataatatgtacatttatattggctcatgtccaacattaccgccatgttgacattgattattgactagttattaatagtaatcaattacggggtcattagttcatagcccatatatggagttccgcgttacataacttacggtaaatggcccgcctggctgaccgcccaacgacccccgcccattgacgtcaataatgacgtatgttcccatagtaacgccaatagggactttccattgacgtcaatgggtggagtatttacggtaaactgcccacttggcagtacatcaagtgtatcatatgccaagtacgccccctattgacgtcaatgacggtaaatggcccgcctggcattatgcccagtacatgaccttatgggactttcctacttggcagtacatctacgtattagtcatcgctattaccatggtgatgcggttttggcagtacatcaatgggcgtggatagcggtttgactcacggggatttccaagtctccaccccattgacgtcaatgggagtttgttttggcaccaaaatcaacgggactttccaaaatgtcgtaacaactccgccccattgacgcaaatgggcggtaggcgtgtacggtgggaggtctatataagcagagctcgtttagtgaaccggggtctctctggttagaccagatctgagcctgggagctctctggctaactagggaacccactgcttaagcctcaataaagcttgccttgagtgcttcaagtagtgtgtgcccgtctgttgtgtgactctggtaactagagatccctcagacccttttagtcagtgtggaaaatctctagcagtggcgcccgaacagggacttgaaagcgaaagggaaaccagaggagctctctcgacgcaggactcggcttgctgaagcgcgcacggcaagaggcgaggggcggcgactggtgagtacgccaaaaattttgactagcggaggctagaaggagagagatgggtgcgagagcgtcagtattaagcgggggagaattagatcgcgatgggaaaaaattcggttaaggccagggggaaagaaaaaatataaattaaaacatatagtatgggcaagcagggagctagaacgattcgcagttaatcctggcctgttagaaacatcagaaggctgtagacaaatactgggacagctacaaccatcccttcagacaggatcagaagaacttagatcattatataatacagtagcaaccctctattgtgtgcatcaaaggatagagataaaagacaccaaggaagctttagacaagatagaggaagagcaaaacaaaagtaagaccaccgcacagcaagcggccgctgatcttcagacctggaggaggagatatgagggacaattggagaagtgaattatataaatataaagtagtaaaaattgaaccattaggagtagcacccaccaaggcaaagagaagagtggtgcagagagaaaaaagagcagtgggaataggagctttgttccttgggttcttgggagcagcaggaagcactatgggcgcagcgtcaatgacgctgacggtacaggccagacaattattgtctggtatagtgcagcagcagaacaatttgctgagggctattgaggcgcaacagcatctgttgcaactcacagtctggggcatcaagcagctccaggcaagaatcctggctgtggaaagatacctaaaggatcaacagctcctggggatttggggttgctctggaaaactcatttgcaccactgctgtgccttggaatgctagttggagtaataaatctctggaacagatttggaatcacacgacctggatggagtgggacagagaaattaacaattacacaagcttaatacactccttaattgaagaatcgcaaaaccagcaagaaaagaatgaacaagaattattggaattagataaatgggcaagtttgtggaattggtttaacataacaaattggctgtggtatataaaattattcataatgatagtaggaggcttggtaggtttaagaatagtttttgctgtactttctatagtgaatagagttaggcagggatattcaccattatcgtttcagacccacctcccaaccccgaggggacccgacaggcccgaaggaatagaagaagaaggtggagagagagacagagacagatccattcgattagtgaacggatctcgacggtatcgataagctaattcacaaatggcagtattcatccacaattttaaaagaaaaggggggattggggggtacagtgcaggggaaagaatagtagacataatagcaacagacatacaaactaaagaattacaaaaacaaattacaaaaattcaaaattttcgggtttattacagggacagcagagatccagtttgggaattagcttgatcgattagtccaatttgttaaagacaggatatcagtggtccaggctctagttttgactcaacaatatcaccagctgaagcctatagagtacgagccatagatagaataaaagattttatttagtctccagaaaaaggggggaatgaaagaccccacctgtaggtttggcaagctaggatcaaggttaggaacagagagacagcagaatatgggccaaacaggatatctgtggtaagcagttcctgccccggctcagggccaagaacagttggaacagcagaatatgggccaaacaggatatctgtggtaagcagttcctgccccggctcagggccaagaacagatggtccccagatgcggtcccgccctcagcagtttctagagaaccatcagatgtttccagggtgccccaaggacctgaaatgaccctgtgccttatttgaactaaccaatcagttcgcttctcgcttctgttcgcgcgcttctgctccccgagctcaataaaagagcccacaacccctcactcggcgcgatctagatctcgaatcgaattcgtcgacggtacctttaagaccaatgacttacaaggcagctgtagatcttagccactttttaaaagaaaaggggggactggaagggctaattcactcccaacgaagacaagatctgctttttgcttgtactgggtctctctggttagaccagatctgagcctgggagctctctggctaactagggaacccactgcttaagcctcaataaagcttgccttgagtgcttcaagtagtgtgtgcccgtctgttgtgtgactctggtaactagagatccctcagacccttttagtcagtgtggaaaatctctagcagtagtagttcatgtcatcttattattcagtatttataacttgcaaagaaatgaatatcagagagtgagaggaacttgtttattgcagcttataatggttacaaataaagcaatagcatcacaaatttcacaaataaagcatttttttcactgcattctagttgtggtttgtccaaactcatcaatgtatcttatcatgtctggctctagctatcccgcccctaactccgcccatcccgcccctaactccgcccagttccgcccattctccgccccatggctgactaattttttttatttatgcagaggccgaggccgcctcggcctctgagctattccagaagtagtgaggaggcttttttggaggcctagggacgtacccaattcgccctatagtgagtcgtattacgcgcgctcactggccgtcgttttacaacgtcgtgactgggaaaaccctggcgttacccaacttaatcgccttgcagcacatccccctttcgccagctggcgtaatagcgaagaggcccgcaccgatcgcccttcccaacagttgcgcagcctgaatggcgaatgggacgcgccctgtagcggcgcattaagcgcggcgggtgtggtggttacgcgcagcgtgaccgctacacttgccagcgccctagcgcccgctcctttcgctttcttcccttcctttctcgccacgttcgccggctttccccgtcaagctctaaatcgggggctccctttagggttccgatttagtgctttacggcacctcgaccccaaaaaacttgattagggtgatggttcacgtagtgggccatcgccctgatagacggtttttcgccctttgacgttggagtccacgttctttaatagtggactcttgttccaaactggaacaacactcaaccctatctcggtctattcttttgatttataagggattttgccgatttcggcctattggttaaaaaatgagctgatttaacaaaaatttaacgcgaattttaacaaaatattaacgcttacaatttaggtggcacttttcggggaaatgtgcgcggaacccctatttgtttatttttctaaatacattcaaatatgtatccgctcatgagacaataaccctgataaatgcttcaataatattgaaaaaggaagagtatgagtattcaacatttccgtgtcgcccttattcccttttttgcggcattttgccttcctgtttttgctcacccagaaacgctggtgaaagtaaaagatgctgaagatcagttgggtgcacgagtgggttacatcgaactggatctcaacagcggtaagatccttgagagttttcgccccgaagaacgttttccaatgatgagcacttttaaagttctgctatgtggcgcggtattatcccgtattgacgccgggcaagagcaactcggtcgccgcatacactattctcagaatgacttggttgagtactcaccagtcacagaaaagcatcttacggatggcatgacagtaagagaattatgcagtgctgccataaccatgagtgataacactgcggccaacttacttctgacaacgatcggaggaccgaaggagctaaccgcttttttgcacaacatgggggatcatgtaactcgccttgatcgttgggaaccggagctgaatgaagccataccaaacgacgagcgtgacaccacgatgcctgtagcaatggcaacaacgttgcgcaaactattaactggcgaactacttactctagcttcccggcaacaattaatagactggatggaggcggataaagttgcaggaccacttctgcgctcggcccttccggctggctggtttattgctgataaatctggagccggtgagcgtgggtctcgcggtatcattgcagcactggggccagatggtaagccctcccgtatcgtagttatctacacgacggggagtcaggcaactatggatgaacgaaatagacagatcgctgagataggtgcctcactgattaagcattggtaactgtcagaccaagtttactcatatatactttagattgatttaaaacttcatttttaatttaaaaggatctaggtgaagatcctttttgataatctcatgaccaaaatcccttaacgtgagttttcgttccactgagcgtcagaccccgtagaaaagatcaaaggatcttcttgagatcctttttttctgcgcgtaatctgctgcttgcaaacaaaaaaaccaccgctaccagcggtggtttgtttgccggatcaagagctaccaactctttttccgaaggtaactggcttcagcagagcgcagataccaaatactgttcttctagtgtagccgtagttaggccaccacttcaagaactctgtagcaccgcctacatacctcgctctgctaatcctgttaccagtggctgctgccagtggcgataagtcgtgtcttaccgggttggactcaagacgatagttaccggataaggcgcagcggtcgggctgaacggggggttcgtgcacacagcccagcttggagcgaacgacctacaccgaactgagatacctacagcgtgagctatgagaaagcgccacgcttcccgaagggagaaaggcggacaggtatccggtaagcggcagggtcggaacaggagagcgcacgagggagcttccagggggaaacgcctggtatctttatagtcctgtcgggtttcgccacctctgacttgagcgtcgatttttgtgatgctcgtcaggggggcggagcctatggaaaaacgccagcaacgcggcctttttacggttcctggccttttgctggccttttgctcacatgttctttcctgcgttatcccctgattctgtggataaccgtattaccgcctttgagtgagctgataccgctcgccgcagccgaacgaccgagcgcagcgagtcagtgagcgaggaagcggaagagcgcccaatacgcaaaccgcctctccccgcgcgttggccgattcattaatgcagctggcacgacaggttt

SEQ ID NO: 7 - DNA, 1183 bp, Artificial Sequence
  Synthetic Polynucleotide
gtgaggctccggtgcccgtcagtgggcagagcgcacatcgcccacagtccccgagaagttggggggaggggtcggcaattgaaccggtgcctagagaaggtggcgcggggtaaactgggaaagtgatgtcgtgtactggctccgcctttttcccgagggtgggggagaaccgtatataagtgcagtagtcgccgtgaacgttctttttcgcaacgggtttgccgccagaacacaggtaagtgccgtgtgtggttcccgcgggcctggcctctttacgggttatggcccttgcgtgccttgaattacttccacctggctgcagtacgtgattcttgatcccgagcttcgggttggaagtgggtgggagagttcgaggccttgcgcttaaggagccccttcgcctcgtgcttgagttgaggcctggcctgggcgctggggccgccgcgtgcgaatctggtggcaccttcgcgcctgtctcgctgctttcgataagtctctagccatttaaaatttttgatgacctgctgcgacgctttttttctggcaagatagtcttgtaaatgcgggccaagatctgcacactggtatttcggtttttggggccgcgggcggcgacggggcccgtgcgtcccagcgcacatgttcggcgaggcggggcctgcgagcgcggccaccgagaatcggacgggggtagtctcaagctggccggcctgctctggtgcctggcctcgcgccgccgtgtatcgccccgccctgggcggcaaggctggcccggtcggcaccagttgcgtgagcggaaagatggccgcttcccggccctgctgcagggagctcaaaatggaggacgcggcgctcgggagagcgggcgggtgagtcacccacacaaaggaaaagggcctttccgtcctcagccgtcgcttcatgtgactccacggagtaccgggcgccgtccaggcacctcgattagttctcgaccttttggagtacgtcgtctttaggttggggggaggggttttatgcgatggagtttccccacactgagtgggtggagactgaagttaggccagcttggcacttgatgtaattctccttggaatttgccctttttgagtttggatcttggttcattctcaagcctcagacagtggttcaaagtttttttcttccatttcaggtgtcgtga

SEQ ID NO: 8 - DNA, 5857 bp, Artificial Sequence
  Synthetic Polynucleotide
aattttaacaaaatattaacgcttacaatttcctgatgcggtattttctccttacgcatctgtgcggtatttcacaccgcatcaggtggcacttttcggggaaatgtgcgcggaacccctatttgtttatttttctaaatacattcaaatatgtatccgctcatgagacaataaccctgataaatgcttcaataatattgaaaaaggaagagtatgagtattcaacatttccgtgtcgcccttattcccttttttgcggcattttgccttcctgtttttgctcacccagaaacgctggtgaaagtaaaagatgctgaagatcagttgggtgcacgagtgggttacatcgaactggatctcaacagcggtaagatccttgagagttttcgccccgaagaacgttttccaatgatgagcacttttaaagttctgctatgtggcgcggtattatcccgtattgacgccgggcaagagcaactcggtcgccgcatacactattctcagaatgacttggttgagtactcaccagtcacagaaaagcatcttacggatggcatgacagtaagagaattatgcagtgctgccataaccatgagtgataacactgcggccaacttacttctgacaacgatcggaggaccgaaggagctaaccgcttttttgcacaacatgggggatcatgtaactcgccttgatcgttgggaaccggagctgaatgaagccataccaaacgacgagcgtgacaccacgatgcctgtagcaatggcaacaacgttgcgcaaactattaactggcgaactacttactctagcttcccggcaacaattaatagactggatggaggcggataaagttgcaggaccacttctgcgctcggcccttccggctggctggtttattgctgataaatctggagccggtgagcgtgggtctcgcggtatcattgcagcactggggccagatggtaagccctcccgtatcgtagttatctacacgacggggagtcaggcaactatggatgaacgaaatagacagatcgctgagataggtgcctcactgattaagcattggtaactgtcagaccaagtttactcatatatactttagattgatttaaaacttcatttttaatttaaaaggatctaggtgaagatcctttttgataatctcatgaccaaaatcccttaacgtgagttttcgttccactgagcgtcagaccccgtagaaaagatcaaaggatcttcttgagatcctttttttctgcgcgtaatctgctgcttgcaaacaaaaaaaccaccgctaccagcggtggtttgtttgccggatcaagagctaccaactctttttccgaaggtaactggcttcagcagagcgcagataccaaatactgttcttctagtgtagccgtagttaggccaccacttcaagaactctgtagcaccgcctacatacctcgctctgctaatcctgttaccagtggctgctgccagtggcgataagtcgtgtcttaccgggttggactcaagacgatagttaccggataaggcgcagcggtcgggctgaacggggggttcgtgcacacagcccagcttggagcgaacgacctacaccgaactgagatacctacagcgtgagctatgagaaagcgccacgcttcccgaagggagaaaggcggacaggtatccggtaagcggcagggtcggaacaggagagcgcacgagggagcttccagggggaaacgcctggtatctttatagtcctgtcgggtttcgccacctctgacttgagcgtcgatttttgtgatgctcgtcaggggggcggagcctatggaaaaacgccagcaacgcggcctttttacggttcctggccttttgctggccttttgctcacatgttctttcctgcgttatcccctgattctgtggataaccgtattaccgcctttgagtgagctgataccgctcgccgcagccgaacgaccgagcgcagcgagtcagtgagcgaggaagcggatccctatacagttgaagtcggaagtttacatacaccttagccaaatacatttaaactcactttttcacaattcctgacatttaatcctagtaaaaattccctgtcttaggtcagttaggatcaccactttattttaagaatgtgaaatatcagaataatagtagagagaatgattcatttcagcttttatttctttcatcacattcccagtgggtcagaagtttacatacactcgactcctctgcagaatgcggcgatgtttcggtaaggggtcccgagtagctagttcatggcagccagcatatggcatatgttgccaaactctaaaccaaatactcattctgatgttttaaatgatttgccctcccatatgtccttccgagtgagagacacaaaaaattccaacacactattgcaatgaaaataaatttcctttattagccagaagtcagatgctcaaggggcttcatgatgtccccataatttttggcagagggaaaaagatctcagtggtatttgtgagccagggcattggccacaccagccaccaccttctgataggcagcctgcacctgaggagtgaattcacgacaggccttcgaatcaggcaccgggcttgcgggtcatgcaccaggtgcgcggtccttcgggcacctcgacgtcggcggtgacggtgaagccgagccgctcgtagaaggggaggttgcggggcgcggaggtctccaggaaggcgggcaccccggcgcgctcggccgcctccactccggggagcacgacggcgctgcccagacccttgccctggtggtcgggcgagacgccgacggtggccaggaaccacgcgggctccttgggccggtgcggcgccaggaggccttccatctgttgctgcgcggccagccgggaaccgctcaactcggccatgcgcgggccgatctcggcgaacaccgcccccgcttcgacgctctccggcgtggtccagaccgccaccgcggcgccgtcgtccgcgacccacaccttgccgatgtcgagcccgacgcgcgtgaggaagagttcttgcagctcggtgacccgctcgatgtggcggtccggatcgacggtgtggcgcgtggcggggtagtcggcgaacgcggcggcgagggtgcgtacggccctggggacgtcgtcgcgggtggcgaggcgcaccgtgggcttgtactcggtcatggtggcctcaggtgcagaggtttctacagggaaagagagaaaggctacagttagtttgctgtgatgatgctaagtgccgaggtcagatgtctatggattgtacacggaatcccaacgcaggaaccaaaaaacactcacccaaaaaaatggcgctaaggccgagagaaaggcgaagttccgtctacggctatataccttgaaacaggggcggcagaagtgacgcaacgcggttgcgcggacggcttcctgtgttttcattggtcgaagcgttctgcgcgtgcgcagagattccccagggaaggcgggccctcttccgaatgtccaatccggacattcttccggttggacctccgcggtcagcgctgtgcccggcgagagatcacgtggggcgcggaggcggtgctgctggggcacggccgtccagcctcggcggccatatttttgaggggctgttcatctcgttcacacgctctgtccgccatgtttgtgagtggaagcgccattaccccttcaagcgactgaaggctgcagggcctctggtggcccgcatggggagaccagacccgccaggcccgcctttccgcactcagtccgggcttactttattttgtgagacagggtctcgcctagaggctccggtgcccgtcagtgggcagagcgcacatcgcccacagtccccgagaagttggggggaggggtcggcaattgaaccggtgcctagagaaggtggcgcggggtaaactgggaaagtgatgtcgtgtactggctccgcctttttcccgagggtgggggagaaccgtatataagtgcagtagtcgccgtgaacgttctttttcgcaacgggtttgccgccagaacacaggtaagtgccgtgtgtggttcccgcgggcctggcctctttacgggttatggcccttgcgtgccttgaattacttccacgcccctggctgcagtacgtgattcttgatcccgagcttcgggttggaagtgggtgggagagttcgaggccttgcgcttaaggagccccttcgcctcgtgcttgagttgaggcttggcctgggcgctggggccgccgcgtgcgaatctggtggcaccttcgcgcctgtctcgctgctttcgataagtctctagccatttaaaatttttgatgacctgctgcgacgctttttttctggcaagatagtcttgtaaatgcgggccaagatctgcacactggtatttcggtttttggggccgcgggcggcgacggggcccgtgcgtcccagcgcacatgttcggcgaggcggggcctgcgagcgcggccaccgagaatcggacgggggtagtctcaagctggccggcctgctctggtgcctggcctcgcgccgccgtgtatcgccccgccctgggcggcaaggctggcccggtcggcaccagttgcgtgagcggaaagatggccgcttcccggccctgctgcagggagctcaaaatggaggacgcggcgctcgggagagcgggcgggtgagtcacccacacaaaggaaaagggcctttccgtcctcagccgtcgcttcatgtgactccacggagtaccgggcgccgtccaggcacctcgattagttctcgagcttttggagtacgtcgtctttaggttggggggaggggttttatgcgatggagtttccccatactgagtgggtggagactgaagttaggccagcttggcacttgatgtaattctccttggaatttgccctttttgagtttggatcttggttcattctcaagcctcagacagtggttcaaagtttttttcttccatttaaggtgtcgtgaaaactaccccaagctggcctctgaggccaccatggctcgagtttcgaactcaattatactgaattgtttcatcatagggttcaacattgtgataaatcaggacttcaatgtctagtgttcagtaaataccttgtagggctctccaaaaaggggaatcttttcaggaaatgcctctttctcttggtgggcttcctggttgcgtctttccttctctctaattcgaaggcctgtcaggccaagcttggggatcaattctctagagctcgctgatcagcctcgactgtgccttctagttgccagccatctgttgtttgcccctcccccgtgccttccttgaccctggaaggtgccactcccactgtcctttcctaataaaatgaggaaattgcatcgcattgtctgagtaggtgtcattctattctggggggtggggtggggcaggacagcaagggggaggattgggaagacaatagcaggcatgctggggatgcggtgggctctatggcttctgaggcggaaagaaccagctgggcctactagatagcggaccccttaccgaaacatcgccgcattctgcagaggagtcgaacttagtgtatgtaaacttctgacccactggaattgtgatacagtgaattataagtgaaataatctgtctgtaaacaattgttggaaaaatgacttgtgtcatgcacaaagtagatgtcctaactgacttgccaaaactattgtttgttaacaagaaatttgtggagtagttgaaaaacgagttttaatgactccaacttaagtgtatgtaaacttccgacttcaactgtatagggatcc

SEQ ID NO: 9 - DNA, 7566 bp, Artificial Sequence
  Synthetic Polynucleotide
tgaaagaccccacctgtaggtttggcaagctagcttaagtaacgccattttgcaaggcatggaaaatacataactgagaatagagaagttcagatcaaggttaggaacagagagacagcagaatatgggccaaacaggatatctgtggtaagcagttcctgccccggctcagggccaagaacagatggtccccagatgcggtcccgccctcagcagtttctagagaaccatcagatgtttccagggtgccccaaggacctgaaatgaccctgtgccttatttgaactaaccaatcagttcgcttctcgcttctgttcgcgcgcttctgctccccgagctcaataaaagagcccacaacccctcactcggcgcgccagtcctccgatagactgcgtcgcccgggtacccgtattcccaataaagcctcttgctgtttgcatccgaatcgtggactcgctgatccttgggagggtctcctcagattgattgactgcccacctcgggggtctttcatttggaggttccaccgagatttggagacccctgcccagggaccaccgacccccccgccgggaggtaagctggccagcggtcgtttcgtgtctgtctctgtctttgtgcgtgtttgtgccggcatctaatgtttgcgcctgcgtctgtactagttagctaactagctctgtatctggcggacccgtggtggaactgacgagttctgaacacccggccgcaaccctgggagacgtcccagggactttgggggccgtttttgtggcccgacctgaggaagggagtcgatgtggaatccgaccccgtcaggatatgtggttctggtaggagacgagaacctaaaacagttcccgcctccgtctgaatttttgctttcggtttggaaccgaagccgcgcgtcttgtctgctgcagcgctgcagcatcgttctgtgttgtctctgtctgactgtgtttctgtatttgtctgaaaattagggccagactgttaccactcccttaagtttgaccttaggtcactggaaagatgtcgagcggatcgctcacaaccagtcggtagatgtcaagaagagacgttgggttaccttctgctctgcagaatggccaacctttaacgtcggatggccgcgagacggcacctttaaccgagacctcatcacccaggttaagatcaaggtcttttcacctggcccgcatggacacccagaccaggtcccctacatcgtgacctgggaagccttggcttttgacccccctccctgggtcaagccctttgtacaccctaagcctccgcctcctcttcctccatccgccccgtctctcccccttgaacctcctcgttcgaccccgcctcgatcctccctttatccagccctcactccttctctaggcgccggaattagatccccaccatgaagcccaccgagaacaacgaagacttcaacatcgtggccgtggccagcaacttcgcgaccacggatctcgatgctgaccgcgggaagttgcccggcaagaagctgccgctggaggtgctcaaagagatggaagccaatgcccggaaagctggctgcaccaggggctgtctgatctgcctgtcccacatcaagtgcacgcccaagatgaagaagttcatcccaggacgctgccacacctacgaaggcgacaaagagtccgcacagggcggcataggcgaggcgatcgtcgacattcctgagattcctgggttcaaggacttggagcccatggagcagttcatcgcacaggtcgatctgtgtgtggactgcacaactggctgcctcaaagggcttgccaacgtgcagtgttctgacctgctcaagaagtggctgccgcaacgctgtgcgacctttgccagcaagatccagggccaggtggacaagatcaagggggccggtggtgacctcgagaccgatttctacccctacgatgtgcccgattacgcttagtctagagggccctattctatagtgtcacctaagtcgaggttaacgaattctaccgggtaggggaggcgcttttcccaaggcagtctggagcatgcgctttagcagccccgctgggcacttggcgctacacaagtggcctctggcctcgcacacattccacatccaccggtaggcgccaaccggctccgttctttggtggccccttcgcgccaccttctactcctcccctagtcaggaagttcccccccgccccgcagctcgcgtcgtgcaggacgtgacaaatggaagtagcacgtctcactagtctcgtgcagatggacagcaccgctgagcaatggaagcgggtaggcctttggggcagcggccaatagcagctttgctccttcgctttctgggctcagaggctgggaaggggtgggtccgggggcgggctcaggggcgggctcaggggcggggcgggcgcccgaaggtcctccggaggcccggcattctgcacgcttcaaaagcgcacgtctgccgcgctgttctcctcttcctcatctccgggcctttcgacctgcatcccgccaccatgaaaaagcctgaactcaccgcgacgtctgtcgagaagtttctgatcgaaaagttcgacagcgtctccgacctgatgcagctctcggagggcgaagaatctcgtgctttcagcttcgatgtaggagggcgtggatatgtcctgcgggtaaatagctgcgccgatggtttctacaaagatcgttatgtttatcggcactttgcatcggccgcgctcccgattccggaagtgcttgacattggggaattcagcgagagcctgacctattgcatctcccgccgtgcacagggtgtcacgttgcaagacctgcctgaaaccgaactgcccgctgttctgcagccggtcgcggaggccatggatgcgatcgctgcggccgatcttagccagacgagcgggttcggcccattcggaccgcaaggaatcggtcaatacactacatggcgtgatttcatatgcgcgattgctgatccccatgtgtatcactggcaaactgtgatggacgacaccgtcagtgcgtccgtcgcgcaggctctcgatgagctgatgctttgggccgaggactgccccgaagtccggcacctcgtgcacgcggatttcggctccaacaatgtcctgacggacaatggccgcataacagcggtcattgactggagcgaggcgatgttcggggattcccaatacgaggtcgccaacatcttcttctggaggccgtggttggcttgtatggagcagcagacgcgctacttcgagcggaggcatccggagcttgcaggatcgccgcggctccggggcgtatatgctccgcattggtcttgaccaactctatcagagcttggttgacggcaatttcgatgatgcagcttgggcgcagggtcgatgcgacgcaatcgtccgatccggagccgggactgtcgggcgtacacaaatcgcccgcagaagcgcggccgtctggaccgatggctgtgtagaagtactcgccgatagtggaaaccgacgccccagcactcgtccgagggcaaaggaatagagtagatgccgaccgaacaagagctgatttcgagaacgcctcagccagcaactcgcgcgagcctagcaaggcaaatgcgagagaacggccttacgcttggtggcacagttctcgtccacagttcgctaagctcgctcggctgggtcgcgggagggccggtcgcagtgattcaggcccttctggattgtgttggtccccagggcacgattgtcatgcccacgcactcgggtgatctgactgatcccgcagattggagatcgccgcccgtgcctgccgattgggtgcagatccgtcgacctgcagccaagcttatcgataaaataaaagattttatttagtctccagaaaaaggggggaatgaaagaccccacctgtaggtttggcaagctagcttaagtaacgccattttgcaaggcatggaaaatacataactgagaatagagaagttcagatcaaggttaggaacagagagacagcagaatatgggccaaacaggatatctgtggtaagcagttcctgccccggctcagggccaagaacagatggtccccagatgcggtcccgccctcagcagtttctagagaaccatcagatgtttccagggtgccccaaggacctgaaatgaccctgtgccttatttgaactaaccaatcagttcgcttctcgcttctgttcgcgcgcttctgctccccgagctcaataaaagagcccacaacccctcactcggcgcgccagtcctccgatagactgcgtcgcccgggtacccgtgtatccaataaaccctcttgcagttgcatccgacttgtggtctcgctgttccttgggagggtctcctctgagtgattgactacccgtcagcgggggtctttcatgggtaacagtttcttgaagttggagaacaacattctgagggtaggagtcgaatattaagtaatcctgactcaattagccactgttttgaatccacatactccaatactcctgaaatagttcattatggacagcgcagaagagctggggagaattaattcgtaatcatggtcatagctgtttcctgtgtgaaattgttatccgctcacaattccacacaacatacgagccggaagcataaagtgtaaagcctggggtgcctaatgagtgagctaactcacattaattgcgttgcgctcactgcccgctttccagtcgggaaacctgtcgtgccagctgcattaatgaatcggccaacgcgcggggagaggcggtttgcgtattgggcgctcttccgcttcctcgctcactgactcgctgcgctcggtcgttcggctgcggcgagcggtatcagctcactcaaaggcggtaatacggttatccacagaatcaggggataacgcaggaaagaacatgtgagcaaaaggccagcaaaaggccaggaaccgtaaaaaggccgcgttgctggcgtttttccataggctccgcccccctgacgagcatcacaaaaatcgacgctcaagtcagaggtggcgaaacccgacaggactataaagataccaggcgtttccccctggaagctccctcgtgcgctctcctgttccgaccctgccgcttaccggatacctgtccgcctttctcccttcgggaagcgtggcgctttctcatagctcacgctgtaggtatctcagttcggtgtaggtcgttcgctccaagctgggctgtgtgcacgaaccccccgttcagcccgaccgctgcgccttatccggtaactatcgtcttgagtccaacccggtaagacacgacttatcgccactggcagcagccactggtaacaggattagcagagcgaggtatgtaggcggtgctacagagttcttgaagtggtggcctaactacggctacactagaaggacagtatttggtatctgcgctctgctgaagccagttaccttcggaaaaagagttggtagctcttgatccggcaaacaaaccaccgctggtagcggtggtttttttgtttgcaagcagcagattacgcgcagaaaaaaaggatctcaagaagatcctttgatcttttctacggggtctgacgctcagtggaacgaaaactcacgttaagggattttggtcatgagattatcaaaaaggatcttcacctagatccttttaaattaaaaatgaagttttaaatcaatctaaagtatatatgagtaaacttggtctgacagttaccaatgcttaatcagtgaggcacctatctcagcgatctgtctatttcgttcatccatagttgcctgactccccgtcgtgtagataactacgatacgggagggcttaccatctggccccagtgctgcaatgataccgcgagacccacgctcaccggctccagatttatcagcaataaaccagccagccggaagggccgagcgcagaagtggtcctgcaactttatccgcctccatccagtctattaattgttgccgggaagctagagtaagtagttcgccagttaatagtttgcgcaacgttgttgccattgctacaggcatcgtggtgtcacgctcgtcgtttggtatggcttcattcagctccggttcccaacgatcaaggcgagttacatgatcccccatgttgtgcaaaaaagcggttagctccttcggtcctccgatcgttgtcagaagtaagttggccgcagtgttatcactcatggttatggcagcactgcataattctcttactgtcatgccatccgtaagatgcttttctgtgactggtgagtactcaaccaagtcattctgagaatagtgtatgcggcgaccgagttgctcttgcccggcgtcaatacgggataataccgcgccacatagcagaactttaaaagtgctcatcattggaaaacgttcttcggggcgaaaactctcaaggatcttaccgctgttgagatccagttcgatgtaacccactcgtgcacccaactgatcttcagcatcttttactttcaccagcgtttctgggtgagcaaaaacaggaaggcaaaatgccgcaaaaaagggaataagggcgacacggaaatgttgaatactcatactcttcctttttcaatattattgaagcatttatcagggttattgtctcatgagcggatacatatttgaatgtatttagaaaaataaacaaataggggttccgcgcacatttccccgaaaagtgccacctgacgtctaagaaaccattattatcatgacattaacctataaaaataggcgtatcacgaggccctttcgtctcgcgcgtttcggtgatgacggtgaaaacctctgacacatgcagctcccggagacggtcacagcttgtctgtaagcggatgccgggagcagacaagcccgtcagggcgcgtcagcgggtgttggcgggtgtcggggctggcttaactatgcggcatcagagcagattgtactgagagtgcaccatatgcggtgtgaaataccgcacagatgcgtaaggagaaaataccgcatcaggcgccattcgccattcaggctgcgcaactgttgggaagggcgatcggtgcgggcctcttcgctattacgccagctggcgaaagggggatgtgctgcaaggcgattaagttgggtaacgccagggttttcccagtcacgacgttgtaaaacgacggcgcaaggaatggtgcatgcaaggagatggcgcccaacagtcccccggccacggggcctgccaccatacccacgccgaaacaagcgctcatgagcccgaagtggcgagcccgatcttccccatcggtgatgtcggcgatataggcgccagcaaccgcacctgtggcgccggtgatgccggccacgatgcgtccggcgtagaggcgattagtccaatttgttaaagacaggatatcagtggtccaggctctagttttgactcaacaatatcaccagctgaagcctatagagtacgagccatagataaaataaaagattttatttagtctccagaaaaaggggggaa

SEQ ID NO: 10 - DNA, 6884 bp, Artificial Sequence
  Synthetic Polynucleotide
tgaaagaccccacctgtaggtttggcaagctagcttaagtaacgccattttgcaaggcatggaaaatacataactgagaatagagaagttcagatcaaggttaggaacagagagacagcagaatatgggccaaacaggatatctgtggtaagcagttcctgccccggctcagggccaagaacagatggtccccagatgcggtcccgccctcagcagtttctagagaaccatcagatgtttccagggtgccccaaggacctgaaatgaccctgtgccttatttgaactaaccaatcagttcgcttctcgcttctgttcgcgcgcttctgctccccgagctcaataaaagagcccacaacccctcactcggcgcgccagtcctccgatagactgcgtcgcccgggtacccgtattcccaataaagcctcttgctgtttgcatccgaatcgtggactcgctgatccttgggagggtctcctcagattgattgactgcccacctcgggggtctttcatttggaggttccaccgagatttggagacccctgcccagggaccaccgacccccccgccgggaggtaagctggccagcggtcgtttcgtgtctgtctctgtctttgtgcgtgtttgtgccggcatctaatgtttgcgcctgcgtctgtactagttagctaactagctctgtatctggcggacccgtggtggaactgacgagttctgaacacccggccgcaaccctgggagacgtcccagggactttgggggccgtttttgtggcccgacctgaggaagggagtcgatgtggaatccgaccccgtcaggatatgtggttctggtaggagacgagaacctaaaacagttcccgcctccgtctgaatttttgctttcggtttggaaccgaagccgcgcgtcttgtctgctgcagcgctgcagcatcgttctgtgttgtctctgtctgactgtgtttctgtatttgtctgaaaattagggccagactgttaccactcccttaagtttgaccttaggtcactggaaagatgtcgagcggatcgctcacaaccagtcggtagatgtcaagaagagacgttgggttaccttctgctctgcagaatggccaacctttaacgtcggatggccgcgagacggcacctttaaccgagacctcatcacccaggttaagatcaaggtcttttcacctggcccgcatggacacccagaccaggtcccctacatcgtgacctgggaagccttggcttttgacccccctccctgggtcaagccctttgtacaccctaagcctccgcctcctcttcctccatccgccccgtctctcccccttgaacctcctcgttcgaccccgcctcgatcctccctttatccagccctcactccttctctaggcgccggaattagatccccaccatgaagcccaccgagaacaacgaagacttcaacatcgtggccgtggccagcaacttcgcgaccacggatctcgatgctgaccgcgggaagttgcccggcaagaagctgccgctggaggtgctcaaagagatggaagccaatgcccggaaagctggctgcaccaggggctgtctgatctgcctgtcccacatcaagtgcacgcccaagatgaagaagttcatcccaggacgctgccacacctacgaaggcgacaaagagtccgcacagggcggcataggcgaggcgatcgtcgacattcctgagattcctgggttcaaggacttggagcccatggagcagttcatcgcacaggtcgatctgtgtgtggactgcacaactggctgcctcaaagggcttgccaacgtgcagtgttctgacctgctcaagaagtggctgccgcaacgctgtgcgacctttgccagcaagatccagggccaggtggacaagatcaagggggccggtggtgacctcgagaccgatttctacccctacgatgtgcccgattacgcttagtctagagggccctattctatagtgtcacctaagtcgaggttaacgaattctaccgggtaggggaggcgcttttcccaaggcagtctggagcatgcgctttagcagccccgctgggcacttggcgctacacaagtggcctctggcctcgcacacattccacatccaccggtaggcgccaaccggctccgttctttggtggccccttcgcgccaccttctactcctcccctagtcaggaagttcccccccgccccgcagctcgcgtcgtgcaggacgtgacaaatggaagtagcacgtctcactagtctcgtgcagatggacagcaccgctgagcaatggaagcgggtaggcctttggggcagcggccaatagcagctttgctccttcgctttctgggctcagaggctgggaaggggtgggtccgggggcgggctcaggggcgggctcaggggcggggcgggcgcccgaaggtcctccggaggcccggcattctgcacgcttcaaaagcgcacgtctgccgcgctgttctcctcttcctcatctccgggcctttcgacctgcagcccaagcttaccatgaccgagtacaagcccacggtgcgcctcgccacccgcgacgacgtccccagggccgtacgcaccctcgccgccgcgttcgccgactaccccgccacgcgccacaccgtcgatccggaccgccacatcgagcgggtcaccgagctgcaagaactcttcctcacgcgcgtcgggctcgacatcggcaaggtgtgggtcgcggacgacggcgccgcggtggcggtctggaccacgccggagagcgtcgaagcgggggcggtgttcgccgagatcggcccgcgcatggccgagttgagcggttcccggctggccgcgcagcaacagatggaaggcctcctggcgccgcaccggcccaaggagcccgcgtggttcctggccaccgtcggcgtctcgcccgaccaccagggcaagggtctgggcagcgccgtcgtgctccccggagtggaggcggccgagcgcgccggggtgcccgccttcctggagacctccgcgccccgcaacctccccttctacgagcggctcggcttcaccgtcaccgccgacgtcgaggtgcccgaaggaccgcgcacctggtgcatgacccgcaagcccggtgcctgacgcccgccccacgacccgcagcgcccgaccgaaaggagcgcacgaccccatgcatcgataaaataaaagattttatttagtctccagaaaaaggggggaatgaaagaccccacctgtaggtttggcaagctagcttaagtaacgccattttgcaaggcatggaaaatacataactgagaatagagaagttcagatcaaggttaggaacagagagacagcagaatatgggccaaacaggatatctgtggtaagcagttcctgccccggctcagggccaagaacagatggtccccagatgcggtcccgccctcagcagtttctagagaaccatcagatgtttccagggtgccccaaggacctgaaatgaccctgtgccttatttgaactaaccaatcagttcgcttctcgcttctgttcgcgcgcttctgctccccgagctcaataaaagagcccacaacccctcactcggcgcgccagtcctccgatagactgcgtcgcccgggtacccgtgtatccaataaaccctcttgcagttgcatccgacttgtggtctcgctgttccttgggagggtctcctctgagtgattgactacccgtcagcgggggtctttcatgggtaacagtttcttgaagttggagaacaacattctgagggtaggagtcgaatattaagtaatcctgactcaattagccactgttttgaatccacatactccaatactcctgaaatagttcattatggacagcgcagaagagctggggagaattaattcgtaatcatggtcatagctgtttcctgtgtgaaattgttatccgctcacaattccacacaacatacgagccggaagcataaagtgtaaagcctggggtgcctaatgagtgagctaactcacattaattgcgttgcgctcactgcccgctttccagtcgggaaacctgtcgtgccagctgcattaatgaatcggccaacgcgcggggagaggcggtttgcgtattgggcgctcttccgcttcctcgctcactgactcgctgcgctcggtcgttcggctgcggcgagcggtatcagctcactcaaaggcggtaatacggttatccacagaatcaggggataacgcaggaaagaacatgtgagcaaaaggccagcaaaaggccaggaaccgtaaaaaggccgcgttgctggcgtttttccataggctccgcccccctgacgagcatcacaaaaatcgacgctcaagtcagaggtggcgaaacccgacaggactataaagataccaggcgtttccccctggaagctccctcgtgcgctctcctgttccgaccctgccgcttaccggatacctgtccgcctttctcccttcgggaagcgtggcgctttctcatagctcacgctgtaggtatctcagttcggtgtaggtcgttcgctccaagctgggctgtgtgcacgaaccccccgttcagcccgaccgctgcgccttatccggtaactatcgtcttgagtccaacccggtaagacacgacttatcgccactggcagcagccactggtaacaggattagcagagcgaggtatgtaggcggtgctacagagttcttgaagtggtggcctaactacggctacactagaaggacagtatttggtatctgcgctctgctgaagccagttaccttcggaaaaagagttggtagctcttgatccggcaaacaaaccaccgctggtagcggtggtttttttgtttgcaagcagcagattacgcgcagaaaaaaaggatctcaagaagatcctttgatcttttctacggggtctgacgctcagtggaacgaaaactcacgttaagggattttggtcatgagattatcaaaaaggatcttcacctagatccttttaaattaaaaatgaagttttaaatcaatctaaagtatatatgagtaaacttggtctgacagttaccaatgcttaatcagtgaggcacctatctcagcgatctgtctatttcgttcatccatagttgcctgactccccgtcgtgtagataactacgatacgggagggcttaccatctggccccagtgctgcaatgataccgcgagacccacgctcaccggctccagatttatcagcaataaaccagccagccggaagggccgagcgcagaagtggtcctgcaactttatccgcctccatccagtctattaattgttgccgggaagctagagtaagtagttcgccagttaatagtttgcgcaacgttgttgccattgctacaggcatcgtggtgtcacgctcgtcgtttggtatggcttcattcagctccggttcccaacgatcaaggcgagttacatgatcccccatgttgtgcaaaaaagcggttagctccttcggtcctccgatcgttgtcagaagtaagttggccgcagtgttatcactcatggttatggcagcactgcataattctcttactgtcatgccatccgtaagatgcttttctgtgactggtgagtactcaaccaagtcattctgagaatagtgtatgcggcgaccgagttgctcttgcccggcgtcaatacgggataataccgcgccacatagcagaactttaaaagtgctcatcattggaaaacgttcttcggggcgaaaactctcaaggatcttaccgctgttgagatccagttcgatgtaacccactcgtgcacccaactgatcttcagcatcttttactttcaccagcgtttctgggtgagcaaaaacaggaaggcaaaatgccgcaaaaaagggaataagggcgacacggaaatgttgaatactcatactcttcctttttcaatattattgaagcatttatcagggttattgtctcatgagcggatacatatttgaatgtatttagaaaaataaacaaataggggttccgcgcacatttccccgaaaagtgccacctgacgtctaagaaaccattattatcatgacattaacctataaaaataggcgtatcacgaggccctttcgtctcgcgcgtttcggtgatgacggtgaaaacctctgacacatgcagctcccggagacggtcacagcttgtctgtaagcggatgccgggagcagacaagcccgtcagggcgcgtcagcgggtgttggcgggtgtcggggctggcttaactatgcggcatcagagcagattgtactgagagtgcaccatatgcggtgtgaaataccgcacagatgcgtaaggagaaaataccgcatcaggcgccattcgccattcaggctgcgcaactgttgggaagggcgatcggtgcgggcctcttcgctattacgccagctggcgaaagggggatgtgctgcaaggcgattaagttgggtaacgccagggttttcccagtcacgacgttgtaaaacgacggcgcaaggaatggtgcatgcaaggagatggcgcccaacagtcccccggccacggggcctgccaccatacccacgccgaaacaagcgctcatgagcccgaagtggcgagcccgatcttccccatcggtgatgtcggcgatataggcgccagcaaccgcacctgtggcgccggtgatgccggccacgatgcgtccggcgtagaggcgattagtccaatttgttaaagacaggatatcagtggtccaggctctagttttgactcaacaatatcaccagctgaagcctatagagtacgagccatagataaaataaaagattttatttagtctccagaaaaaggggggaa

SEQ ID NO: 11 - DNA, 7512 bp, Artificial Sequence
  Synthetic Polynucleotide
aatgtagtcttatgcaatactcttgtagtcttgcaacatggtaacgatgagttagcaacatgccttacaaggagagaaaaagcaccgtgcatgccgattggtggaagtaaggtggtacgatcgtgccttattaggaaggcaacagacgggtctgacatggattggacgaaccactgaattgccgcattgcagagatattgtatttaagtgcctagctcgatacataaacgggtctctctggttagaccagatctgagcctgggagctctctggctaactagggaacccactgcttaagcctcaataaagcttgccttgagtgcttcaagtagtgtgtgcccgtctgttgtgtgactctggtaactagagatccctcagacccttttagtcagtgtggaaaatctctagcagtggcgcccgaacagggacttgaaagcgaaagggaaaccagaggagctctctcgacgcaggactcggcttgctgaagcgcgcacggcaagaggcgaggggcggcgactggtgagtacgccaaaaattttgactagcggaggctagaaggagagagatgggtgcgagagcgtcagtattaagcgggggagaattagatcgcgatgggaaaaaattcggttaaggccagggggaaagaaaaaatataaattaaaacatatagtatgggcaagcagggagctagaacgattcgcagttaatcctggcctgttagaaacatcagaaggctgtagacaaatactgggacagctacaaccatcccttcagacaggatcagaagaacttagatcattatataatacagtagcaaccctctattgtgtgcatcaaaggatagagataaaagacaccaaggaagctttagacaagatagaggaagagcaaaacaaaagtaagaccaccgcacagcaagcggccgctgatcttcagacctggaggaggagatatgagggacaattggagaagtgaattatataaatataaagtagtaaaaattgaaccattaggagtagcacccaccaaggcaaagagaagagtggtgcagagagaaaaaagagcagtgggaataggagctttgttccttgggttcttgggagcagcaggaagcactatgggcgcagcgtcaatgacgctgacggtacaggccagacaattattgtctggtatagtgcagcagcagaacaatttgctgagggctattgaggcgcaacagcatctgttgcaactcacagtctggggcatcaagcagctccaggcaagaatcctggctgtggaaagatacctaaaggatcaacagctcctggggatttggggttgctctggaaaactcatttgcaccactgctgtgccttggaatgctagttggagtaataaatctctggaacagatttggaatcacacgacctggatggagtgggacagagaaattaacaattacacaagcttaatacactccttaattgaagaatcgcaaaaccagcaagaaaagaatgaacaagaattattggaattagataaatgggcaagtttgtggaattggtttaacataacaaattggctgtggtatataaaattattcataatgatagtaggaggcttggtaggtttaagaatagtttttgctgtactttctatagtgaatagagttaggcagggatattcaccattatcgtttcagacccacctcccaaccccgaggggacccgacaggcccgaaggaatagaagaagaaggtggagagagagacagagacagatccattcgattagtgaacggatctcgacggtatcgataagcttgggagttccgcgttacataacttacggtaaatggcccgcctggctgaccgcccaacgacccccgcccattgacgtcaataatgacgtatgttcccatagtaacgccaatagggactttccattgacgtcaatgggtggagtatttacggtaaactgcccacttggcagtacatcaagtgtatcatatgccaagtacgccccctattgacgtcaatgacggtaaatggcccgcctggcattatgcccagtacatgaccttatgggactttcctacttggcagtacatctacgtattagtcatcgctattaccatggtgatgcggttttggcagtacatcaatgggcgtggatagcggtttgactcacggggatttccaagtctccaccccattgacgtcaatgggagtttgttttggcaccaaaatcaacgggactttccaaaatgtcgtaacaactccgccccattgacgcaaatgggcggtaggcgtgtacggtgggaggtctatataagcagagctcgtttagtgaaccgtcagatcgcctggagacgccatccacgctgttttgacctccatagaagacaccgactctagaggatccccaccatggtcttcacactcgaagatttcgttggggactggcgacagacagccggctacaacctggaccaagtccttgaacagggaggtgtgtccagtttgtttcagaatctcggggtgtccgtaactccgatccaaaggattgtcctgagcggtgaaaatgggctgaagatcgacatccatgtcatcatcccgtatgaaggtctgagcggcgaccaaatgggccagatcgaaaaaatttttaaggtggtgtaccctgtggatgatcatcactttaaggtgatcctgcactatggcacactggtaatcgacggggttacgccgaacatgatcgactatttcggacggccctatgaaggcatcgccgtgttcgacggcaaaaagatcactgtaacagggaccctgtggaacggcaacaaaattatcgacgagcgcctgatcaaccccgacggctccctgctgttccgagtaaccatcaacggagtgaccggctggcggctgtgcgaacgcattctggcgagttggaaggatgcctctggatggtcttaagtcgagaccgatttctacccctacgatgtgcccgattacgcttagtctagagggcccgcggttcgaaggtaagcctatccctaaccctctcctcggtctcgattctacgcgtaccggttagtaatgagtttggaattaattctgtggaatgtgtgtcagttagggtgtggaaagtccccaggctccccaggcaggcagaagtatgcaaagcatgcatctcaattagtcagcaaccaggtgtggaaagtccccaggctccccagcaggcagaagtatgcaaagcatgcatctcaattagtcagcaaccatagtcccgcccctaactccgcccatcccgcccctaactccgcccagttccgcccattctccgccccatggctgactaattttttttatttatgcagaggccgaggccgcctctgcctctgagctattccagaagtagtgaggaggcttttttggaggcctaggcttttgcaaaaagctcccgggagcttgtatatccattttcggatctgatcagcacgtgttgacaattaatcatcggcatagtatatcggcatagtataatacgacaaggtgaggaactaaaccatggccaagcctttgtctcaagaagaatccaccctcattgaaagagcaacggctacaatcaacagcatccccatctctgaagactacagcgtcgccagcgcagctctctctagcgacggccgcatcttcactggtgtcaatgtatatcattttactgggggaccttgtgcagaactcgtggtgctgggcactgctgctgctgcggcagctggcaacctgacttgtatcgtcgcgatcggaaatgagaacaggggcatcttgagcccctgcggacggtgccgacaggtgcttctcgatctgcatcctgggatcaaagccatagtgaaggacagtgatggacagccgacggcagttgggattcgtgaattgctgccctctggttatgtgtgggagggctaagcacaattcgagctcggtacctttaagaccaatgacttacaaggcagctgtagatcttagccactttttaaaagaaaaggggggactggaagggctaattcactcccaacgaagacaagatctgctttttgcttgtactgggtctctctggttagaccagatctgagcctgggagctctctggctaactagggaacccactgcttaagcctcaataaagcttgccttgagtgcttcaagtagtgtgtgcccgtctgttgtgtgactctggtaactagagatccctcagacccttttagtcagtgtggaaaatctctagcagtagtagttcatgtcatcttattattcagtatttataacttgcaaagaaatgaatatcagagagtgagaggaacttgtttattgcagcttataatggttacaaataaagcaatagcatcacaaatttcacaaataaagcatttttttcactgcattctagttgtggtttgtccaaactcatcaatgtatcttatcatgtctggctctagctatcccgcccctaactccgcccatcccgcccctaactccgcccagttccgcccattctccgccccatggctgactaattttttttatttatgcagaggccgaggccgcctcggcctctgagctattccagaagtagtgaggaggcttttttggaggcctagggacgtacccaattcgccctatagtgagtcgtattacgcgcgctcactggccgtcgttttacaacgtcgtgactgggaaaaccctggcgttacccaacttaatcgccttgcagcacatccccctttcgccagctggcgtaatagcgaagaggcccgcaccgatcgcccttcccaacagttgcgcagcctgaatggcgaatgggacgcgccctgtagcggcgcattaagcgcggcgggtgtggtggttacgcgcagcgtgaccgctacacttgccagcgccctagcgcccgctcctttcgctttcttcccttcctttctcgccacgttcgccggctttccccgtcaagctctaaatcgggggctccctttagggttccgatttagtgctttacggcacctcgaccccaaaaaacttgattagggtgatggttcacgtagtgggccatcgccctgatagacggtttttcgccctttgacgttggagtccacgttctttaatagtggactcttgttccaaactggaacaacactcaaccctatctcggtctattcttttgatttataagggattttgccgatttcggcctattggttaaaaaatgagctgatttaacaaaaatttaacgcgaattttaacaaaatattaacgcttacaatttaggtggcacttttcggggaaatgtgcgcggaacccctatttgtttatttttctaaatacattcaaatatgtatccgctcatgagacaataaccctgataaatgcttcaataatattgaaaaaggaagagtatgagtattcaacatttccgtgtcgcccttattcccttttttgcggcattttgccttcctgtttttgctcacccagaaacgctggtgaaagtaaaagatgctgaagatcagttgggtgcacgagtgggttacatcgaactggatctcaacagcggtaagatccttgagagttttcgccccgaagaacgttttccaatgatgagcacttttaaagttctgctatgtggcgcggtattatcccgtattgacgccgggcaagagcaactcggtcgccgcatacactattctcagaatgacttggttgagtactcaccagtcacagaaaagcatcttacggatggcatgacagtaagagaattatgcagtgctgccataaccatgagtgataacactgcggccaacttacttctgacaacgatcggaggaccgaaggagctaaccgcttttttgcacaacatgggggatcatgtaactcgccttgatcgttgggaaccggagctgaatgaagccataccaaacgacgagcgtgacaccacgatgcctgtagcaatggcaacaacgttgcgcaaactattaactggcgaactacttactctagcttcccggcaacaattaatagactggatggaggcggataaagttgcaggaccacttctgcgctcggcccttccggctggctggtttattgctgataaatctggagccggtgagcgtgggtctcgcggtatcattgcagcactggggccagatggtaagccctcccgtatcgtagttatctacacgacggggagtcaggcaactatggatgaacgaaatagacagatcgctgagataggtgcctcactgattaagcattggtaactgtcagaccaagtttactcatatatactttagattgatttaaaacttcatttttaatttaaaaggatctaggtgaagatcctttttgataatctcatgaccaaaatcccttaacgtgagttttcgttccactgagcgtcagaccccgtagaaaagatcaaaggatcttcttgagatcctttttttctgcgcgtaatctgctgcttgcaaacaaaaaaaccaccgctaccagcggtggtttgtttgccggatcaagagctaccaactctttttccgaaggtaactggcttcagcagagcgcagataccaaatactgttcttctagtgtagccgtagttaggccaccacttcaagaactctgtagcaccgcctacatacctcgctctgctaatcctgttaccagtggctgctgccagtggcgataagtcgtgtcttaccgggttggactcaagacgatagttaccggataaggcgcagcggtcgggctgaacggggggttcgtgcacacagcccagcttggagcgaacgacctacaccgaactgagatacctacagcgtgagctatgagaaagcgccacgcttcccgaagggagaaaggcggacaggtatccggtaagcggcagggtcggaacaggagagcgcacgagggagcttccagggggaaacgcctggtatctttatagtcctgtcgggtttcgccacctctgacttgagcgtcgatttttgtgatgctcgtcaggggggcggagcctatggaaaaacgccagcaacgcggcctttttacggttcctggccttttgctggccttttgctcacatgttctttcctgcgttatcccctgattctgtggataaccgtattaccgcctttgagtgagctgataccgctcgccgcagccgaacgaccgagcgcagcgagtcagtgagcgaggaagcggaagagcgcccaatacgcaaaccgcctctccccgcgcgttggccgattcattaatgcagctggcacgacaggtttcccgactggaaagcgggcagtgagcgcaacgcaattaatgtgagttagctcactcattaggcaccccaggctttacactttatgcttccggctcgtatgttgtgtggaattgtgagcggataacaatttcacacaggaaacagctatgaccatgattacgccaagcgcgcaattaaccctcactaaagggaacaaaagctggagctgcaagctt

SEQ ID NO: 12 - DNA, 7476 bp, Artificial Sequence
  Synthetic Polynucleotide
aatgtagtcttatgcaatactcttgtagtcttgcaacatggtaacgatgagttagcaacatgccttacaaggagagaaaaagcaccgtgcatgccgattggtggaagtaaggtggtacgatcgtgccttattaggaaggcaacagacgggtctgacatggattggacgaaccactgaattgccgcattgcagagatattgtatttaagtgcctagctcgatacataaacgggtctctctggttagaccagatctgagcctgggagctctctggctaactagggaacccactgcttaagcctcaataaagcttgccttgagtgcttcaagtagtgtgtgcccgtctgttgtgtgactctggtaactagagatccctcagacccttttagtcagtgtggaaaatctctagcagtggcgcccgaacagggacttgaaagcgaaagggaaaccagaggagctctctcgacgcaggactcggcttgctgaagcgcgcacggcaagaggcgaggggcggcgactggtgagtacgccaaaaattttgactagcggaggctagaaggagagagatgggtgcgagagcgtcagtattaagcgggggagaattagatcgcgatgggaaaaaattcggttaaggccagggggaaagaaaaaatataaattaaaacatatagtatgggcaagcagggagctagaacgattcgcagttaatcctggcctgttagaaacatcagaaggctgtagacaaatactgggacagctacaaccatcccttcagacaggatcagaagaacttagatcattatataatacagtagcaaccctctattgtgtgcatcaaaggatagagataaaagacaccaaggaagctttagacaagatagaggaagagcaaaacaaaagtaagaccaccgcacagcaagcggccgctgatcttcagacctggaggaggagatatgagggacaattggagaagtgaattatataaatataaagtagtaaaaattgaaccattaggagtagcacccaccaaggcaaagagaagagtggtgcagagagaaaaaagagcagtgggaataggagctttgttccttgggttcttgggagcagcaggaagcactatgggcgcagcgtcaatgacgctgacggtacaggccagacaattattgtctggtatagtgcagcagcagaacaatttgctgagggctattgaggcgcaacagcatctgttgcaactcacagtctggggcatcaagcagctccaggcaagaatcctggctgtggaaagatacctaaaggatcaacagctcctggggatttggggttgctctggaaaactcatttgcaccactgctgtgccttggaatgctagttggagtaataaatctctggaacagatttggaatcacacgacctggatggagtgggacagagaaattaacaattacacaagcttaatacactccttaattgaagaatcgcaaaaccagcaagaaaagaatgaacaagaattattggaattagataaatgggcaagtttgtggaattggtttaacataacaaattggctgtggtatataaaattattcataatgatagtaggaggcttggtaggtttaagaatagtttttgctgtactttctatagtgaatagagttaggcagggatattcaccattatcgtttcagacccacctcccaaccccgaggggacccgacaggcccgaaggaatagaagaagaaggtggagagagagacagagacagatccattcgattagtgaacggatctcgacggtatcgataagcttgggagttccgcgttacataacttacggtaaatggcccgcctggctgaccgcccaacgacccccgcccattgacgtcaataatgacgtatgttcccatagtaacgccaatagggactttccattgacgtcaatgggtggagtatttacggtaaactgcccacttggcagtacatcaagtgtatcatatgccaagtacgccccctattgacgtcaatgacggtaaatggcccgcctggcattatgcccagtacatgaccttatgggactttcctacttggcagtacatctacgtattagtcatcgctattaccatggtgatgcggttttggcagtacatcaatgggcgtggatagcggtttgactcacggggatttccaagtctccaccccattgacgtcaatgggagtttgttttggcaccaaaatcaacgggactttccaaaatgtcgtaacaactccgccccattgacgcaaatgggcggtaggcgtgtacggtgggaggtctatataagcagagctcgtttagtgaaccgtcagatcgcctggagacgccatccacgctgttttgacctccatagaagacaccgactctagaggatccccaccatgaagcccaccgagaacaacgaagacttcaacatcgtggccgtggccagcaacttcgcgaccacggatctcgatgctgaccgcgggaagttgcccggcaagaagctgccgctggaggtgctcaaagagatggaagccaatgcccggaaagctggctgcaccaggggctgtctgatctgcctgtcccacatcaagtgcacgcccaagatgaagaagttcatcccaggacgctgccacacctacgaaggcgacaaagagtccgcacagggcggcataggcgaggcgatcgtcgacattcctgagattcctgggttcaaggacttggagcccatggagcagttcatcgcacaggtcgatctgtgtgtggactgcacaactggctgcctcaaagggcttgccaacgtgcagtgttctgacctgctcaagaagtggctgccgcaacgctgtgcgacctttgccagcaagatccagggccaggtggacaagatcaagggggccggtggtgacctcgagaccgatttctacgactacaaggacgacgatgacaagtagtctagagggcccgcggttcgaaggtaagcctatccctaaccctctcctcggtctcgattctacgcgtaccggttagtaatgagtttggaattaattctgtggaatgtgtgtcagttagggtgtggaaagtccccaggctccccaggcaggcagaagtatgcaaagcatgcatctcaattagtcagcaaccaggtgtggaaagtccccaggctccccagcaggcagaagtatgcaaagcatgcatctcaattagtcagcaaccatagtcccgcccctaactccgcccatcccgcccctaactccgcccagttccgcccattctccgccccatggctgactaattttttttatttatgcagaggccgaggccgcctctgcctctgagctattccagaagtagtgaggaggcttttttggaggcctaggcttttgcaaaaagctcccgggagcttgtatatccattttcggatctgatcagcacgtgttgacaattaatcatcggcatagtatatcggcatagtataatacgacaaggtgaggaactaaaccatggccaagcctttgtctcaagaagaatccaccctcattgaaagagcaacggctacaatcaacagcatccccatctctgaagactacagcgtcgccagcgcagctctctctagcgacggccgcatcttcactggtgtcaatgtatatcattttactgggggaccttgtgcagaactcgtggtgctgggcactgctgctgctgcggcagctggcaacctgacttgtatcgtcgcgatcggaaatgagaacaggggcatcttgagcccctgcggacggtgccgacaggtgcttctcgatctgcatcctgggatcaaagccatagtgaaggacagtgatggacagccgacggcagttgggattcgtgaattgctgccctctggttatgtgtgggagggctaagcacaattcgagctcggtacctttaagaccaatgacttacaaggcagctgtagatcttagccactttttaaaagaaaaggggggactggaagggctaattcactcccaacgaagacaagatctgctttttgcttgtactgggtctctctggttagaccagatctgagcctgggagctctctggctaactagggaacccactgcttaagcctcaataaagcttgccttgagtgcttcaagtagtgtgtgcccgtctgttgtgtgactctggtaactagagatccctcagacccttttagtcagtgtggaaaatctctagcagtagtagttcatgtcatcttattattcagtatttataacttgcaaagaaatgaatatcagagagtgagaggaacttgtttattgcagcttataatggttacaaataaagcaatagcatcacaaatttcacaaataaagcatttttttcactgcattctagttgtggtttgtccaaactcatcaatgtatcttatcatgtctggctctagctatcccgcccctaactccgcccatcccgcccctaactccgcccagttccgcccattctccgccccatggctgactaattttttttatttatgcagaggccgaggccgcctcggcctctgagctattccagaagtagtgaggaggcttttttggaggcctagggacgtacccaattcgccctatagtgagtcgtattacgcgcgctcactggccgtcgttttacaacgtcgtgactgggaaaaccctggcgttacccaacttaatcgccttgcagcacatccccctttcgccagctggcgtaatagcgaagaggcccgcaccgatcgcccttcccaacagttgcgcagcctgaatggcgaatgggacgcgccctgtagcggcgcattaagcgcggcgggtgtggtggttacgcgcagcgtgaccgctacacttgccagcgccctagcgcccgctcctttcgctttcttcccttcctttctcgccacgttcgccggctttccccgtcaagctctaaatcgggggctccctttagggttccgatttagtgctttacggcacctcgaccccaaaaaacttgattagggtgatggttcacgtagtgggccatcgccctgatagacggtttttcgccctttgacgttggagtccacgttctttaatagtggactcttgttccaaactggaacaacactcaaccctatctcggtctattcttttgatttataagggattttgccgatttcggcctattggttaaaaaatgagctgatttaacaaaaatttaacgcgaattttaacaaaatattaacgcttacaatttaggtggcacttttcggggaaatgtgcgcggaacccctatttgtttatttttctaaatacattcaaatatgtatccgctcatgagacaataaccctgataaatgcttcaataatattgaaaaaggaagagtatgagtattcaacatttccgtgtcgcccttattcccttttttgcggcattttgccttcctgtttttgctcacccagaaacgctggtgaaagtaaaagatgctgaagatcagttgggtgcacgagtgggttacatcgaactggatctcaacagcggtaagatccttgagagttttcgccccgaagaacgttttccaatgatgagcacttttaaagttctgctatgtggcgcggtattatcccgtattgacgccgggcaagagcaactcggtcgccgcatacactattctcagaatgacttggttgagtactcaccagtcacagaaaagcatcttacggatggcatgacagtaagagaattatgcagtgctgccataaccatgagtgataacactgcggccaacttacttctgacaacgatcggaggaccgaaggagctaaccgcttttttgcacaacatgggggatcatgtaactcgccttgatcgttgggaaccggagctgaatgaagccataccaaacgacgagcgtgacaccacgatgcctgtagcaatggcaacaacgttgcgcaaactattaactggcgaactacttactctagcttcccggcaacaattaatagactggatggaggcggataaagttgcaggaccacttctgcgctcggcccttccggctggctggtttattgctgataaatctggagccggtgagcgtgggtctcgcggtatcattgcagcactggggccagatggtaagccctcccgtatcgtagttatctacacgacggggagtcaggcaactatggatgaacgaaatagacagatcgctgagataggtgcctcactgattaagcattggtaactgtcagaccaagtttactcatatatactttagattgatttaaaacttcatttttaatttaaaaggatctaggtgaagatcctttttgataatctcatgaccaaaatcccttaacgtgagttttcgttccactgagcgtcagaccccgtagaaaagatcaaaggatcttcttgagatcctttttttctgcgcgtaatctgctgcttgcaaacaaaaaaaccaccgctaccagcggtggtttgtttgccggatcaagagctaccaactctttttccgaaggtaactggcttcagcagagcgcagataccaaatactgttcttctagtgtagccgtagttaggccaccacttcaagaactctgtagcaccgcctacatacctcgctctgctaatcctgttaccagtggctgctgccagtggcgataagtcgtgtcttaccgggttggactcaagacgatagttaccggataaggcgcagcggtcgggctgaacggggggttcgtgcacacagcccagcttggagcgaacgacctacaccgaactgagatacctacagcgtgagctatgagaaagcgccacgcttcccgaagggagaaaggcggacaggtatccggtaagcggcagggtcggaacaggagagcgcacgagggagcttccagggggaaacgcctggtatctttatagtcctgtcgggtttcgccacctctgacttgagcgtcgatttttgtgatgctcgtcaggggggcggagcctatggaaaaacgccagcaacgcggcctttttacggttcctggccttttgctggccttttgctcacatgttctttcctgcgttatcccctgattctgtggataaccgtattaccgcctttgagtgagctgataccgctcgccgcagccgaacgaccgagcgcagcgagtcagtgagcgaggaagcggaagagcgcccaatacgcaaaccgcctctccccgcgcgttggccgattcattaatgcagctggcacgacaggtttcccgactggaaagcgggcagtgagcgcaacgcaattaatgtgagttagctcactcattaggcaccccaggctttacactttatgcttccggctcgtatgttgtgtggaattgtgagcggataacaatttcacacaggaaacagctatgaccatgattacgccaagcgcgcaattaaccctcactaaagggaacaaaagctggagctgcaagctt

SEQ ID NO: 13 - DNA, 2000 bp, Artificial Sequence
  Synthetic Polynucleotide
aaaaaaaaaaaaaaaaaaaaaaaaaaaaaaaaaaaaaaaaaaaaaaaaaaaaaaaaaaaaaaaaaaaaaaaaaaaaaaaaaaaaaaaaaaaaaaaaaaaaaaaaaaaaaaaaaaaaaaaaaaaaaaaaaaaaaaaaaaaaaaaaaaaaaaaaaaaaaaaaaaaaaaaaaaaaaaaaaaaaaaaaaaaaaaaaaaaaaaaaaaaaaaaaaaaaaaaaaaaaaaaaaaaaaaaaaaaaaaaaaaaaaaaaaaaaaaaaaaaaaaaaaaaaaaaaaaaaaaaaaaaaaaaaaaaaaaaaaaaaaaaaaaaaaaaaaaaaaaaaaaaaaaaaaaaaaaaaaaaaaaaaaaaaaaaaaaaaaaaaaaaaaaaaaaaaaaaaaaaaaaaaaaaaaaaaaaaaaaaaaaaaaaaaaaaaaaaaaaaaaaaaaaaaaaaaaaaaaaaaaaaaaaaaaaaaaaaaaaaaaaaaaaaaaaaaaaaaaaaaaaaaaaaaaaaaaaaaaaaaaaaaaaaaaaaaaaaaaaaaaaaaaaaaaaaaaaaaaaaaaaaaaaaaaaaaaaaaaaaaaaaaaaaaaaaaaaaaaaaaaaaaaaaaaaaaaaaaaaaaaaaaaaaaaaaaaaaaaaaaaaaaaaaaaaaaaaaaaaaaaaaaaaaaaaaaaaaaaaaaaaaaaaaaaaaaaaaaaaaaaaaaaaaaaaaaaaaaaaaaaaaaaaaaaaaaaaaaaaaaaaaaaaaaaaaaaaaaaaaaaaaaaaaaaaaaaaaaaaaaaaaaaaaaaaaaaaaaaaaaaaaaaaaaaaaaaaaaaaaaaaaaaaaaaaaaaaaaaaaaaaaaaaaaaaaaaaaaaaaaaaaaaaaaaaaaaaaaaaaaaaaaaaaaaaaaaaaaaaaaaaaaaaaaaaaaaaaaaaaaaaaaaaaaaaaaaaaaaaaaaaaaaaaaaaaaaaaaaaaaaaaaaaaaaaaaaaaaaaaaaaaaaaaaaaaaaaaaaaaaaaaaaaaaaaaaaaaaaaaaaaaaaaaaaaaaaaaaaaaaaaaaaaaaaaaaaaaaaaaaaaaaaaaaaaaaaaaaaaaaaaaaaaaaaaaaaaaaaaaaaaaaaaaaaaaaaaaaaaaaaaaaaaaaaaaaaaaaaaaaaaaaaaaaaaaaaaaaaaaaaaaaaaaaaaaaaaaaaaaaaaaaaaaaaaaaaaaaaaaaaaaaaaaaaaaaaaaaaaaaaaaaaaaaaaaaaaaaaaaaaaaaaaaaaaaaaaaaaaaaaaaaaaaaaaaaaaaaaaaaaaaaaaaaaaaaaaaaaaaaaaaaaaaaaaaaaaaaaaaaaaaaaaaaaaaaaaaaaaaaaaaaaaaaaaaaaaaaaaaaaaaaaaaaaaaaaaaaaaaaaaaaaaaaaaaaaaaaaaaaaaaaaaaaaaaaaaaaaaaaaaaaaaaaaaaaaaaaaaaaaaaaaaaaaaaaaaaaaaaaaaaaaaaaaaaaaaaaaaaaaaaaaaaaaaaaaaaaaaaaaaaaaaaaaaaaaaaaaaaaaaaaaaaaaaaaaaaaaaaaaaaaaaaaaaaaaaaaaaaaaaaaaaaaaaaaaaaaaaaaaaaaaaaaaaaaaaaaaaaaaaaaaaaaaaaaaaaaaaaaaaaaaaaaaaaaaaaaaaaaaaaaaaaaaaaaaaaaaaaaaaaaaaaaaaaaaaaaaaaaaaaaaaaaaaaaaaaaaaaaaaaaaaaaaaaaaaaaaaaaaaaaaaaaaaaaaaaaaaaaaaaaaaaaaaaaaaaaaaaaaaaaaaaaaaaaaaaaaaaaaaaaaaaaaaaaaaaaaaaaaaaaaaaaaaaaaaaaaaaaaaaaaaaaaaaaaaaaaaaaaaaaaaaaaaaaaaaaaaaaaaaaaaaaaaaaaaaaaaaaaaaaaaaaaaaaaaaaaaaaaaaaaaaaaaaaaaaaaaaaaaaaaaaaaaaaaaaaaaaaaaaaaaaaaaaaaaaaaaaaaaaaaaaaaaaaaaaaaaaaaaaaaaaaaaaaaaaaaaaaaaaaaaaaaaaaaaaaaaaa

SEQ ID NO: 14 - DNA, 1358 bp, Artificial Sequence
  Synthetic Polynucleotide
aaaaaaaaaaaaaaaaaaaaaaaaaaaaaaaaaaaaaaaaaaaaaaaaaaaaaaaaaaaaaaaaaaaaaaaaaaaaaaaaaaaaaaaaaaaaaaaaaaaaaaaaaaaaaaaaaaaaaaaaaaaaaaaaaaaaaaaaaaaaaaaaaaaaaaaaaaaaaaaaaaaaaaaaaaaaaaaaaaaaaaaaaaaaaaaaaaaaaaaaaaaaaaaaaaaaaaaaaaaaaaaaaaaaaaaaaaaaaaaaaaaaaaaaaaaaaaaaaaaaaaaaaaaaaaaaaaaaaaaaaaaaaaaaaaaaaaaaaaaaaaaaaaaaaaaaaaaaaaaaaaaaaaaaaaaaaaaaaaaaaaaaaaaaaaaaaaaaaaaaaaaaaaaaaaaaaaaaaaaaaaaaaaaaaaaaaaaaaaaaaaaaaaaaaaaaaaaaaaaaaaaaaaaaaaaaaaaaaaaaaaaaaaaaaaaaaaaaaaaaaaaaaaaaaaaaaaaaaaaaaaaaaaaaaaaaaaaaaaaaaaaaaaaaaaaaaaaaaaaaaaaaaaaaaaaaaaaaaaaaaaaaaaaaaaaaaaaaaaaaaaaaaaaaaaaaaaaaaaaaaaaaaaaaaaaaaaaaaaaaaaaaaaaaaaaaaaaaaaaaaaaaaaaaaaaaaaaaaaaaaaaaaaaaaaaaaaaaaaaaaaaaaaaaaaaaaaaaaaaaaaaaaaaaaaaaaaaaaaaaaaaaaaaaaaaaaaaaaaaaaaaaaaaaaaaaaaaaaaaaaaaaaaaaaaaaaaaaaaaaaaaaaaaaaaaaaaaaaaaaaaaaaaaaaaaaaaaaaaaaaaaaaaaaaaaaaaaaaaaaaaaaaaaaaaaaaaaaaaaaaaaaaaaaaaaaaaaaaaaaaaaaaaaaaaaaaaaaaaaaaaaaaaaaaaaaaaaaaaaaaaaaaaaaaaaaaaaaaaaaaaaaaaaaaaaaaaaaaaaaaaaaaaaaaaaaaaaaaaaaaaaaaaaaaaaaaaaaaaaaaaaaaaaaaaaaaaaaaaaaaaaaaaaaaaaaaaaaaaaaaaaaaaaaaaaaaaaaaaaaaaaaaaaaaaaaaaaaaaaaaaaaaaaaaaaaaaaaaaaaaaaaaaaaaaaaaaaaaaaaaaaaaaaaaaaaaaaaaaaaaaaaaaaaaaaaaaaaaaaaaaaaaaaaaaaaaaaaaaaaaaaaaaaaaaaaaaaaaaaaaaaaaaaaaaaaaaaaaaaaaaaaaaaaaaaaaaaaaaaaaaaaaaaaaaaaaaaaaaaaaaaaaaaaaaaaaaaaaaaaaaaaaaaaaaaaaaaaaaaaaaaaaaaaaaaaaaaaaaaaaaaaaaaaaaaaaaaaaaaaaaaaaaaaaaaaaaaaaaaaaaaaaaaaaaaaaaaaaa

SEQ ID NO: 15 - DNA, 5016 bp, Artificial Sequence
  Synthetic Polynucleotide
tttttttttttttttttttttttttttttttttttttttttttttttttttttttttttttttttttttttttttttttttttttttttttttttttttttttttttttttttttttttttttttttttttttttttttttttttttttttttttttttttttttttttttttttttttttttttttttttttttttttttttttttttttttttttttttttttttttttttttttttttttttttttttttttttttttttttttttttttttttttttttttttttttttttttttttttttttttttttttttttttttttttttttttttttttttttttttttttttttttttttttttttttttttttttttttttttttttttttttttttttttttttttttttttttttttttttttttttttttttttttttttttttttttttttttttttttttttttttttttttttttttttttttttttttttttttttttttttttttttttttttttttttttttttttttttttttttttttttttttttttttttttttttttttttttttttttttttttttttttttttttttttttttttttttttttttttttttttttttttttttttttttttttttttttttttttttttttttttttttttttttttttttttttttttttttttttttttttttttttttttttttttttttttttttttttttttttttttttttttttttttttttttttttttttttttttttttttttttttttttttttttttttttttttttttttttttttttttttttttttttttttttttttttttttttttttttttttttttttttttttttttttttttttttttttttttttttttttttttttttttttttttttttttttttttttttttttttttttttttttttttttttttttttttttttttttttttttttttttttttttttttttttttttttttttttttttttttttttttttttttttttttttttttttttttttttttttttttttttttttttttttttttttttttttttttttttttttttttttttttttttttttttttttttttttttttttttttttttttttttttttttttttttttttttttttttttttttttttttttttttttttttttttttttttttttttttttttttttttttttttttttttttttttttttttttttttttttttttttttttttttttttttttttttttttttttttttttttttttttttttttttttttttttttttttttttttttttttttttttttttttttttttttttttttttttttttttttttttttttttttttttttttttttttttttttttttttttttttttttttttttttttttttttttttttttttttttttttttttttttttttttttttttttttttttttttttttttttttttttttttttttttttttttttttttttttttttttttttttttttttttttttttttttttttttttttttttttttttttttttttttttttttttttttttttttttttttttttttttttttttttttttttttttttttttttttttttttttttttttttttttttttttttttttttttttttttttttttttttttttttttttttttttttttttttttttttttttttttttttttttttttttttttttttttttttttttttttttttttttttttttttttttttttttttttttttttttttttttttttttttttttttttttttttttttttttttttttttttttttttttttttttttttttttttttttttttttttttttttttttttttttttttttttttttttttttttttttttttttttttttttttttttttttttttttttttttttttttttttttttttttttttttttttttttttttttttttttttttttttttttttttttttttttttttttttttttttttttttttttttttttttttttttttttttttttttttttttttttttttttttttttttttttttttttttttttttttttttttttttttttttttttttttttttttttttttttttttttttttttttttttttttttttttttttttttttttttttttttttttttttttttttttttttttttttttttttttttttttttttttttttttttttttttttttttttttttttttttttttttttttttttttttttttttttttttttttttttttttttttttttttttttttttttttttttttttttttttttttttttttttttttttttttttttttttttttttttttttttttttttttttttttttttttttttttttttttttttttttttttttttttttttttttttttttttttttttttttttttttttttttttttttttttttttttttttttttttttttttttttttttttttttttttttttttttttttttttttttttttttttttttttttttttttttttttttttttttttttttttttttttttttttttttttttttttttttttttttttttttttttttttttttttttttttttttttttttttttttttttttttttttttttttttttttttttttttttttttttttttttttttttttttttttttttttttttttttttttttttttttttttttttttttttttttttttttttttttttttttttttttttttttttttttttttttttttttttttttttttttttttttttttttttttttttttttttttttttttttttttttttttttttttttttttttttttttttttttttttttttttttttttttttttttttttttttttttttttttttttttttttttttttttttttttttttttttttttttttttttttttttttttttttttttttttttttttttttttttttttttttttttttttttttttttttttttttttttttttttttttttttttttttttttttttttttttttttttttttttttttttttttttttttttttttttttttttttttttttttttttttttttttttttttttttttttttttttttttttttttttttttttttttttttttttttttttttttttttttttttttttttttttttttttttttttttttttttttttttttttttttttttttttttttttttttttttttttttttttttttttttttttttttttttttttttttttttttttttttttttttttttttttttttttttttttttttttttttttttttttttttttttttttttttttttttttttttttttttttttttttttttttttttttttttttttttttttttttttttttttttttttttttttttttttttttttttttttttttttttttttttttttttttttttttttttttttttttttttttttttttttttttttttttttttttttttttttttttttttttttttttttttttttttttttttttttttttttttttttttttttttttttttttttttttttttttttttttttttttttttttttttttttttttttttttttttttttttttttttttttttttttttttttttttttttttttttttttttttttttttttttttttttttttttttttttttttttttttttttttttttttttttttttttttttttttttttttttttttttttttttttttttttttttttttttttttttttttttttttttttttttttttttttttttttttttttttttttttttttttttttttttttttttttttttttttttttttttttttttttttttttttttttttttttttttttttttttttttttttttttttttttttttttttttttttttttttttttttttttttttttttttttttttttttttttttttttttttttttttttttttttttttttttttttttttttttttttttttttttttttttttttttttttttttttttttttttttttttttttttttttttttttttttttttttttttttttttttttttttttttttttttttttttttttttttttttttttttttttttttttttttttttttttttttttttttttttttttttttttttttttttttttttttttttttttttttttttttttttttttttttttttttttttttttttttttttttttttttttttttttttttttttttttttttttttttttttttttttttttttttttttttttttttttttttttttttttttttttttttttttttttttttttttttttttttttttttttttttttttttttttttttttttttttttttttttttttttttttttttttttttttttttttttttttttttttttttttttttttttttttttttttttttttttttttttttttttttttttttttttttttttttttttttttttttttttttttttttttttttttttttttttttttttttttttttttttttttttttttttttttttttttttttttttttttttttttttttttttttttttttttttttttttttttttttttttttttttttttttttttttttttttttttttttttttttttttttttttttttttttttttttttttttttttttttttttttttttttttttttttttttttttttttttttttttttttttttttttttttttttttttttttttttttttttttttttttttttttttttttttttttttttttttttttttttttttttttttttttttttttttttttttttttttttttttttttt

SEQ ID NO: 16 - DNA, 2400 bp, Artificial Sequence
  Synthetic Polynucleotide
tttttttttttttttttttttttttttttttttttttttttttttttttttttttttttttttttttttttttttttttttttttttttttttttttttttttttttttttttttttttttttttttttttttttttttttttttttttttttttttttttttttttttttttttttttttttttttttttttttttttttttttttttttttttttttttttttttttttttttttttttttttttttttttttttttttttttttttttttttttttttttttttttttttttttttttttttttttttttttttttttttttttttttttttttttttttttttttttttttttttttttttttttttttttttttttttttttttttttttttttttttttttttttttttttttttttttttttttttttttttttttttttttttttttttttttttttttttttttttttttttttttttttttttttttttttttttttttttttttttttttttttttttttttttttttttttttttttttttttttttttttttttttttttttttttttttttttttttttttttttttttttttttttttttttttttttttttttttttttttttttttttttttttttttttttttttttttttttttttttttttttttttttttttttttttttttttttttttttttttttttttttttttttttttttttttttttttttttttttttttttttttttttttttttttttttttttttttttttttttttttttttttttttttttttttttttttttttttttttttttttttttttttttttttttttttttttttttttttttttttttttttttttttttttttttttttttttttttttttttttttttttttttttttttttttttttttttttttttttttttttttttttttttttttttttttttttttttttttttttttttttttttttttttttttttttttttttttttttttttttttttttttttttttttttttttttttttttttttttttttttttttttttttttttttttttttttttttttttttttttttttttttttttttttttttttttttttttttttttttttttttttttttttttttttttttttttttttttttttttttttttttttttttttttttttttttttttttttttttttttttttttttttttttttttttttttttttttttttttttttttttttttttttttttttttttttttttttttttttttttttttttttttttttttttttttttttttttttttttttttttttttttttttttttttttttttttttttttttttttttttttttttttttttttttttttttttttttttttttttttttttttttttttttttttttttttttttttttttttttttttttttttttttttttttttttttttttttttttttttttttttttttttttttttttttttttttttttttttttttttttttttttttttttttttttttttttttttttttttttttttttttttttttttttttttttttttttttttttttttttttttttttttttttttttttttttttttttttttttttttttttttttttttttttttttttttttttttttttttttttttttttttttttttttttttttttttttttttttttttttttttttttttttttttttttttttttttttttttttttttttttttttttttttttttttttttttttttttttttttttttttttttttttttttttttttttttttttttttttttttttttttttttttttttttttttttttttttttttttttttttttttttttttttttttttttttttttttttttttttttttttttttttttttttttttttttttttttttttttttttttttttttttttttttttttttttttttttttttttttttttttttttttttttttttttttttttttttttttttttttttttttttttttttttttttttttttttttttttttttttttttttttttttttttttttttttttttttttttttttttttttttttttttttttttttttttttttttttttttttttttttttttttttttttttttttttttttttttttttttttttttttttttttttttttttttttttttttttttttttttttttttttttttttttttttttttttttttttttttttttttttttttttttttttttttttttttttttttttttttttttttttttttttttttttttttttttttttttttttttttt

SEQ ID NO: 17 - DNA, 1632 bp, Artificial Sequence
  Synthetic Polynucleotide
atggccgacaagaacatcctgtacggccccgagcctttctaccctctggaagatggaacagccggcgagcagatgttcgacgccctgagcagatatgccgccattcctggatgtatcgccctgacaaacgcccacaccaaagaaaacgtgctgtacgaagagttcctgaagctgagctgtcggctggccgagagcttcaagaagtacggcctgaagcagaacgacacaatcgccgtgtgcagcgagaacagcctccagttcttcctgcctgtgatcgccagcctgtacctgggcattattgtggcccctgtgaacgacaagtacatcgagagagagctgatccacagcctgggcatcgtgaagccccggatcgtgttctgctccaagaacaccttccagaaggtgctgaacgtcaagagcaagctgaagtccatcgagacaatcatcatcctggacctgaacgaggacctcggcggctaccagtgcctgaacaacttcatcagccagaacagcgacagcaacctggacgtgaagaagttcaagccctacagcttcaaccgggacgaccaggtggcctccatcatgtttagcagcggcaccaccggactgcccaaaggcgttatgctgacccacaagaatatcgtggcccggttctctatcgctaaggaccccaccttcggcaacgccatcaatcctacaagcgctatcctgacagtgatccccttccaccacggcttcggcatgatgaccacactgggctacttcacctgtggcttcagagtggtgctgatgcacaccttcgaggaaaagctgtttctccagagcctccaggactacaaggtggaaagcaccctgctggtgcctactctgatggccttcctggctaagtctgccctggtcgagaagtacgatctgagccacctgaaagagatcgcctctggcggagcccctctgagcaaagaaatcggcgagatggtcaagaagcggttcaagctgaacttcgtgcggcaaggctatggcctgaccgagacaacaagcgccgtgctgattacccctaagggcgacgccaagcctggcagcacaggcaaaattgtgcctctgcacgccgtgaaggtggtggaccctaccacaggcaagatcctgggacctaatgagcccggcgagctgtacttcaagggacccatgattatgaagggctactacaacaacgaggaagccaccaaggccattatcgacaacgacggctggctgcggagcggcgatattgcctactacgacaatgacggccacttctacatcgtggacagactgaagtccctcatcaagtacaagggctatcaggtggccccagccgagatcgagggtatcctgctgcaacacccctatatcgtggatgccggcgtgacaggcatccctgatgaagctgctggcgaacttccagcagctggcgtggtggttcagaccggcaagtacctgaatgagcagatcgtgcaggactacgtggcctctcaggtgtccacagccaaatggctgagaggcggcgtgaagttcctggacgagatcccaaagggctctaccggcaagatcgacagaaaggtgctgcggcagatgctggaaaagcacaccaatggc

SEQ ID NO: 18 - DNA, 1632 bp, Artificial Sequence
  Synthetic Polynucleotide
atggccgacaagaacatcctgtacggccccgagcctttctaccctctggaagatggaacagccggcgagcagatgttcgacgccctgagcagatacgccgacattcctggatgtatcgccctgacaaacgcccacaccaaagaaaacgtgctgtacgaagagttcctgaagctgagctgtcggctggccgagagcttcaagaagtacggcctgaagcagaacgacacaatcgccgtgtgcagcgagaacagcctccagttcttcctgcctgtgatcgccagcctgtacctgggcattattgtggcccctgtgaacgacaagtacatcgagagagagctgatccacagcctgggcatcgtgaagccccggatcgtgttctgctccaagaacaccttccagaaggtgctgaacgtcaagagcaagctgaagtccatcgagacaatcatcatcctggacctgaacgacgacctcggcggctaccagtgcctgaacaacttcatcagccagaacagcgacagcaacctggacgtgaagaagttcaagccctacagcttcaaccgggacgaccaggtggccctgattatgtttagcagcggcaccaccggactgcccaaaggcgttatgctgacccacaagaatatcgtggcccggttctctatcgctaaggaccccaccttcggcaacgccatcaatcctacaagcgctatcctgacagtgatccccttccaccacggcttcggcatgatgaccacactgggctacttcacctgtggcttcagagtggtgctgatgcacaccttcgaggaaaagctgtttctccagagcctccaggactacaaggtggaaagcaccctgctggtgcctactctgatggccttcctggctaagtctgccctggtcgagaagtacgatctgagccacctgaaagagatcgcctctggcggagcccctctgagcaaagaaatcggcgagatggtcaagaagcggttcaagctgaacttcgtgcggcaaggctatggcctgaccgagacaacaagcgccgtgctgattacccctaagggcgacgccaagcctggcagcacaggcaagattgtgcctttccacgccgtgaaggtggtggaccctaccaccggaaagatcctgggacctaatgagcccggcgagctgtacttcaagggacccatgattatgaagggctactacaacaacgaggaagccaccaaggccattatcgacaacgacggctggctgcggagcggcgatattgcctactacgacaatgacggccacttctacatcgtggacagactgaagtccctcatcaagtacaagggctaccaggtcgcccctgccgagattgagggtatcctgctgcaacacccctatatcgtggatgccggcgtgacaggcatccctgatgaagctgctggcgaacttccagcagctggcgtggtggttcagaccggcaagtacctgaatgagcagatcgtgcaggactacgtggcctctcaggtgtccacagccaaatggctgagaggcggcgtgatcttcctggacgagatcccaaagggctctaccggcaagatcgacagaaaggtgctgcggcagatgctggaaaagcacaccaatggc

SEQ ID NO: 19 - DNA, 1632 bp, Artificial Sequence
  Synthetic Polynucleotide
atggccgacaagaacatcctgtacggccccgagcctttctaccctctggctgatggaacagccggcgagcagatgttcgatgccctgagcagatacgccgacatcagcggatgtatcgccctgacaaacgcccacaccaaagaaaacgtgctgtacgaagagttcctgaagctgagctgtcggctggccgagagcttcaagaagtacggcctgaagcagaacgacacaatcgccgtgtgcagcgagaacggcctccagttctttctgcctgtgatcgccagcctgtacctgggcattatcgctgcccctgtgtccgataagtacatcgagagagagctgatccacagcctgggcatcgtgaagccccggatcatcttctgctccaagaacaccttccagaaggtgctgaacgtcaagagcaagctgaagtccgtggaaaccatcatcatcctggacctgaacgaggacctcggcggctaccagtgcctgaacaacttcatctctcagaacagcgacagcaacctggacgtgaagaagttcaagccctacagcttcaaccgggacgaccaggtggccctggtcatgtttagctctggcacaaccggcgtgcccaagggcgttatgctgacccacaagaatatcgtggcccggttcagcctggctaaggaccctaccttcggcaacgccatcaatcccaccaccgctatcctgacagtgatccccttccaccacggcttcggcatgatgaccacactgggctacttcacctgtggcttcagagtggtgctgatgcacaccttcgaggaaaagctgtttctccagagcctccaggactacaaggtggaaagcaccctgctggtgcctactctgatggcctttctggccaagtctgccctggtcgagaagtacgatctgagccacctgaaagagatcgcctctggcggagcccctctgagcaaagaaatcggcgagatggtcaagaagcggttcaagctgaacttcgtgcggcaaggctatggcctgaccgagacaacaagcgccgtgctgattacccctaagggcgacgctagacctggcagcacaggcaagatcgtgcctttccacgccgtgaaggtggtggaccctacaaccggcaagatcctgggacctaatgagcccggcgagctgtactttaagggcgccatgattatgaagggctactacaacaacgaggaagccaccaaggccattatcgacaacgacggctggctgcggagcggcgatattgcctactacgacaatgacggccacttctacatcgtggacagactgaagtccctcatcaagtacaagggctaccaggtcgcccctgccgagattgagggtatcctgctgcaacacccctatatcgtggatgccggcgtgacaggcatccctgatgaagctgctggcgaacttccagcagcaggcgtggtggttcagaccggcaagtacctgaatgagcagatcgtgcaggacttcgtgtccagccaggtgtccacagccaaatggctgagaggcggcgtgaagttcctggacgagatcccaaagggctccaccggaaagatcgacagaaaggtgctgcggcagatgtttgagaagcacaccaacggc

SEQ ID NO: 20 - DNA, 1632 bp, Artificial Sequence
  Synthetic Polynucleotide
atggccgacaagaacatcctgtacggccccgagcctttctaccctctggctgatggaacagccggcgagcagatgttctacgccctgagcagatacgccgacatcagcggatgtatcgccctgacaaacgcccacaccaaagaaaacgtgctgtacgaagagttcctgaagctgagctgtcggctggccgagagcttcaagaagtacggcctgaagcagaacgacacaatcgccgtgtgcagcgagaacggcctccagttcttcctgcctatcattgccagcctgtacctgggcatcattgctgcccctgtgtccgataagtacatcgagagagagctgatccactctctgggcatcgtgaagccccggatcatcttctgctccaagaacaccttccagaaggtgctgaacgtcaagagcaagctgaaatacgtggaaaccatcatcatcctggacctgaacgaggacctcggcggctaccagtgcctgaacaacttcatctctcagaacagcgacatcaacctggacgtcaagaagttcaagccctacagcttcaaccgggacgaccaggtggccctggtcatgtttagctctggcacaaccggcgtgtccaagggcgtgatgctgacccacaagaatatcgtggcccggttcagcctggctaaggaccctaccttcggcaacgccatcaatcccaccaccgctatcctgacagtgatccccttccaccacggcttcggcatgatgaccacactgggctacttcacctgtggcttcagagtggtgctgatgcacaccttcgaggaaaagctgtttctccagagcctccaggactacaaggtggaaagcaccctgctggtgcctactctgatggcctttctggctaagagcgccctggtcgagaagtacgatctgagccacctgaaagagatcgcctctggcggagcccctctgagcaaagaaatcggcgagatggtcaagaagcggttcaagctgaacttcgtgcggcaaggctatggcctgaccgagacaacaagcgccgtgctgattacccctaacaacgatgtgcggcctggcagcacaggcaagatcgtgccttttcacgccgtgaaggtggtggaccctacaaccggcaagatcctgggacctaatgagcccggcgagctgtacttcaagggcgacatgattatgaagggctactacaacaacgaggaagccaccaaggccattatcaacaaggacggctggctgcggagcggcgacattgcctactatgacaacgacggccacttctacatcgtggaccggctgaagtccctgattaagtacaagggctaccaggtcgcccctgccgagattgagggtatcctgctgcaacacccctatatcgtggatgccggcgtgacaggcatccctgatgaagctgctggcgaacttccagcagctggcgtggtggttcagaccggcaagtacctgaatgagcagatcgtgcagaatttcgtgtccagccaggtgtccaccgccaagtggcttagaggcggcgtgaagttcctggacgagatccctaaaggctccaccggaaagatcgacagaaaggtgctgcgccagatgttcgagaagcacaccaatggc

SEQ ID NO: 21 - DNA, 1626 bp, Artificial Sequence
  Synthetic Polynucleotide
atgatgaagcgcgagaagaacgtgatctacggccccgaacctctgcaccctcttgaggatcttacagccggcgagatgctgttcagagccctgcggaaacacagccatctgcctcaggctctggtggatgtcgtgggagatgagagcctgtcctacaaagagttcttcgaggccaccgtgctgctggcccagtctctgcataattgcggctacaagatgaacgacgtggtgtccatctgcgccgagaacaacacccggttcttcatccctgtgatcgccgcctggtacatcggcatgattgtggcccctgtgaacgagagctacatccccgacgagctgtgcaaagtgatgggcatcagcaagccccagatcgtgttcaccaccaagaacatcctgaacaaggtgctggaagtgcagagccggaccaacttcatcaagcggatcatcatcctggacaccgtggaaaacatccacggctgcgagagcctgccaaacggcatctccagatacagcgacggcaatatcgccaacttcaagcccctgcacttcgaccccgtggaacaggtggcagccatcctgtgtagcagcggcacaacaggactgcccaaaggcgtgatgcagacccaccagaatatctgcgtgcggctgatccacgctctggaccctagagctggaacccagctgattcctggcgtgaccgtgctggtgtacctgcctttctttcacgccttcggcttcagcatcaccctgggctacttcatggtcggactgagagtgattatgtttcggcgcttcgaccaagaagccttcctgaaggccatccaggactacgaagtgcgctccgtgattaacgtgcccagcgtgatcctgttcctgagcaagagcccactggtggataagtacgacctgagcagcctgagagagctgtgttgcggagctgcccctctggctaaagaggtggcagaagttgccgccaagcggctgaatctgcctggcatcagatgtggctttggcctgaccgagagcaccagcgccaatatccacagcctgcgggacgagtttaagagcggctctctgggcagagtgacccctctgatggccgccaagatcgccgatagagagacaggcaaagccctgggacctaatcaagtgggcgagctgtgtatcaagggacctatggtgtccaagggctacgtgaacaacgtggaagccaccaaagaggccatcgacgacgacggctggctgcactctggcgatttcggctactacgacgaggacgagcacttctacgtggtggacagatacaaagagctgattaagtacaagggcagccaggtggccccagccgagctggaagaaatcctgctgaagaacccctgcatccgcgacgtggcagttgtgggcattcctgatctggaagccggcgaactgcctagcgcctttgtggttaagcagcccggcaaagagatcaccgccaaagaggtgtacgactacctggccgagagagtgtcccacaccaagtatctgagaggcggcgtcagattcgtggacagcatccccagaaacgtgaccggcaagatcacccggaaagagctgctgaaacagctgctggaaaaggctggcgga

SEQ ID NO: 22 - DNA, 999 bp, Artificial Sequence
  Synthetic Polynucleotide
atggccttaccagtgaccgccttgctcctgccgctggccttgctgctccacgccgccaggccgtggtctcatccccagtttgaaaagggcagcggcgaattcagagtgcagcctaccgagagcatcgtgcggttccccaacatcaccaatctgtgccctttcggcgaggtgttcaacgccaccagattcgcctctgtgtacgcctggaaccggaagcggatcagcaactgcgtggccgattacagcgtgctgtacaacagcgccagcttcagcaccttcaagtgctacggcgtgtcccctaccaagctgaacgacctgtgcttcaccaacgtgtacgccgacagcttcgtgatcagaggcgacgaagtgcggcagattgcccctggacagacaggcaagatcgccgactacaactacaagctgcccgacgacttcaccggctgtgtgattgcctggaacagcaacaacctggacagcaaagtcggcggcaactacaattacctgtaccggctgtttcggaagtccaacctgaagcctttcgagcgggacatcagcaccgaaatctaccaggccggcagcaccccttgcaatggcgtggaaggcttcaactgctacttcccactgcaaagctacggcttccagcctacaaacggcgtgggctaccagccttacagagtggtggtgctgagcttcgagctgctgcacgctcctgctacagtgtgcggccctaagaaaagcaccaacctggtcaagaacaaatgcgtgaacttcacgcgtaccaccaccaagcctgtgctgcggaccccttctcctgtgcatccaacaggcacaagccagcctcagaggcccgaagattgcagacctagaggcagcgtgaaaggcaccggcctggatttcgcctgcgacatctatatctgggctcctctggccggcatctgtgtggctccactgctgagcctgatcatcaccctgatctgctaccacagaagctaactcgag

SEQ ID NO: 23 - DNA, 5444 bp, Artificial Sequence
  Synthetic Polynucleotide
ggatccagctggatgtctgcattgccgaggccaccagggctggctcagcaactgtcggggaatcaccagggtctgagaaatcttgtgcgcatgtgaggggctgtgggagcagagaaccactgggtgggaaattctaatccccaccctgctggaaactctctgggtggccccaacatgctaatcctccggcaaacctctgtttcctcctcaaaaggcaggaggtcggaaagaataaacaatgagagtcacattaaaaacacaaaatcctacggaaatactgaagaatgagtctcagcactaaggaaaagcctccagcagctcctgctttctgagggtgaaggatagacgctgtggctctgcatgactcactagcactctatcacggccatattctggcagggtcagtggctccaactaacatttgtttggtactttacagtttattaaatagatgtttatatggagaagctctcatttctttctcagaagagcctggctaggaaggtggatgaggcaccatattcattttgcaggtgaaattcctgagatgtaaggagctgctgtgacttgctcaaggccttatatcgagtaaacggtagcgctggggcttagacgcaggtgttctgatttatagttcaaaacctctatcaatgagagagcaatctcctggtaatgtgatagatttcccaacttaatgccaacataccataaacctcccattctgctaatgcccagcctaagttggggagaccactccagattccaagatgtacagtttgctttgctgggcctttttcccatgcctgcctttactctgccagagttatattgctggggttttgaagaagatcctattaaataaaagaataagcagtattattaagtagccctgcatttcaggtttccttgagtggcaggccaggcctggccgtgaacgttcactgaaatcatggcctcttggccaagattgatagcttgtgcctgtccctgagtcccagtccatcacgagcagctggtttctaagatgctatttcccgtataaagcatgagaccgtgacttgccagccccacagagccccgcccttgtccatcactggcatctggactccagcctgggttggggcaaagagggaaatgagatcatgtcctaaccctgatcctcttgtcccacagatgtgaagcagaccctgaatttcgacctgctgaagctggctggcgacgtggaatccaacccaggccctatggccttaccagtgaccgccttgctcctgccgctggccttgctgctccacgccgccaggccgcaggtccagctcgtcgagtccggcggcggcctcgtccaggccggcgactccgtcaccctctcctgcaccgcctccggccgcaccttctcctcctacgccctcgcctggttccgccagcgccccggcaaggagcgcgagttcgtcgccggcctccgctggggcggccccaccaactacgccgactccgtcaaggaccgcttcaccatctccggcgactccgccaagcacaccatgtacctccagatgaactccctcaagcccgaggacaccgccgtctactactgcggctacaaccccggcggctgggccgtcccctcccagtacgagtacgactcctggggccagggcacccaggtcaccgtctcctccggtaccggcggaggcggatctggcggcggaggtagcggtggcggaggatctgaattcgacatccagatgacacagagccctagcagcctgtctgccagcgtgggagacagagtgaccatcacatgcaaggccagcgaccacatcaacaactggctggcctggtatcagcagaagcctggacaggcccctaagctgctgatctacggcgctaccacactggaaacaggcgtgcccagcagattttctggcagcggctctggcaccgactacaccctgacaatatccagcctccagcctgaggacttcgccacctactactgtcagcagagctggaacaccccttggacattcggccagggcaccaagctggaaatcaagagactcgaggacctgaagaacgtgttcccacctgaggtggccgtgttcgagcctagcgaggccgagatcagccacacccagaaagccaccctcgtgtgcctggctaccggcttctaccccgaccatgtggaactgtcttggtgggtcaacggcaaagaggtgcacagcggcgtgtgtaccgacccccagccactgaaagaacagcccgccctgaacgacagccggtactgcctgagcagcagactgagagtgtccgccaccttctggcagaacccccggaaccacttcagatgccaggtgcagttctacggcctgagcgagaacgacgagtggacccaggacagagccaagcccgtgacccagatcgtgtctgccgaagcctggggcagagccgattgcggctttaccagcgagagctaccagcagggcgtgctgagcgccaccatcctgtacgagatcctgctgggcaaggccaccctgtacgccgtgctggtgtctgccctggtgctgatggctatggtcaagcggaaggacagccggggaagggccaagcgatctggatctggagcaacaaacttctcactactcaaacaagcaggtgacgtggaggagaatcccgggcctactagtatggactggatttggcgcatccttttccttgtcggcgctgctaccggcgcccattccgggccccaggttcagctgcaagagtctggcggaggacttgctcaagctggcggaagcctgagactgtcttgtgccgcctctggcagaaccttcagcatgggctggtttagacaggcccctggcaaagagagagagttcgtcgccgccatcacatacagcggcggcagcccttactacgcctcttctgtcagaggccggttcaccatcagccgggacaacgccaagaacaccgtgtacctccagatgaacagcctgaagccagaggacaccgccgtgtactactgtgccgccaatccaacctacggcagcgactggaatgccgagaattggggccagggcacccaagtgacagtgtctagtggatccggcggcggaggatctggcggaggcggatctgggggcggaggctctttcgaacaagttcagcttcaacagcctggcgctgagctggtcaaacctggcgcttctgtgaagatgagctgcaaagccagcggctacgccttcagcagctactggatcaactggatgaagcagaaacccggccagggactcgaatggatcggccaaatctatcccggcgacggcgacaccaactacaacggcaagttcaagggcagagccacactgaccgccgatacctctagcagcacagcctacatgcagctgagcagcctgaccagcgaagatagcgccgtgtacttctgtgcccggtccatcacaacagtcgtgggctgcgctatggactattggggccagggaacaagcgtgaccgtgtctagtacgcgtatccagaaccctgatcctgccgtgtaccagctgcgggatagcaagagcagcgacaagagcgtgtgtctgttcaccgacttcgacagccagaccaacgtgtcccagagcaaggactccgacgtgtacatcaccgataagtgcgtgctggacatgcggagcatggacttcaagagcaactccgccgtggcctggtccaacaagtccgatttcgcctgcgccaacgccttcaacaacagcattatccccgaggacacattcttcccaagccccgagagcagctgcgacgtgaagctggtggaaaagagcttcgagacagacaccaacctgaacttccagaacctgagcgtgatcggcttcagaatcctgctgctgaaagtggccggctttaacctgctgatgaccctgcggctgtggtccagctgaccagacatgataagatacattgatgagtttggacaaaccacaactagaatgcagtgaaaaaaatgctttatttgtgaaatttgtgatgctattgctttatttgtaaccattataagctgcaataaacaagttaacaacaacaattgcattcattttatgtttcaggttcagggggaggtgtgggaggttttttaaagcaagtaaaacctctacaaatgtggtatggaattaattctaaaatacagcatagcaaaactttaacctccaaatcaagcctctacttgaatccttttctgagggatgaataaggcataggcatcaggggctgttgccaatgtgcattagctgtttgcagcctcaccttctttcatggagtttaagatatagtgtattttcccaaggtttgaactagctcttcatttctttatgttttaaatgcactgacctcccacattccctttttagtaaaatattcagaaataatttaaatacatcattgcaatgaaaataaatgttttttattaggcagaatccagatgctcaaggcccttcataatatcccccagtttagtagttggacttagggaacaaaggaacctttaatagaaattggacagcaagaaagcgagcttctagcttatcctgtatatcacagacaaaactgtgctagacatgaggtctatggacttcaagagcaacagtgctgtggcctggagcaacaaatctgactttgcatgtgcaaacgccttcaacaacagcattattccagaagacaccttcttccccagcccaggtaagggcagctttggtgccttcgcaggctgtttccttgcttcaggaatggccaggttctgcccagagctctggtcaatgatgtctaaaactcctctgattggtggtctcggccttatccattgccaccaaaaccctctttttactaagaaacagtgagccttgttctggcagtccagagaatgacacgggaaaaaagcagatgaagagaaggtggcaggagagggcacgtggcccagcctcagtctctccaactgagttcctgcctgcctgcctttgctcagactgtttgccccttactgctcttctaggcctcattctaagccccttctccaagttgcctctccttatttctccctgtctgccaaaaaatctttcccagctcactaagtcagtctcacgcagtcactcattaacccaccaatcactgattgtgccggcacatgaatgcaccaggtgttgaagtggaggaattaaaaagtcagatgaggggtgtgcccagaggaagcaccattctagttgggggagcccatctgtcagctgggaaaagtccaaataacttcagattggaatgtgttttaactcagggttgagaaaacagccaccttcaggacaaaagtcagggaagggctctctgaagaaatgctacttgaagataccagccctaccaagggcagggagaggaccctatagaggcctgggaca

SEQ ID NO: 24 - DNA, 10 bp, Artificial Sequence
  Synthetic Polynucleotide
aaataagggt

SEQ ID NO: 25 - DNA, 10 bp, Artificial Sequence
  Synthetic Polynucleotide
aaagatctct

SEQ ID NO: 26 - DNA, 10 bp, Artificial Sequence
  Synthetic Polynucleotide
aaacaagcac

SEQ ID NO: 27 - DNA, 10 bp, Artificial Sequence
  Synthetic Polynucleotide
agacaagggt

SEQ ID NO: 28 - DNA, 10 bp, Artificial Sequence
  Synthetic Polynucleotide
acacatctct

SEQ ID NO: 29 - DNA, 10 bp, Artificial Sequence
  Synthetic Polynucleotide
attcatctct

SEQ ID NO: 30 - DNA, 10 bp, Artificial Sequence
  Synthetic Polynucleotide
attgatctct

SEQ ID NO: 31 - DNA, 63 bp, Artificial Sequence
  Synthetic Polynucleotide
atggccttaccagtgaccgccttgctcctgccgctggccttgctgctccacgccgccaggccg

SEQ ID NO: 32 - DNA, 63 bp, Artificial Sequence
  Synthetic Polynucleotide
atggccctgcctgtgacagctctgctgctgcctctggcactgctgctgcacgccgccagacct

SEQ ID NO: 33 - DNA, 57 bp, Artificial Sequence
  Synthetic Polynucleotide
atggattggatatggaggatactttttctcgtgggggcagcaaccggggctcattcc

SEQ ID NO: 34 - DNA, 57 bp, Artificial Sequence
  Synthetic Polynucleotide
atggactggatttggcgcatccttttccttgtcggcgctgctaccggcgcgcattcc

SEQ ID NO: 35 - DNA, 60 bp, Artificial Sequence
  Synthetic Polynucleotide
atggcctgtcctggcttcctgtgggctcttgtgatctccacctgtcttgagttcagcatg

SEQ ID NO: 36 - DNA, 57 bp, Artificial Sequence
  Synthetic Polynucleotide
atgaccatccggctgctgtgctatatgggcttctacttcctcggagccggcctgatg

SEQ ID NO: 37 - DNA, 45 bp, Artificial Sequence
  Synthetic Polynucleotide
ggcggaggcggaagtggaggcggaggatctggcggcggaggctct

SEQ ID NO: 38 - DNA, 45 bp, Artificial Sequence
  Synthetic Polynucleotide
ggaggcggaggaagtggcggcggaggatctgggggaggcggaagc

SEQ ID NO: 39 - DNA, 45 bp, Artificial Sequence
  Synthetic Polynucleotide
ggtggcggtggctcgggcggtggtgggtcgggtggcggcggatct

SEQ ID NO: 40 - DNA, 45 bp, Artificial Sequence
  Synthetic Polynucleotide
ggcggcggaggatctggcggaggcggatctgggggcggaggctct

SEQ ID NO: 41 - DNA, 45 bp, Artificial Sequence
  Synthetic Polynucleotide
ggcggtggcggttcaggtggagggggaagcggtggtggtggctca

SEQ ID NO: 42 - DNA, 45 bp, Artificial Sequence
  Synthetic Polynucleotide
ggcggcggaggctcaggcggaggcggatctggcgggggaggatct

SEQ ID NO: 43 - DNA, 105 bp, Artificial Sequence
  Synthetic Polynucleotide
ggaggtagcggctccgggggaggcggaagtggaggcggaggatctgggtctggaggaagcggatctggaggctcagggtcagggggctcaggcagtggaggctct

SEQ ID NO: 44 - DNA, 105 bp, Artificial Sequence
  Synthetic Polynucleotide
ggaggaggcggctccgggggaggcggaagtggaggcggaggatctgggtctggaggaagcggatctggaggctcagggtcagggggctcaggcagtggaggctct

SEQ ID NO: 45 - DNA, 75 bp, Artificial Sequence
  Synthetic Polynucleotide
agcagcgccgacgacgccaagaaggacgccgccaaaaaggatgatgccaagaaagacgatgctaaaaaagacggc

SEQ ID NO: 46 - DNA, 333 bp, Artificial Sequence
  Synthetic Polynucleotide
gacgtgcagatgatccagacccccgatagcctggccgtgtccctgggacagagagccaccatctcttgcagagccagcgagagcgtggacaactacggcatcagcttcatgcactggtatcagcagaagcccggccagagccccaagctgctgatctacagagcctccaacctggaaagcggcatccccgccagattttccggcagcggcagcagaaccgacttcaccctgaccatcaaccccgtggaaaccgacgacgtggcaacctactactgccagcagaacaacaaggacccccccacctttggcggaggcaccaagctggaaatcaag

SEQ ID NO: 47 - DNA, 321 bp, Artificial Sequence
  Synthetic Polynucleotide
gacgtgcagatgatccagacccccagcagcctgtctgccagcctgggcgatagagtgaccatcagctgtcgggccagccaggacatcggcaactacctgaactggtatcagcagaaacccgacggcaccgtgaagctgctgatctactacaccagcagactgcacagcggcgtgcccagcagattttctggcagcggctctggcaccgagtacagcctgaccatctccaacctggaacaggaagatattgctacctacttctgtcagcaaggcagcgccctgccccctacatttggcggcggaacaaagctggaaatcaac

SEQ ID NO: 48 - DNA, 336 bp, Artificial Sequence
  Synthetic Polynucleotide
gacatcgtgctgacacagagccctgccaccctgtctctgagccctggcgatagagccaccatcagctgtagagccagcgagagcgtgaccatcctgggcagccacctgatctactggtatcagcagaagcccggccagccccccagactgctgattcagctggcctccaatgtgcagaccggcgtgccagccagattttccggcagcggcagcagaaccgacttcaccctgaccatcagcagcgtggaacccgaggacttcgccgtgtactactgcctccagagccggaccatccccagaacattcggccagggcaccaagctggaaatcaagaga

SEQ ID NO: 49 - DNA, 324 bp, Artificial Sequence
  Synthetic Polynucleotide
gacatccagatgacccagagccctagctcactgagcgccagcgtgggcgacagggtgaccattacctgctccgccagccaggacatcagcaactacctgaactggtaccagcagaagcccggcaaggcccccaagctgctgatctactacacctccaacctgcactccggcgtgcccagcaggttcagcggaagcggcagcggcaccgatttcaccctgaccatctccagcctgcagcccgaggacttcgccacctactactgccagcagtacaggaagctcccctggactttcggccagggcaccaaactggagatcaagcgt

SEQ ID NO: 50 - DNA, 342 bp, Artificial Sequence
  Synthetic Polynucleotide
gacatcgtgatgacccagagccccgatagcctggccgtgtctctgggagagagagccaccatcaactgcgagagcagccagagcctgctgaacagcggcaaccagaagaactacctgacctggtatcagcagaagcccggccagccccccaagcccctgatctattgggccagcaccagagaaagcggcgtgcccgatagattcagcggcagcggaagcggcaccgacttcaccctgaccatcagttctcttcaggccgaggacgtggccgtgtactactgccagaacgactacagctacccctacaccttcggccagggcaccaagctggaaatcaagaga

SEQ ID NO: 51 - DNA, 321 bp, Artificial Sequence
  Synthetic Polynucleotide
gacatccagatgacccagtctaccagttccctgagtgcatccctcggagacagggtgacgatcagttgcagcgcaagccaagggatcaataactatctgaactggtatcagcagaaaccggacggaacagtcgaactcctgatttattacaccagcacccttcagagtggcgtcccttcccggttcagtggctccggaagcgggaccgattactccctgaccatttctaatctggagccagaggacataggaacgtattattgccagcagtatagtaaactgccacgaacttttggaggggggacgaaactggagatcaaa

SEQ ID NO: 52 - DNA, 318 bp, Artificial Sequence
  Synthetic Polynucleotide
gacatccagatgacccagagccctgccagcctgtccgtgtctgtgggcgagacagtgaccatcacctgtcgggccagcgagaacatctacagcaacctggcctggtatcagcagaagcagggcaagagcccccaactgctggtgtacgccgccaccaatctggccgatggcgtgcccagcagattttccggctctggcagcggcacccagtacagcctgaagatcaacagcctccagagcgaggacttcggcagctactactgccagcacttctggggcacctggacctttggaggaggcaccaccctggaaatcaag

SEQ ID NO: 53 - DNA, 321 bp, Artificial Sequence
  Synthetic Polynucleotide
gagatcgtgctgacacagagccccgccaccctgtcactgtctccaggcgaaagagccaccctgagctgtagcgccagcagcagcgtgtcctacatgcactggtatcagcagaagcccggccaggcccccagactgctgatctacgataccagcaagctggcctccggcatccccgccagattttctggcagcggctccggcaccgacttcaccctgacaatcagcagcctggaacccgaggacgtggccgtgtactactgttttcaaggcagcgtgtaccccttcaccttcggccagggcaccaagctggaaatcaagaga

SEQ ID NO: 54 - DNA, 321 bp, Artificial Sequence
  Synthetic Polynucleotide
gacatccagatgacacagactacatcctccctgtctgcctctctgggagacagagtcaccatcagttgcagggcaagtcaggacattagtaaatatttaaattggtatcagcagaaaccagatggaactgttaaactcctgatctaccatacatcaagattacactcaggagtcccatcaaggttcagtggcagtgggtctggaacagattattctctcaccattagcaacctggagcaagaagatattgccacttacttttgccaacagggtaatacgcttccgtacacgttcggaggggggaccaagctggagatcaca

SEQ ID NO: 55 - DNA, 321 bp, Artificial Sequence
  Synthetic Polynucleotide
gagatcgtgatgacccagagccctgccaccctgtctctgagccctggcgaaagagccaccctgagctgtagagccagccaggacatcagcaagtacctgaactggtatcagcagaagcccggccaggcccccagactgctgatctaccacaccagcagactgcacagcggcatccccgccagattttctggctctggcagcggcaccgactacaccctgacaatcagcagcctccagcccgaggacttcgccgtgtacttctgtcagcaaggcaacaccctgccctacaccttcggccagggcaccaagctggaaatcaag

SEQ ID NO: 56 - DNA, 321 bp, Artificial Sequence
  Synthetic Polynucleotide
gagatcgtgctgacacagagccctgccaccctgtctctgagccctggcgaaagagccaccctgagctgtagagccagccagagcgtgtccagctacctggcctggtatcagcagaagcccggccaggctccccggctgctgatctacgatgccagcaatagagccaccggcatccccgccagattttccggctctggcagcggcaccgacttcaccctgaccatcagctccctggaacccgaggacttcgccgtgtactactgccagcagcggagcaactggcccatcacattcggccagggcacccggctggaaatcaaa

SEQ ID NO: 57 - DNA, 339 bp, Artificial Sequence
  Synthetic Polynucleotide
gacatcgtgatgacccagacccccctgagcctgcctgtgacacctggcgagcctgccagcatctcctgcagaagcagcaagagcctgctgcacagcaacggcatcacctacctgtactggtatctgcagaaacccggccagagcccccaactgctgatctaccagatgagcaacctggtgtccggcgtgcccgacagattttctggcagcggctccggcaccgacttcaccctgaagatcagccgggtggaagccgaggacgtgggcgtgtactactgcgcccagaacctggaactgccctacacctttggcggcggaacaaaggtggaaatcaagcgg

SEQ ID NO: 58 - DNA, 339 bp, Artificial Sequence
  Synthetic Polynucleotide
gacatccagatgacccagagccccagcagcctgtctgccagcgtgggcgacagagtgaccatcacctgtcggagcagccagagcatcgtgcactccgtgggcaacaccttcctggaatggtatcagcagaagcccggcaaggcccccaagctgctgatctacaaggtgtccaacagattcagcggcgtgcccagcaggtttagcggctctggcagcggcaccgacttcaccctgaccatctctagcctccagcccgaggacttcgccacctactactgttttcaaggcagccagttcccctacaccttcggccagggaacaaaggtggaaatcaagcgg

SEQ ID NO: 59 - DNA, 330 bp, Artificial Sequence
  Synthetic Polynucleotide
gagatcgtgctgacacagagccctggcaccctgagcctgtctccaggcgaaagagccacactgagctgtcgggcctctcagagcgtgggaggctacctggcttggtatcagcagaagccaggccaggcccccagactgctgatctacgacgccagcaatcgggccacaggcatccccgccagattttctggcagcggctccggcaccgacttcaccctgacaatcagcagcctggaacccgaggacttcgccgtgtactactgccagcagcggaacaactggccccccatgtacacattcggccagggcaccaagctggaaatcaagaga

SEQ ID NO: 60 - DNA, 336 bp, Artificial Sequence
  Synthetic Polynucleotide
gacatccagatgacccagagccccgccaccatcgagaacacaagcctgtctgccagcgtgggcgacagagtgaccatcacctgtagagccagccagggcatcagctcttggctgacctggtatcagcagaagcccgagaaggcccccaagagcctgatctacgccgccagctctctgcagtctggcgtgcccagcagattttccggcagcggctctggcaccgacttcaccctgacaatcagcagcctgcagcccgaggacttcgccacctactactgccagcagtacgacagctaccccatcaccttcggccagggcacccggctggaaatcaag

SEQ ID NO: 61 - DNA, 336 bp, Artificial Sequence
  Synthetic Polynucleotide
gacgagatcgtgctgacccagagccctgatagcctggccgtgtctctgggcgagagagccaccatcaactgcaaggccagccagagcgtggacttcgacggcgacagctacctgaactggtatcagcagaagcccggccagccccccaaggtgctgatctatgccgccagcacactgcagagcggcgtgcccagcagattttctggcagcggctccggcaccgacttcaccctgaccatcaacagcctggaagccgaggacgccgccacctactactgccagcagagcaacgaggacccctggacctttggcggcggaacaaaggtggaaatcaag

SEQ ID NO: 62 - DNA, 321 bp, Artificial Sequence
  Synthetic Polynucleotide
gacatccagatgacccagagccccagcagcctgtctgccagcgtgggcgacagagtgaccatcacctgtagagccagccagggcatcagctcttggctggcctggtatcagcagaagcccgagaaggcccccaagagcctgatctacgccgcctctagtctccagagcggcgtgcccagcagattttctggcagcggctccggcaccgacttcaccctgacaatcagctccctccagcccgaggacttcgccacctactactgccagcagtacaacagctaccctcccacctttggcggaggcaccaaggtggaaatcaag

SEQ ID NO: 63 - DNA, 336 bp, Artificial Sequence
  Synthetic Polynucleotide
gacgtcgtgatgacccagagccctctgagcctgcctgtgacactgggacagcctgccagcatctcctgtcggagcagccagagcatcgtgcacagcgacggcaacacctacctggaatggtatcagcagcggccaggccagagccccagacggctgatctacaaggtgtccaacagattcagcggcgtgcccgacagattctccggcagcggctctggcaccgacttcaccctgaagatcagcagagtggaagccgaggacgtgggcgtgtactactgttttcaaggcagccacgccccctggacctttggcggaggaacaaaggtggaaatcaag

SEQ ID NO: 64 - DNA, 318 bp, Artificial Sequence
  Synthetic Polynucleotide
cagatcgtgctgacacagagccctgccctgatgagcgccagccctggcgagaaagtgaccatgacctgtagcgccagcagcagcgtgcgctacatgtactggtatcagcagaagcccagaagcagccccaagccctggattcacctgaccagcaatctggcctctggcgtgcccgctagattttccggctctggcagcggcaccagctacagcctgaccatcagcagcatggaagccgaggacgccgccacctactactgccagcagtggtccagccaccccttcacatttggctccggcaccaagctggaaatcaag

SEQ ID NO: 65 - DNA, 339 bp, Artificial Sequence
  Synthetic Polynucleotide
gagatcgtgctgacacagagccctggaagcctggccgtgtctcctggcgagcgcgtgacaatgagctgcaagagcagccagagcgtgttcttcagcagctcccagaagaactacctggcctggtatcagcagatccccggccagagccccagactgctgatctactgggccagcaccagagaaagcggcgtgcccgatagattcaccggcagcggctctggcaccgacttcaccctgacaatcagcagcgtgcagcccgaggacctggctatctactactgccaccagtacctgagcagccggaccttcggccagggcaccaagctggaaatcaagaga

SEQ ID NO: 66 - DNA, 342 bp, Artificial Sequence
  Synthetic Polynucleotide
gacgacatcgtgatgacacagtcaccagatagcctcaccgtctccctgggggagcggaccaccattaattgtaaatccagccaaagcgtgctggactcaagcaagaacaagaatagcctcgcctggtatcagcagaagcccggtcagcctccaaagctgctgctttcttgggcctccaccagagagtccgggattcctgataggtttagtggttcaggctccggcacagattttactctgaccattgattctctccagccagaggattctgcaacttattactgccagcaaagcgcccactttcctataacttttggccagggaacccgacttgaaatcaag

SEQ ID NO: 67 - DNA, 339 bp, Artificial Sequence
  Synthetic Polynucleotide
gatgtgctgctgacccagagccctctgagcctgcctgtgacactgggacagcctgccagcatctcctgtcggagcagccagaccatcgtgcacagcaacggcaacacctacctggaatggttccagcagcggccaggccagagccccagactgctgatctaccaggtgtccaacagattcagcggcgtgcccgacagattctccggcagcggctctggcaccgacttcaccctgaagatcagccgggtggaagccgaggacgtgggcgtgtactactgttttcaaggcagccacgtgccccggacctttggcggaggaacaaaggtggaaatcaagaga

SEQ ID NO: 68 - DNA, 324 bp, Artificial Sequence
  Synthetic Polynucleotide
cacatcgtgctgacccagagccctagcagcctgtctgccagcctgggcgacagagtgaccatcagctgtagagccagccaggacatcagcacctacctgaactggtatcagcagaaacccgacggcaccgtgaagctgctgatcttctacaccagcagactgcacgccggggtgcccagcagattttctggcagcggctctggcacccaccacagcctgaccatctccaacctggaacaggaagatattgctacctacttctgtcagcaaggcaacagcctgcccttcaccttcggcagcggcaccaagctggaaatcaagaga

SEQ ID NO: 69 - DNA, 327 bp, Artificial Sequence
  Synthetic Polynucleotide
gaccacatcgtgctgacccagagccctagcagcctgtctgccagcctgggcgacagagtgaccatcagctgtagagccagccaggacatcagcacctacctgaactggtatcagcagaaacccgacggcaccgtgaagctgctgatcttctacaccagcagactgcacgccggggtgcccagcagattttctggcagcggctctggcacccaccacagcctgaccatctccaacctggaacaggaagatattgctacctacttctgtcagcaaggcaacagcctgcccttcaccttcggcagcggcaccaagctggaaatcaagaga

SEQ ID NO: 70 - DNA, 336 bp, Artificial Sequence
  Synthetic Polynucleotide
gacatcgtgatgacccagagccccgatagcctggccgtgtctctgggagagagagccaccatcaactgccgggccagcaagagcgtgtccaccagcggctacagcttcatgcactggtatcagcagaagcccggccagccccccaagctgctgatctacctggcctccaacctggaaagcggcgtgcccgatagattcagcggcagcggctctggcaccgacttcaccctgaccatcagttctcttcaggccgaggacgtggccgtgtactactgccagcacagcagagaggtgccctggacattcggccagggcacaaaggtggaaatcaagcgg

SEQ ID NO: 71 - DNA, 339 bp, Artificial Sequence
  Synthetic Polynucleotide
gacatcgtgatgacccagacccccctgaccctgagcgtgacaatcggacagcctgccagcatctcctgcaagagcagccagagcctgctggacagcgacggcaagacctacctgaactggctgctgcagaggccaggccagagccccgagagactgatctacctggtgtccaagctggactccggcgtgcccgatagattcacaggcagcggctccggcaccgacttcaccctgaagatcagccgggtggaagccgaggacctgggcgtgtactgttgttggcagggcacccacttcccttacaccttcggcggagggaccaaggtggaaatcaagggc

SEQ ID NO: 72 - DNA, 339 bp, Artificial Sequence
  Synthetic Polynucleotide
gacgacatccagttgacccagtcccccagctcactcagcgccagtgtgggggaccgggtgaccattacctgtaaagccagtcagagtgtggactatgagggggatagcttcctgaattggtatcagcagaagcctggcaaagccccaaagctgctgatctacgctgcatctaatctggagtcaggcgtgccttctaggttctccggtagtgggtctgggaccgatttcacattgaccatttcatccctccaacccgaggatttcgctacatattactgtcagcagtccaatgaggaccctctcacctttggccagggcaccaaagttgaaattaagaga

SEQ ID NO: 73 - DNA, 342 bp, Artificial Sequence
  Synthetic Polynucleotide
gacatcgtgatgagccagagccctagcagcctggccgtgtccgtgggcgagaaagtgaccatgagctgcaagagcagccagtccctgctgcacagcagcaaccagaagaactacctggcctggtatcagcagaagcccggccagtcccccaaggtgctgatctactgggccagcaccagagaaagcggcgtgcccgatagattcaccggcagcggctctggcaccgacttcaccctgaccatcaccagcgtgaagtccgaggacctggctgtgtactactgccagcagtattacagctacccctggaccttcggcggaggcacccggctggaaatcaaaaga

SEQ ID NO: 74 - DNA, 327 bp, Artificial Sequence
  Synthetic Polynucleotide
gagatcgtgctgacacagagccctggcaccctgagcctgtctccaggcgaaagagccacactgagctgtcgggccagccagagcgtgtccagctcttacctggcctggtatcagcagaagcccggccaggctccccggctgctgatctacggaacaagcagcagagccaccggcatccccgacagattttctggcagcggctccggcaccgacttcaccctgacaatcagcagactggaacccgaggacttcgccgtgtactactgccagcagtacggcagcagccccttcacctttggcggaggcaccaaggtggaaatcaagaga

SEQ ID NO: 75 - DNA, 324 bp, Artificial Sequence
  Synthetic Polynucleotide
gacatccagatgacccagagccccagcagcctgtctgccagcgtgggcgacagagtgaccatcacctgtagagccagccagagcatcagcctgtggctgaactggtatcagcagaagcccggcaaggcccccaagctgctgatctacgccgccagcacactccagagcggcgtgccaagcagattttccggcagcggctccggcaccgacttcaccctgacaatcagctccctccagcccgaggacttcgccacctactactgccagcagtactacaccagcccctacaccttcggccagggcaccaaggtggaaatcaagaga

SEQ ID NO: 76 - DNA, 327 bp, Artificial Sequence
  Synthetic Polynucleotide
gacatccagatgacccagagccccagcagcctgtctgccagcgtgggcgacagagtgaccatcacctgtagagccagccagagcatcagcagctacctgaactggtatcagcagaagcccggcaaggcccccaaactgctgatctacgccgtgtccacactccagagcggcgtgcccagcagattttctggcagcggctccggcaccgacttcaccctgacaatcagctccctccagcccgaggacttcgccacctactactgtcagcagagcggcaccttccctcccaccacatttggacagggcaccaaggtggaaatcaagaga

SEQ ID NO: 77 - DNA, 318 bp, Artificial Sequence
  Synthetic Polynucleotide
cagagcccatctagcctggctgtgtctgccggcgagaaagtgaccatgagctgcaagagcagccagagcctgctgaacagccggacccggaagaactacctggcctggtatcagcagaagcccggccagagccccaagctgctgatctactgggccagcaccagagaaagcggcgtgcccgatagattcaccggctctggcagcggcaccgacttcaccctgacaatcagcagcgtgcaggccgaggacctggccgtgtactactgcaagcagagcaacctgtacaccttcggcggaggcaccaagctggaaatcaag

SEQ ID NO: 78 - DNA, 312 bp, Artificial Sequence
  Synthetic Polynucleotide
atgacccagagccccaagttcctgctggtgtctgccggcgacagagtgaccctgacatgcaaggccagccagagcgtgaacaacgacgtgtactggtatcagcaggaacccggccagtcccccaagctgctgatctactgggccagcaccagagaaagcggcgtgcccgatagattcaccggcagcggctctggcaccgacttcaccctgacaatcagcagcgtgcaggccgaggacctggccgtgtactactgcaagcagagctacaacctgtacaccttcggcggaggcaccaagctggaaatcaagaga

SEQ ID NO: 79 - DNA, 321 bp, Artificial Sequence
  Synthetic Polynucleotide
gacatccagatgacccagagccccagcagcctgtctgcctctctgggcgagagagtgtccctgacctgtcgggccacacaggaactgagcggctacctgtcttggctgcagcagaagcccgacggcaccatcaagcggctgatctacgccgccagcaccctggatagcggcgtgcccaagagattcagcggcaacagaagcggcagcgactacagcctgaccatcagctccctggaaagcgaggacttcgccgactactactgcctgcagtacgccatctacccctacaccttcggcggaggcaccaagctggaaatcaag

SEQ ID NO: 80 - DNA, 336 bp, Artificial Sequence
  Synthetic Polynucleotide
gacaccatcgtgctgacacagagccctgcttccctggccgtgtccctgggacagagagccaccatctcttgcagagccagcgagagcgtggacagctacggcaacagcttcatgcactggtatcagcagaagcccggccagccccccaagctgctgatctacctggcctccaacctggaaagcggcgtgcccgccagattttctggcagcggcagcagaaccgacttcaccctgaccatcgaccccgtggaagccgatgatgccgccacctactactgccagcagaacaactacgacccctggaccttcggcggaggcaccaagctggaaatcaag

SEQ ID NO: 81 - DNA, 324 bp, Artificial Sequence
  Synthetic Polynucleotide
gacatccagatgacccagagccccagcagcctgtctgccagcgtgggcgacagagtgaccatcacatgcaaggccagccaggacgtgggaatcgccgtggcctggtatcagcagaaacccggcaaggtgcccaagctgctgatctactgggccagcaccagacacaccggcgtgcccgatagattttccggcagcggctccggcaccgacttcaccctgacaatcagctccctccagcccgaggacgtggcaacctactactgccagcagtacagcagctacccctacaccttcggccagggcaccaaggtggaaatcaagaga

SEQ ID NO: 82 - DNA, 321 bp, Artificial Sequence
  Synthetic Polynucleotide
gacatcgtgatgacccagagccagaagagcatgagcaccagcgtgggcgacagagtgagcatcacctgcaaggccagccaggacgtgatcaccggcgtggcctggtaccagcagaagcccggccagagccccaagctgctgatctacagcgccagctacagatacaccggcgtgcccgacagattcaccggcagcggcagcggcaccgacttcaccttcaccatcagcaacgtgcaggccgaggacctggccgtgtactactgccagcagcactacagcacccccctgaccttcggcgccggcaccaagctggagctgaag

SEQ ID NO: 83 - DNA, 339 bp, Artificial Sequence
  Synthetic Polynucleotide
cagagcgtgctgacacagcctccatccgtgtctggcgctccaggccagagagtgaccatctcctgtaccggcagcggcagcaacatcggagccccctacgacgtgtcctggtatcagcaactgcctggcaccgcccccaagctgctgatctaccacaacaacaagcggcccagcggcgtgcccgatagattcagcggctctaagagcggcaccagcgccagcctggctatcactggactccaggccgaggacgaggccgactactactgccagagctacgacagcagcagcatcagcaccatcttcggcggaggcaccaagctgacagtgctgggagct

SEQ ID NO: 84 - DNA, 339 bp, Artificial Sequence
  Synthetic Polynucleotide
cagagcgtgctgacacagcctccatccgtgtctggcgctccaggccagagagtgaccatctcctgtaccggcagcggcagcaacatcggagccccctacgacgtgtcctggtatcagcaactgcctggcaccgcccccaagctgctgatctaccacaacaacaagcggcccagcggcgtgcccgatagattcagcggctctaagagcggcaccagcgccagcctggctatcactggactccaggccgaggacgaggccgactactactgtgccacagtggaagccggcctgagcggctctgtgtttggcggcggaacaaagctgaccgtgctgggagct

SEQ ID NO: 85 - DNA, 321 bp, Artificial Sequence
  Synthetic Polynucleotide
gacatccagatgacccagagccccagcagcctgtctgccagcgtgggcgacagagtgaccatcacctgtagcgccagcagcagcgtgtcctacatgtactggtatcagcagaagcccggcaaggcccccaagctgctgatctacctgaccagcaatctggcctccggcgtgcccagcagattttctggcagcggctccggcaccgacttcaccctgacaatcagctccctccagcccgaggacttcgccacctactactgtcagcagtggcggagcaaccccttcaccttcggccagggcaccaagctggaaatcaagaga

SEQ ID NO: 86 - DNA, 324 bp, Artificial Sequence
  Synthetic Polynucleotide
gagatcgtgatgacccagagccctgccaccctgtccgtgtctccaggcgaaagagccaccctgagctgcaaggcttcccagagcgtgtccaacgacgtcgtgtggtatcagcagaagcccggccaggcccccagactgctgatctactacgccagcaacagatacaccggcatccccgccagattcagcggctctggcagcggcaccgagttcaccctgacaatcagcagcctccagagcgaggacttcgccgtgtactactgtcagcaggactacaccagcccctggaccttcggccagggcaccaagctggaaatcaagaga

SEQ ID NO: 87 - DNA, 321 bp, Artificial Sequence
  Synthetic Polynucleotide
gacatcctgctgacccagagccccgtgatcctgtccgtgtctcctggcgagagagtgtccttcagctgtcgggccagccagagcatcggcaccaacatccactggtatcagcagcggaccaacggcagccccagactgctgattaagtacgccagcgagtccatcagcggcatccccagcagattttccggcagcggctccggcaccgacttcaccctgagcatcaacagcgtggaaagcgaggacattgccgactactactgccagcagaacaacaactggcccaccaccttcggagccggcaccaagctggaactgaag

SEQ ID NO: 88 - DNA, 336 bp, Artificial Sequence
  Synthetic Polynucleotide
gatgtcgtgatgacccagagccccgacagcctggctgtgtctctgggagagagagccaccatcaactgcaagtccagccagtccctgctggacagcgacggcaagacctacctgaactggctccagcagaagcccggccagccccccaagagactgatctccctggtgtccaagctggactccggcgtgcccgatagattttccggctctggcagcggcaccgacttcaccctgacaatcagctcccttcaggccgaggacgtggccgtgtactattgctggcagggcacacacttccccggcacctttggcggaggcaccaaggtggaaatcaag

SEQ ID NO: 89 - DNA, 321 bp, Artificial Sequence
  Synthetic Polynucleotide
gagctgcagatgacccagagccctagcagcctgtctgccagcgtgggcgacagagtgaccatcacctgtagagccagccagagcatcagcagctacctgaactggtatcagcagaagcccggccagccccccaaactgctgatctactgggccagcaccagagaaagcggcgtgcccgatagattcagcggcagcgagagcggcaccaactacaccctgaccatcagctccctgcagcccgaggacttcgccacctacttttgccagcagagcgacagcctgcccatcacctttggacagggcacccggctggacattcag

SEQ ID NO: 90 - DNA, 339 bp, Artificial Sequence
  Synthetic Polynucleotide
gagcttgtgatgacccagagccccagcagcctgacagtgacagccggcgagaaagtgaccatgagctgcaagagcagccagagcctgctgaacagcggcaaccagaagaactacctgacctggtatcagcagaagcccggccagccccccaagctgctgatctactgggccagcaccagagaaagcggcgtgcccgatagattcaccggctctggcagcggcaccgacttcaccctgacaatcagcagcgtgcaggccgaggacctggccgtgtactactgccagaacgactacagctaccccctgaccttcggagccggcaccaagctggaaatcaag

SEQ ID NO: 91 - DNA, 321 bp, Artificial Sequence
  Synthetic Polynucleotide
gacatccaaatgacacagagtccttctagtttgagtgcgagcgtgggggacagggtgaccattacctgcagggccagccagagcataagctcataccttaattggtaccagcaaaaaccaggtaaggcccctaagctcctgatctacgcggcctcttcacttcaatctggggtcccttcccgcttcagtggctccggcagcggcaccgacttcacgctcactatatcaagtctgcagcctgaggatctcgccacctattactgtcaacaaagttattccacccctttcacctttggaccgggcacgaaagtggatattaag

SEQ ID NO: 92 - DNA, 309 bp, Artificial Sequence
  Synthetic Polynucleotide
tacatccacgtgacacagagccctagcagcctgtccgtgtccatcggcgatagagtgaccatcaactgccagacctctcaaggcgtgggcagcgacctgcactggtatcagcacaaacctggcagagcccctaagctgctgatccaccatgccagctctgtggaagatggcgtgcccagcagattttccggcaccggatttcacaccagcttcaacctgacaatcaacgacctccaggccgacgacatcggcacctactactgtcaagtgctccagagcttcggcagaggcagcagactggatacaaaa

SEQ ID NO: 93 - DNA, 336 bp, Artificial Sequence
  Synthetic Polynucleotide
gacatcgtgctgacccagagccctctgagcctggccgtgtctctgggacagcctgccatcatcagctgcaaggccagccagagcgtgtcctttgccggcacctctctgatgcactggtatcaccagaagcccggccagcagcccagactgctgatctacagagccagcaacctggaagccggcgtgcccgatagattttccggcagcggcagcaagaccgacttcaccctgaccatcagccccgtggaagccgaagatgccgccacctactactgccagcagagcagagagtacccctacaccttcggcggaggcaccaagctggaaatcaagagg

SEQ ID NO: 94 - DNA, 339 bp, Artificial Sequence
  Synthetic Polynucleotide
gacgttgtgatgacccagacccccctgagcctgcctgtgacacctggcgaacctgccagcatcagctgtcggagcagccagagcctggtgcacagaaacggcaacacctacctgcactggtatctccagaagcccggccagagccccaagctgctgatccacaaggtgtccaacagattcagcggcgtgcccgacagattctccggcagcggctctggcaccgacttcaccctgaagatcagccgggtggaagccgaggacctgggcgtgtacttctgtagccagagcacccatgtgccccccctgacatttggagccggcaccaagctggaactgaag

SEQ ID NO: 95 - DNA, 315 bp, Artificial Sequence
  Synthetic Polynucleotide
gagatcgtgatgacccagacccctgccaccctgtctgtgtctgccggcgagagagtgaccattacctgcaaggccagccagagcgtgtccaacgacgtgacctggtatcagcagaagcccggccaggcccccagactgctgatctacagcgccagcaacagatacagcggcgtgcccgccagattttccggcagcggctacggcaccgagttcaccttcaccatcagcagcgtgcagagcgaggacttcgccgtgtacttctgtcagcaagactacagcagcttcggccagggcaccaagctggaaatcaagagg

SEQ ID NO: 96 - DNA, 324 bp, Artificial Sequence
  Synthetic Polynucleotide
gacatccagatgacccagaccgccagcagcctgcctgcctctctgggcgacagagtgaccatctcctgtagcgccagccaggacatcagcaactacctgaactggtatcagcagaaacccgacggcaccgtgaagctgctgatcttctacagcagcaacctgcacagcggcgtgcccagcagattttctggcggcggaagcggcaccgactacagcctgaccatcagcaatctggaacccgaggacattgccacctacttttgccaccagtacagcaagctgccctggacctttggcggaggcaccaagctggaaatcaagaga

SEQ ID NO: 97 - DNA, 333 bp, Artificial Sequence
  Synthetic Polynucleotide
cagttcgtgctgacccagagcccttctgcctctgctgccctgggagcctctgccaagctgacctgtacactgagcagcgcccacaagacctacaccatcgactggtatcagcagcagaagggaaaggcccccagatacctgatccaagtgaagtccgacggcacctacacaaaggccaccggcgtgcccgatagattcagcggcagtagcagcggagccgatagatacctgattatccccagcgtgcaggccgacgacgaggccgattactactgcggcaccgattacaccggcggctacgtgttcggcggaggcacacaactgaccgtgaca

SEQ ID NO: 98 - DNA, 321 bp, Artificial Sequence
  Synthetic Polynucleotide
gacatccagatgacccagagccccagcagcctgtctgccagcgtgggcgacagagtgaccatcacctgtagagccagccagggcatcagctcttggctggcctggtatcagcagaagcccgagaaggcccccaagagcctgatctacgccgcctctagtctccagagcggcgtgcccagcagattttctggcagcggctccggcaccgacttcaccctgacaatcagctccctccagcccgaggacttcgccacctactactgccagcagtacaacagctacccccccacctttggcggaggcaccaaggtggaaatcaag

SEQ ID NO: 99 - DNA, 333 bp, Artificial Sequence
  Synthetic Polynucleotide
cagtctgtggtcacacagccacctagcatgtctgccgctccaggccagcaagtgaccatctcttgtagcggcggcaacagcaacatcgagcggaactacgtgtcctggtatctgcaactgcctggcacagcccctaagctggtcatcttcgacaacgacagacggcccagcggcatccccgatagattttctggcagcaagagcggcaccagcgccacactgggaattaccggacttcagacaggcgacgaggccgactactactgtggcacatgggactctagcctgagaggctgggttttcggcggaggcacaaagctgacagtgcttggt

SEQ ID NO: 100 - DNA, 333 bp, Artificial Sequence
  Synthetic Polynucleotide
cagtctgtgctgacacagcctccatctgcctctggcacacctggacagagagtgaccatcagctgtagcggcagcagaagcaacgtcggcggcaactacgtgttctggtatcagcaggtcccaggcgctacccctaagctgctgatctacagaagcaatcagcggcctagcggcgtgcccgatagatttgccggaagcaagagcggcagctctgccagccttgccatctctggactgagaagcgaggacgaggccgactactactgtgccacctgggatgatagcctgagcggcttcgtgtttggcaccggcaccaaagtgacagtgcttggt

SEQ ID NO: 101 - DNA, 321 bp, Artificial Sequence
  Synthetic Polynucleotide
gacatccagatgacccagagccccagcagcctgtctgccagcgtgggcgacagagtgaccatcacctgtagagccagccaggacgtgaacaccgccgtggcctggtatcagcagaagcctggcaaggcccccaagctgctgatctacagcgccagcttcctggaaagcggcgtgcccagcagattcagcggaagcagaagcggcaccgacttcaccctgaccatcagctccctccagcccgaggacttcgccacctactactgccagcagcactacaccacccctcccaccttcggccagaccaaggtggaaatcaagaga

SEQ ID NO: 102 - DNA, 315 bp, Artificial Sequence
  Synthetic Polynucleotide
cagtctgccctgacacagcctcctagcgcctctggctctcccggccagagcatcaccatcagctgtaccggcaccagcaacaacttcgtgtcctggtatcagcagcacgccggcaaggcccccaagctcgtgatctacgacgtgaacaagcggcccagcggcgtgcccgatagattcagcggcagcaagagcggcaacaccgccagcctgacagtgtctggcctccagaccgatgacgaggccgtgtactactgcggcagcctcgtgggcaactgggacgtgatctttggcggaggcaccaagctgaccgtgctg

SEQ ID NO: 103 - DNA, 321 bp, Artificial Sequence
  Synthetic Polynucleotide
gagctggtgctgacacagagccctggcaccctgtctctgtctgccggcgaaagagccaccctgagctgtagagccagccagagcgtgtcctctggcagcctggcttggtatcagcagaagccaggccaggcccccagactgctgatctacggcgcttctaccagagccaccggcatccccgatagattcagcggctctggctccggcaccgacttcaccctgacaatcggcagactggaacccgaggacctggccgtgtactactgccagcagtacggcaccagcccctacacattcggccagggcaccaagctggaaatc

SEQ ID NO: 104 - DNA, 291 bp, Artificial Sequence
  Synthetic Polynucleotide
gacatccagatgacccagagccccagcagcctgtctgccagcgtgggcgacagagtgaccatcacctgtcaggccagccaggacatcaacaactacctgaactggtatcagcagaagcccggcaaggcccccaagctgctgatctacgacgccagcaatctgcagaccggcgtgcccagcagattttccggctctggcagcggcaccgacttcaccttcaccatcgaggacattgccacctactactgccagcagtacaccttcggccctggcaccaaggtggacatcaaa

SEQ ID NO: 105 - DNA, 327 bp, Artificial Sequence
  Synthetic Polynucleotide
gacatccagatgacccagagccccagcagcctgtctgccagcgtgggcgacagagtgaccatcacctgtaccgccagcctgagcgtgtccagcacctacctgcactggtatcagcagaagcccggcagcagccccaagctgtggatctacagcaccagcaacctggcctccggcgtgcccagcagattttctggcagcggctctggcaccagctacaccctgaccatcagctccctccagcccgaggacttcgccacctactactgccaccagtaccacagaagccccctgacctttggcggaggcaccaaggtggaaatcaagaga

SEQ ID NO: 106 - DNA, 321 bp, Artificial Sequence
  Synthetic Polynucleotide
gacatccagatgacccagagccccagcagcctgtctgccagcgtgggcgacagagtgaccatcacatgcaaggccagccaggacgtgggaacagccgtggcctggtatcagcagaagcctggcaaggcccccaagctgctgatctacagcgccagctacagatccaccggcgtgcccagcagattttccggctctggcagcggcaccgacttcaccctgaccatctctagcctccagcccgaggacttcgccacctactactgccagcaccactactccgccccctggacatttggcggaggcaccaaggtggaaatcaag

SEQ ID NO: 107 - DNA, 324 bp, Artificial Sequence
  Synthetic Polynucleotide
gacatccagatgacccagagcttcagcagcctgagcgccagcgtgggcgacagagtgaccatcacctgtagagccagccaggacatcagcaactacctgaactggtatcagcagaagcccggcaaggcccccaagctgctgatctactacaccagcagactgcacagcggcgtgcccagcagattttctggcagcggctccggcaccgactacaccctgacaatcagctccctgcagcccgaggacttcgctacctacttctgtcagcaaggcaacaccctgccctggacctttggcggaggcaccaagctggaaatcaagaga

SEQ ID NO: 108 - DNA, 321 bp, Artificial Sequence
  Synthetic Polynucleotide
gacatccagatgacccagagcccccctagcctgtctgcctctgtgggcggcaaagtgaccatcacatgcaaggccagccaggacatcgaccgctacatggcctggtatcaggacaagcccggcaagggacccaagctgctgatccacgataccagcaccctccagcccggcatccccagcagattttctggcagcggctccggcagagactacagcttcagcatcagcaacctggaacccgaggacattgccacctactactgcctccagtacgacaacctgtggaccttcggcggaggcaccaagctggaaatcaagaga

SEQ ID NO: 109 - DNA, 321 bp, Artificial Sequence
  Synthetic Polynucleotide
gacatccagatgacccagagccctgccagcctgtctgcctctgtgggcgagacagtgaccatcacctgtcgggtgtccggcaacatccacaactacctggcctggtatcagcagaagcagggcaagagcccccaactgctggtgtacaacgccaagaccctggccgatggcgtgcccagcagattttctggctctggcagcggcacccagtacagcctgaagatcaacagcctccagcccgaggacttcggcagctactactgccagcacttctggtccaacccctacaccttcggcggaggcaccaagctggaaatcaag

SEQ ID NO: 110 - DNA, 321 bp, Artificial Sequence
  Synthetic Polynucleotide
gacatccagatgacacagtctccggcgtcactgtccgcctccgtgggggagactgtgactattatttgtagggcatcagttaacatctactcttatttggcctggtaccagcagaagcaaggcaagagtcctcagctgctggtgtataatgcgaagatcctggcagagggcgtgccgagccggttctccggcagcggctcaggtacccaattttccctcaagatcaattcactgcagccagaggactttggcagttactattgtcaacaccactacggcacattcactttcgggtccggtacaaaattggagattaagcga

SEQ ID NO: 111 - DNA, 321 bp, Artificial Sequence
  Synthetic Polynucleotide
gacattgtgatgacccagtctcacaaattcatgtccacatcagtaggagacagggtcagcgtcacctgcaaggccagtcagaatgtgggtaataatgtagcctggtatcaacagaaaccagggcaatctcctaaagtactgatttactcggcatcctaccggtacagtggagtccctgatcgcttcacaggcagtggatctgggacagatttcactctcaccatcagtaatgtgcagtctgaagacttggcagagtatttctgtcagcaatataacacctatccattcacgttcggctcggggacaaagttggaaataaaa

SEQ ID NO: 112 - DNA, 324 bp, Artificial Sequence
  Synthetic Polynucleotide
gacatccagatgacccagagcagcagcagcttcagcgtgtccctgggcgacagagtgaccatcacatgcaaggccagcgaggacatctacatccggctggcctggtatcagcagaagcccggcaacgcccccagactgctgattagcgccgccacctctctggaaaccggcatccccagcagattctccggctctggcagcggcgaggactacaccctgacaatcaccagcctccagaccgaggacgtggcaacctactactgccagcagtattggaccaccccctggacctttggcggaggcaccaagctggaaatcaagaga

SEQ ID NO: 113 - DNA, 321 bp, Artificial Sequence
  Synthetic Polynucleotide
gatatccagatgacccagtccagcagcagcttcagcgtgtccctgggcgacagagtgaccatcacctgtatggcctccgaggacatctacatccggctggcctggtatcagcagaagcccggcaacgcccccagactgctgattagcgccgccacctctctggaaaccggcgtgccaagcagattcagcggctctggcagcggcaaggactacaccctgagcatcacctccttgcagaccgaggacgtgggcacctactattgccagcagtattggagcagcccctggacctttggcggaggcacaaagctggaaatcaac

SEQ ID NO: 114 - DNA, 321 bp, Artificial Sequence
  Synthetic Polynucleotide
gacatccagatgacccagagcagcagcagcttcagcgtgagcctgggcgacagagtgaccatcacctgcatggccagcgaggacatctacatcagactggcctggtaccagcagaagcccggcaacgcccccagactgctgatcagcgccgccaccagcctggagaccggcgtgcccagcagattcagcggcagcggcagcggcaaggactacaccctgagcatcaccagcctgcagaccgaggacgtgggcacctactactgccagcagtactggagcagcccctggaccttcggcggcggcaccaagctggagatcaac

SEQ ID NO: 115 - DNA, 318 bp, Artificial Sequence
  Synthetic Polynucleotide
cagatcgtgctgacccagtcccccgctattatgtccgcatcaccgggcgaaaaagtgacgatctcctgtagcgcttcatctagcgtctcctacatgtattggtatcaacagaaacctgggtctagcccaaagccgtggatctacagaaccagtaaccttgccagtggggtgccagcccgcttcagcggtagtggcagtggaacttcctatagcctcacaataagcaacatggaggctgaagatgccgctgcctattactgccagcagtaccacagttacccaaccacgttcggcgggggaactaagctcgaagtaaaa

SEQ ID NO: 116 - DNA, 324 bp, Artificial Sequence
  Synthetic Polynucleotide
gacatccagatgacccagagccccagcagcctgtctgccagcgtgggcgacagagtgaccatcacctgtagagccagccagagcatcagcagctacctgaactggtatcagcagaagcccggcaaggcccccaaactgctgatctacgacgccagcaacctggaaaccggcgtgcccagcagattttccggcagcggctctggcaccgacttcaccttcaccatcagctccctccagcccgaggacattgccacctactactgccagcagtacgacaacctgcccctgacctttggcggaggcaccaaggtggacatcaagaga

SEQ ID NO: 117 - DNA, 339 bp, Artificial Sequence
  Synthetic Polynucleotide
gacgtcgtgatgacccagagccctctgagcctgcctgtgtccctgggcgatcaggccagcatctcctgcagatccagccagagactggtgcacagcaacggcaacacctacctgcactggtatctgcagaagcccggccagagccccaagctgctgatctaccgggtgtccaacagattccccggcgtgcccgatagattcagcggctctggcagcggcaccgacttcaccctgaagatcagccgggtggaagccgaggacctgggcatctatttctgcagccagagcacccacgtgccctacacctttggcggaggcaccaagctggaaatcaagcgg

SEQ ID NO: 118 - DNA, 327 bp, Artificial Sequence
  Synthetic Polynucleotide
agctacgagctgacccagcctcctagcgtgtccgtgtctcctggacagaccgccaccatctcttgcagcggcgatcaactgggcgggaagtacggccactggtatcagaagaagcccggccagagccccgtgctggtgctgtaccaggacagaaaacggcctgccggcatccccgagagattcagcggaagcagcagcggcaacaccatcaccctgaccatcagcggcacccaggccgtggatgaggccgactactactgccaggcttgggacaccaatctgggcggcgtgttcggcggaggcaccaaagtgacagtgctgggacag

SEQ ID NO: 119 - DNA, 339 bp, Artificial Sequence
  Synthetic Polynucleotide
aacttcatgctgacccagccccacagcgtgtccgagagccctggcaagaccgtgaccatctcctgcaccagaagcagcggctctatcgccagcaaatacgtgcagtggtatcagcagaggcccggcagcagccctaccaccgtgatctacgaggacaaccagaggcctagcggcgtgcccgatagattcagcggcagcatcgacaccagcagcaacagcgccagcctgaccatcagcggcctgagaacagaggacgaggccgactactactgccacagctacgacagcaacaaccactccgtgttcggcggaggcaccaaagtgacagtgctgggacag

SEQ ID NO: 120 - DNA, 324 bp, Artificial Sequence
  Synthetic Polynucleotide
gacatccagatgaaccagagccccagcagcctgagcgccagcctgggcgataccatcaccatcacctgtcacgccagccagaacatcaacgtgtggctgagctggtatcagcagaagcccggcaacatccccaagctgctgatctacaaggccagcaacctgcacaccggcgtgcccagcagattttctggcagcggctctggcaccggcttcaccattaccatcagctccctccagcccgaggacattgccacctactactgccagcagggccagagctacccctggacatttggcggaggcaccaagctggaaatcaagaga

SEQ ID NO: 121 - DNA, 324 bp, Artificial Sequence
  Synthetic Polynucleotide
gacatcctgctgacacagagccccgccatcctgtccgtgtctccaggcgagagagtgtcctttagctgccgggccagccagaacatcggcaccagcatccactggtatcagcagcggaccaacggcagccccagactgctgattaagtacgccagcgagtccgtgtccggcatccccagcagattttctggcagcggctccggcaccgacttcaccctgagcatcaacagcgtggaaagcgaggacattgccgactactactgccagcacaccaatagctggcccaccacctttggcggaggcaccaagctggaaatcaagaga

SEQ ID NO: 122 - DNA, 339 bp, Artificial Sequence
  Synthetic Polynucleotide
gacatcgtgatgacccagagccccgatagcctggccgtgtctctgggagagagagccaccatcaactgcaagagcagccagagcctgctgaacagcggcgaccagaagaactacctgacctggtatcagcagaagcccggccagccccccaagctgctgatctactgggccagcaccagagaaagcggcgtgcccgatagattcagcggcagcggaagcggcaccgacttcaccctgaccatcagttctcttcaggccgaggacgtggccgtgtactactgccagaacgactacagctaccccctgaccttcggccagggcaccaaggtggaaatcaag

SEQ ID NO: 123 - DNA, 321 bp, Artificial Sequence
  Synthetic Polynucleotide
gacatccagatgacccagagccccagcagcctgtctgccagcgtgggcgacagagtgaccatcacatgcaaggccagccaggacgtgtccattgccgtggcctggtatcagcagaagcccggcaaggcccccaaggtgctgatctacagcgccagctacagatacaccggcgtgcccgacagattcagcggctctggcagcggcaccgacttcaccttcaccatcagctccctccagcccgaggatattgccgtgtactactgccagcagcactacatcacccccctgacctttggcggaggcaccaaggtggaaatcaag

SEQ ID NO: 124 - DNA, 330 bp, Artificial Sequence
  Synthetic Polynucleotide
caggctgtcgtgacacagcctcctagcgcctctggcacaccaggccagagagtgaccatctcctgtagcggcagcagcagcaacatcggcagcaacaccgtgaactggtatcagcaggtgcccggcaccgctcccaagctgctgatctacagcaacaaccagcggcccagcggcgtgcccgatagattttctggcagcaagagcggcaccagcgccagcctggctatctctggactccagtccgaggacgaggccgactactattgcgccgcctgggacgatagcctgaacggctgggtgttcggcggaggcaccaagctgacagtgctg

SEQ ID NO: 125 - DNA, 321 bp, Artificial Sequence
  Synthetic Polynucleotide
gacatccagatgacccagagccccagcacactgagcgccagcgtgggcgacagagtgaccatcacctgtcgggccagccagaacatcaacaagtggctggcctggtatcagcagaggcccggaaaagccccccagctgctgatctacaaggccagcagcctggaaagcggcgtgcccagcagattttctggcagcggctctggcaccgagtacaccctgaccatcagctccctccagcccgacgacttcgccacctactactgccagcagtacaacagctacgccaccttcggccagggcaccaaggtggaaatcaagaga

SEQ ID NO: 126 - DNA, 327 bp, Artificial Sequence
  Synthetic Polynucleotide
cagagcgtcgtgacacagcctcctagcgtgtcagtggcccctggcaagaccgccagaatcacctgtggccggaacaacatcggcagcaagagcgtgcactggtatcagcagaagcccggccaggctcctgtgctggtggtgtacgacgacagcgacagacccagcggcatccccgagagattcagcggcagcaactccggcaataccgccaccctgaccatcagcagagtggaagccggcgacgaggccgactactactgccaagtgtgggacagcagcagcgatcacgtggtgtttggcggaggcaccaagctgacagtgctgggt

SEQ ID NO: 127 - DNA, 333 bp, Artificial Sequence
  Synthetic Polynucleotide
gacatcgtgctgacacagagccctgcttctctggccgtgtctctgggacagagagccaccatcagctgtagagccagcgagagcgtggacaactacggcaacaccttcatgcactggtatcagcagaagcccggccagcctcctaagctgctgatctacagagccagcaacctggaaagcggcatccccgccagattttctggcagcggcagcagaaccgacttcaccctgaccatcaatcccgtggaagccgacgacgtggcaacctactactgccagcagagcaacgaggaccctcctacatttggagccggcaccaagctggaactgaaa

SEQ ID NO: 128 - DNA, 324 bp, Artificial Sequence
  Synthetic Polynucleotide
gagatcgtgctgacacagagccctggcaccctgagcctgtctccaggcgaaagagccacactgagctgtcgggccagccagagcgtgtccaatacctacctggcctggtatcaccagaggcccggacaggctccccggctgctgatctatggcgcttctagcagagccaccggcatccccgatagattcagcggctctggcagcggcaccgacttcgccctgacaatcagctccctggaacccgaggacttcgccgtgtactactgccagcagtacagcaactcctggaccttcggccagggcaccaaggtggaaatcaagaga

SEQ ID NO: 129 - DNA, 324 bp, Artificial Sequence
  Synthetic Polynucleotide
gagctgacacaggaccctgctgtgtctgttgccctgggccagacagtgcggattacctgtcaaggcgacagcctgagaagcaactacgccaactggtatcagcagaagcccggacaggctcccgtgctggttatctacggccagaacaacagacccagcggcatccccgatagattcagcggctctagctctggcaataccgccagcctgacaatcactggcgctcaggctgccgatgaggccgactactactgcgatagcagagtgtccaccggcaatcacgtggtgtttggcggcggaacaaagctgacagtgctcggacaa

SEQ ID NO: 130 - DNA, 318 bp, Artificial Sequence
  Synthetic Polynucleotide
gacatccagatgacacagagccctagcagcctgtctgccagcgtgggagacagagtgaccatcacctgtagcgccaccagcagcatcagctacatgcactggtatcagcagaagcccggcaaggcccctaaaggctggatctacgataccagcaaactggcccacggcgtgcccagcagattttctggttctggcagcggcaccgacttcaccctgacaatatctagcctccagcctgaggacttcgccacctactactgccaccagagaagaagctaccccttcaccttcggccagggcaccaaggtggaaatcaaa

SEQ ID NO: 131 - DNA, 324 bp, Artificial Sequence
  Synthetic Polynucleotide
gacatccagatgacacagagccctagcagcctgtctgccagcgtgggagacagagtgaccatcacatgcaaggccagccagggcttcaacaaatacgtggcctggtatcagcagaagcccggcaaggctcctaagctgctgatctactacaccagcacactccagcctggcgtgcccagcagattttctggctctggcagcggcagagactacaccctgacaatatccagcctccagccagaggacttcgccacctactactgtctccagtacggcaacctgctgtacgcctttggacagggcaccaaggtggaaatcaagaga

SEQ ID NO: 132 - DNA, 321 bp, Artificial Sequence
  Synthetic Polynucleotide
gacatccagatgacacagagccctagcagcctgtctgccagcgtgggagacagagtgaccatcacctgtagagccagccaggacatccggtactacctgaactggtatcagcagaagcccggcaaggcccctaagctgctgatctatgtggcctccagcctccagagcggagtgccttctagattttctggcagcggctccggcaccgagtttaccctgacagtgtctagcttgcagcccgaggacttcgccacctactactgcctgcaagtgtacagcacccctcggacctttggacagggcaccaaggtggaaatcaaa

SEQ ID NO: 133 - DNA, 321 bp, Artificial Sequence
  Synthetic Polynucleotide
gagatcgtgatgacccctagcagcgccacactgagtgtgtctccaggcgaaagagccacactgtcctgtagagccagccagagcgtgtccagaaacctggcctggtatcagcagaagcctggacaggctccccggctgttgatctacggcgcttctacaagagccaccggcattcccgccagattttctggctctggcagcggcaccgagttcaccctgacaatctctagcctccagagcgaggacttcgccgtgtactactgccaccagtacagcaactggatgtgcagcttcggccagggcaccaagctggaaatcaaa

SEQ ID NO: 134 - DNA, 324 bp, Artificial Sequence
  Synthetic Polynucleotide
gacatccagatgacccagagccccagcagcctgtctgccagcgtgggcgacagagtgaccatcacatgcaaggccagcaagaacatcagaagctacctggcctggtatcagcagaagcccggcaaggcccccaagctgctgatctacagcggcagcacactgcacagcggcgtgcccagcagattttccggctctggcagcggcaccgacttcaccctgaccatctctagcctccagcccgaggacttcgccacctactactgccagcagcaccacgagtaccccctgacattcggccagggcaccaaggtggaaatcaagaga

SEQ ID NO: 135 - DNA, 330 bp, Artificial Sequence
  Synthetic Polynucleotide
cagtctgtggtcacacagcctccatccgtgtctgctgcccctggacagaaagtgaccatctcctgtagcggcagcagcagcaacatcggcaacaactacgtgtcctggtatcagcagctccccggcacagctcccaaactgctgatctacgacaacaacaagcggcccagcggcatccccgatagattttctggcagcaagagcggcaccagcgccacactgggaattaccggacttcagacaggcgacgaggccgactactactgtggcacatgggatggcagcctgtacaccatgcttttcggcggaggcaccaagctgacagtgctt

SEQ ID NO: 136 - DNA, 339 bp, Artificial Sequence
  Synthetic Polynucleotide
cagtctgtgctgacacagcctcctagtgtgtctggcgctcctggacagagagtgaccatctcttgtaccggcagcagcagcaatatcggagccggctatgacgtgcactggtatcagcagctccctggcacagcccctaaactgctgatcttcggcaacagcaacagacccagcggcgtgcccgatagattcagcggctttaagagcggcacaagcgccagcctggctatcactggactgcaagccgaggacgaggccgactacttctgccagagctacgatagcagcctgagcggcagcggagtgtttggcacaggcaccaaagtgacagtgcttggc

SEQ ID NO: 137 - DNA, 342 bp, Artificial Sequence
  Synthetic Polynucleotide
ctgcctgttctgacacagcctccatctgcctctggcacacctggacagagagtgaccatcagctgtagcggcagaagcagcaacatcggcagcaacagcgtgaactggtacagacagcttcctggcgctgcccctaagctgctgatctacagcaacaaccagcggcctcctggcgtgccagtcagattttctggcagcaagagcggcacaagcgccagcctggctatttctggactccagtctgaggacgaggccacctactactgtgccacctgggacgacaacctgaacgtgcactacgtgttcggcaccggcaccaaagtgacagtgcttggaagtaga

SEQ ID NO: 138 - DNA, 333 bp, Artificial Sequence
  Synthetic Polynucleotide
gacatcgtgctgacacagagccctgcttctctggccgtgtctctgggagagagagccaccatcaactgtagagccagcgagagcgtgtccgtgattggagcccacctgatccactggtatcagcagaagcctggacagcctcctaagctgctgatctacctggcctccaacctggaaacaggcgtgccagccagattttctggcagcggctctggcaccgatttcaccctgacaatcagcagcctccaggccgaagatgccgccatctactactgcctccagagccggatcttccccagaacctttggacagggcaccaagctggaaatcaaa

SEQ ID NO: 139 - DNA, 336 bp, Artificial Sequence
  Synthetic Polynucleotide
gacatcgtgctgacacagtctcccgccacactgtcactgagccctggcgatagagccacactgagctgtagagccagcgagagcgtgacaatcctgggcagccacctgatctactggtatcagcagaagcccggacaggcccctagactgctgattcagctcgccagcaatgtgcagacaggcatccctgccagattttccggcagcggcagcagaaccgatttcaccctgaccataagcagcctggaacctgaggacttcgccgtgtactactgcctccagagccggacaatccccagaacctttggacagggcaccaagctggaaatcaagaga

SEQ ID NO: 140 - DNA, 339 bp, Artificial Sequence
  Synthetic Polynucleotide
gacttcgtgatgacacagagccctgatagcctggccgtgtctctcggcgagcgagtgaccatgagctgcaagtctagccagagcctgctgaacagcggcaaccagaagaactacctgacctggtatcagcagaagcccggccagcctcctaagctgctgatctactgggccagcaccagagaaagcggcgtgcccgatagattttctggctctggcagcggcaccgacttcaccctgacaatttctagcctgcaagccgaggacgtggccgtgtactactgccagaacgactacagctacccctacaccttcggccagggcaccaagctggaaatcaaa

SEQ ID NO: 141 - DNA, 339 bp, Artificial Sequence; identical to SEQ ID NO: 140
  Synthetic Polynucleotide

SEQ ID NO: 142 - DNA, 324 bp, Artificial Sequence
  Synthetic Polynucleotide
gacgtgcagatcacacagagccctagctacctggctgcctctcctggcgagacaatcaccatcaactgtcgggccagcaagagcatcagcaaggacctggcctggtatcaagagaagcccggcaagaccaacaagctgctgatctacagcggcagcacactccagtctggcatccccagcagattttccggctctggcagcggcaccgatttcaccctgaccataagcagcctggaacctgaggacttcgccatgtactactgccagcagcacaacaagtacccctacacctttggcggaggcaccaagctggaaatcaagaga

SEQ ID NO: 143 - DNA, 318 bp, Artificial Sequence
  Synthetic Polynucleotide
gagatcgtgctgacacagagccctaccagcatgacagcctctccaggcgagcaagtgaccatcacctgtagagccagcagcagcatcaactacatgcactggtatcagcagaagcctggcgcaagccccagaccttggatctacgagacaagcaagctggcctccggcgtgcccgatagattttctggatctgccagcggcaccagctacagcctgaccatcaacaacatggaagccgaggacgccgccacctactactgccagcagtggaattacccctcctggacctttggcggaggcaccaagctggaacttaaa

SEQ ID NO: 144 - DNA, 339 bp, Artificial Sequence
  Synthetic Polynucleotide
gacatcgtgatgacacagagcccttctagcctggccgtgtctgagggcgagacagtgaccatcaactgcaagagcagccagagcttcctgtctagcggcgacggcaagaattacgtggcctggtatcagtacaagcccggacagagccccaagctgctgatctactgggccagcacaagacagagcggcgtgcccgatagattcatcggctctggcagcggcaccgacttcaccctgacaatctctacagtgcaggccgaggacctggctatctactactgccagcagtattacgacacccctctgacctttggctccggcaccaagctggaaatcaaa

SEQ ID NO: 145 - DNA, 339 bp, Artificial Sequence
  Synthetic Polynucleotide
gacgtgctgatgacccagacacctgtgtctctgccagtgtctctcggaggccaggtgtccatctcctgtagaagcagccagagcctggtgcactccgacggcgatacctacctgcactggtatctccagaagcctggacagagccctcagctcctgatctaccgggtgtccaacagattcagcggcgtgcccgatagattttccggcagcggctctggcaccgacttcaccctgaagatcagcagagtggaacccgaggacctgggcctgtactactgtctccagaccacacacttcccaccttggacctttggcggaggcaccaagctggaaatgaaa

SEQ ID NO: 146 - DNA, 333 bp, Artificial Sequence
  Synthetic Polynucleotide
gagatcgtgctgacacagagccccgatttccagagcgtgacccctaaagaaaaagtgaccatcacctgtcgggccagcgagagcgtggacacattcggcatcagcttcatgaactggttccagcagaagcccgatcagagccccaagctgctgattcacgccgccagcaatcaaggcagcggagtgcctagcagattttccggctctggcagcggcaccgatttcaccctgaccatcaatagcctggaagccgaggatgccgccacctactactgccagcagagcaaagaggtgcccttcacctttggcggaggcaccaaggtggaaatcaaa

SEQ ID NO: 147 - DNA, 321 bp, Artificial Sequence
  Synthetic Polynucleotide
gccattcagctcacacagagcccttctagcctgagcgcctctgtgggcgacagagtgaccatcacatgtagagccagccagggcatcagcagcgcccagcagaaacctggaaaggcccctaagctgctgatcctggcctggtacagcagcctggaaagcggagtgcctagcagattcagcggctacgatgcctctggcagcggcaccgatttcaccctgacaatatccagcctccagcctgaggacttcgccacctactactgccagcagttcaacagctacccctacaccttcggccagggcaccaagctggaaatcaaa

SEQ ID NO: 148 - DNA, 336 bp, Artificial Sequence
  Synthetic Polynucleotide
gacatcgtgatgacacagagccccgccacactgtcactgtctccaggcgaaagagccacactgagctgtcggagcagcaagagcctccagaacgtgaacggcaacacctacctgtactggttccagcagaagcccggccagtctcctcagctcctgatctacagaatgagcaacctgaacagcggcgtgcccgacagattttctggcagcggaagcggcaccgagttcaccctgaccataagcagcctggaacctgaggacttcgccgtgtactactgtatgcagcacctggaataccccatcaccttcggagccggcaccaagctggaaatcaaa

SEQ ID NO: 149 - DNA, 324 bp, Artificial Sequence
  Synthetic Polynucleotide
gacatccagatgacacagagccctagcagcctgtctgccagcgtgggagacagagtgaccatcacatgcaaggccagcgaccacatcaacaactggctggcctggtatcagcagaagcctggacaggcccctaagctgctgatctacggcgctaccacactggaaacaggcgtgcccagcagattttctggcagcggctctggcaccgactacaccctgacaatatccagcctccagcctgaggacttcgccacctactactgtcagcagagctggaacaccccttggacattcggccagggcaccaagctggaaatcaagaga

SEQ ID NO: 150 - DNA, 333 bp, Artificial Sequence
  Synthetic Polynucleotide
cagatcgtgctgtctcagtctcctgccatcctgagcgcttccccaggcgagaaagtgaccatgacctgtagagccagcagcagcgtgtcctacatgcactggtatcagcagaagcccggcagcagccctaagccttggatctacgccaccagcaatctggcctctggcgtgccagccagattttctggctctggcagcggcaccagctacagcttcacaatcagcagagtggaagccgaggacgccgccacctactattgtcagcagtggaccttcaatcctcctaccttcggcggaggcacccggctggaaatcaaaagaacagtggctgct

SEQ ID NO: 151 - DNA, 321 bp, Artificial Sequence; identical to SEQ ID NO: 56
  Synthetic Polynucleotide

SEQ ID NO: 152 - DNA, 321 bp, Artificial Sequence
  Synthetic Polynucleotide
gacatccagatgacacagagccctagcagcctgtctgccagcgtgggagatagagtgaccatcaactgcaaggccagccaggacatcaacagctacctgagctggttccagcagaagcctggcaaggcccctaagacactgatctaccgggccaacagactggtggatggcgtgccaagcagattttctggcagcggcagcggccaggattacaccctgacaatatccagcctccagcctgaggacttcgccacctactactgcctccagtacgacgagttccctctgacctttggcggaggcaccaaggtggaaatcaaa

SEQ ID NO: 153 - DNA, 336 bp, Artificial Sequence
  Synthetic Polynucleotide
gacatcgtgatgacccagacacctctgagcctgagcgtgacacctggacagcctgccagcattagctgcaagagcagccagtctctgctggacggcgacggcaagacctacctgaattggctgctccagaagcctggacagagccctcagcggctgatctacctggtgtccaagctggatagcggcgtgcccgatagattttctggcagcggctctggcaccgacttcaccctgaagatcagcagagtggaagccgaggacgtgggcgtgtactactgttggcagggcacacacttccccagaacattcggccagggcacaaagctggaaatcaaa

SEQ ID NO: 154 - DNA, 318 bp, Artificial Sequence
  Synthetic Polynucleotide
gacatccagatgacacagagccctagcagcctgtctgccagcgtgggagacagagtgaccatcacatgcaaggccagccaggatgtgtctacagccgtggcctggttccagcagaagcctggaaaagcccctaagctgctgatctacagccccagctacagatacaccggcgtgcccagcagattttctggcagcggctctggcaccgacttcaccctgacaatatccagcctccagcctgaggacttcacctactactgccagcagctctacagcaccccttacacattcggccagggcaccaaggtggaaatcaaa

SEQ ID NO: 155 - DNA, 333 bp, Artificial Sequence
  Synthetic Polynucleotide
gacatccagatgacacagagccctagcagcctgtctgccagcgtgggagacagagtgaccatcacctgtagagccagccagagcgtgtccaccagcagctacaactacatgcactggtatcagcagaagcccggcaagcctcctaagctgctgattaagtacgccagcaacctggaaagcggcgtgcccagcagattttctggcagcggctctggcaccgacttcaccctgacaatatccagcctccagcctgaggacttcgccacctactactgtcagcactcctgggagatccctctgacattcggccagggcaccaaggtggaaatcaaa

SEQ ID NO: 156 - DNA, 324 bp, Artificial Sequence
  Synthetic Polynucleotide
gagatcgtgctgacacagtctccagccacactgagcgcttctccaggcgagagagtgaccctgacctgtagagccagcagcaacgtgatctccagctacgtgcactggtatcagcagaagcctggcagcagccccagactgtttctgtacagcaccagcaatctggcctccggcgtgccaagcagattttctggctctggcagcggcaccgacttcacctttaccatctctagcctggaagccgaggacgccgccacctactactgtcagcagtacagcggctaccctctgaccttcggccagggcacaagactggaaatcaaa

SEQ ID NO: 157 - DNA, 324 bp, Artificial Sequence
  Synthetic Polynucleotide
gagatcgtgctgacacagtctcccgccacactgtcactgtctccaggcgaaagagccacactgagctgtagagccagcagcaacgtgatctccagctacgtgcactggtatcagcagaagcctggacaggcccctcggctgctgatctacagcacaagcaatctggcctctggcatccccgccagattttctggctctggaagcggcaccgacttcaccctgaccataagcagcctggaacctgaggacttcgccgtgtactactgccagcagtatagcggctaccctctgaccttcggccagggcacaagactggaaatcaaa

SEQ ID NO: 158 - DNA, 336 bp, Artificial Sequence
  Synthetic Polynucleotide
gacgtggtcatgacacagaccccactgagcctgcctgtgtctctgggagatcaggccagcatctcctgtagaagcagccagagcctggtgcacagcaacggcaacacctacctgcggtggtatctccagaagcctggacagagccccaaggtgctgatctacaaggtgtccaacagagtgtccggcgtgcccgatagattttctggcagcggctctggcaccgacttcaccctgaagatcaatagagtggaagccgaggacctgggcgtgtacttctgtagccagagcacccatgtgccttggacctttggcggaggcaccaagctggaaatcaag

SEQ ID NO: 159 - DNA, 330 bp, Artificial Sequence
  Synthetic Polynucleotide
tctgtgctgacccagcctagctccgtgtctgctgctcctggacagaaagtgaccatctcctgtagcggcagcaccagcaacatcggcaacaactacgtgtcctggtatcagcagcaccccggcaaggcccctaagctgatgatctacgacgtgtccaagaggcccagcggcgtgccagatagattttccggcagcaagagcggcaacagcgccagcctggatattagcggactccagtctgaggacgaggccgactactattgcgccgcctgggatgatagcctgagcgagtttctgtttggcaccggcaccaagctgacagtgcttgga

SEQ ID NO: 160 - DNA, 339 bp, Artificial Sequence
  Synthetic Polynucleotide
cagtctgtggtcacacagcctccatctgtgtctggcgctccaggccagagagtgaccatctcttgtaccggcagcagcagcaatatcggagccggctatgacgtgcactggtatcagcagctccctggcacagcccctaaactgctgatctacggcaacagcaacagacccagcggcgtgcccgatagattttccggctctaagagcggcacaagcgccagcctggctattactggactccaggccgaggacgaggccgactactactgtcagagctacgacagcagcctgagcggcagctatgtgtttggcaccggcaccaagctgacagtgcttgga

SEQ ID NO: 161 - DNA, 333 bp, Artificial Sequence
  Synthetic Polynucleotide
cagtctgtggttacacagcctgcctccgtgtctggctctcctggccagagcatcaccatcagctgtaccggcaccagctctgatgtcggcggctacaattacgtgtcctggtatcagcagcaccccggcaaggcccctaagctgatgatctacgacgtgtccaagaggcccagcggcgtgtccaatagattcagcggcagcaagagcggcaacaccgccagcctgacaatttctggactgcaagccgaggacgaggccgactactactgtagcagctacaccagcagcagcacactggtgtttggcggaggcaccaagctgacagttcttgga

SEQ ID NO: 162 - DNA, 324 bp, Artificial Sequence
  Synthetic Polynucleotide
gacgtggtcatgacacagagcccttctagcctgtctgccagcgtgggcgacagagtgacaatcacctgtcagagcagcctggacatcagccactacctgaactggtatcagcagaagcccggcaaggcccctaagctgctgatctacgacgccagcaatctggaaaccggcgtgcccagcagattttctggcagcggaagcggcacccacttcaccttcacaatatccagcctccagcctgaggacttcgccacctactactgccagcagtacgacaacctgcctctgacctttggcggaggcaccaagctggaaatcaagaga

SEQ ID NO: 163 - DNA, 372 bp, Artificial Sequence
  Synthetic Polynucleotide
gacgtgatgctgacccagacaccactgagcctgcctgtgtctctgggcgatcaggccagcatctcctgtagaagcagccagagcatcctgcacagcaccggcgatacctacctggaatggtatctccagaagcctggacagagccccaagctgctgattaacaaggtgtccaaccggctgagcggcgtgcccgatagattttctggcagcggctctggcaccgacttcaccctgaagatcagcagagtggaagccgaggacctgggcgtgtactactgcttccaaggcagccatgttccttggacctttggcggaggcaccaagctggaaatcaagagagctgacgccgctcctaccgtgtccatctttcct

SEQ ID NO: 164 - DNA, 324 bp, Artificial Sequence
  Synthetic Polynucleotide
ctgcctgttctgacacagcctccatccgtgtctgtggcccctggaaagaccgccagaatcacatgcggcggcaacaacatcggcagcaagagcgtgcactggtatcagcagaagcctggacaggctcctgtgctggtggtgtacgacgacagcgatagacctagcggcatccccgagagattcagcggcagcaattccggcaataccgccacactgaccatcagcagagtggaagctggcgacgaggccgactactactgccaagtgtgggacagcagcagcgactacgtggtgtttggcggcggaacaaagctgacagtgctt

SEQ ID NO: 165 - DNA, 333 bp, Artificial Sequence
  Synthetic Polynucleotide
gagctggtcatgacacagagccctgcttctctggccgtgtcactgggacagagagccaccatctcttgcagagccagcgagagcgtggacagctacggcaagagcttcatgcactggtatcagctcaagcccggccagcctcctaagctgctgatctacagagcctccaacctggaaagcggcgtgccagccagattttctggcagcggcagcagaaccgacttcaccctgaccattgatcccgtggaagccgatgatgccgccacctactactgccagcagaacaacgaggacccctggacatttggcggaggcaccaagctggaaatcaaa

SEQ ID NO: 166 - DNA, 336 bp, Artificial Sequence; identical to SEQ ID NO: 139
  Synthetic Polynucleotide

SEQ ID NO: 167 - DNA, 336 bp, Artificial Sequence
  Synthetic Polynucleotide
gatattgtgctgactcagagccctgccactctgagccttagtccaggcgacagagctaccatctcctgtagggcctctgaatccgtgaccattctgggctctcatctcatatattggtatcaacaaaagccgggccagcctccacggctgctcattcaactggcctctaacgtgcagaccggcgtgccagctagattttctggctctggctcccggaccgactttacactgacaatcagctccgtggaacccgaagattttgccgtctattattgcctccagtccaggaccattcctcggacattcggccagggaacaaaactcgaaatcaagcgg

SEQ ID NO: 168 - DNA, 321 bp, Artificial Sequence
  Synthetic Polynucleotide
gacgtggtcatgacacagagcccttctagcctgtctgccagcgtgggcgacagagtgaccatcacctgtatggcctccgaggacatctacatccggctggcctggtatcagcagaagcctggaaacgcccctaagctgctgatctacgccgccacctctctggaaacaggcgtgccaagcagattttccggcagcggctctggcaccgatttcaccctgacaatatccagcctccagcctgaggacttcgccacctactactgccagcagtattggagcagcccctggacatttggcggaggcaccaaggtggaaatcaaa

SEQ ID NO: 169 - DNA, 318 bp, Artificial Sequence
  Synthetic Polynucleotide
tcttctgagctgacacaggaccctgccgtgtctgttgctctgggccagacagtgcggattacctgtcagggcgatagcctgagaagctactacgcctcctggtatcagcagaagccaggccaggctcctgtgctggtcatctacggcaagaacaacagacccagcggcatccccgatagattcagcggaagcagctctggcaataccgccagcctgacaattactggcgctcaggccgaggacgaggccgactactactgcaacagcagagatagcagcggctgggttttcggcggaggcacaaaactgacagtgctg

SEQ ID NO: 170 - DNA, 336 bp, Artificial Sequence
  Synthetic Polynucleotide
caatctgctctgacacagcctgccagcgtgtcaggatctcctggacagagcatcaccatctcttgcaccggcaccagctctgatgtcggcggctacaattacgtgtcctggtatcagcagcaccccggcaaggcccctaagctgatgatctacgacgtgtccaacagacccagcggcgtgtccaatagattctccggcagcaagagcggcaacaccgccagcctgacaatttctggactgcaagccgaggacgaggccgactactactgtagcagctacaccagcagcagcacactggtgtacgtgttcggcacaggcaccaaagtgaccgtgctt

SEQ ID NO: 171 - DNA, 330 bp, Artificial Sequence
  Synthetic Polynucleotide
caatctgtgctgacccagcctagatccgtgtctggctctcctggacagagcgtgaccatctcttgtaccggcaccagctctgatgtcggcggctacaattacgtgtcctggtatcagcagcaccccggcgaagcccctaagctgattatctacgacgccgacaagcggcccagcggcatcagcaatagattcagctctggcaagagcggcaacaccgccagcctgacaatcagcggactccaggtggaagatgaggccgactactactgctgctcctatgccggcggaagcacctgggttttcggaggcggtacaaaagtgaccgtgctg

SEQ ID NO: 172 - DNA, 336 bp, Artificial Sequence
  Synthetic Polynucleotide
caatctgctctgacacagcctgccagcgtgtcaggatctcctggacagagcatcaccatctcttgcaccggcaccagctctgatgtcggcggctacaattacgtgtcctggtatcagcagcaccccggcaaggcccctaaagtgattatcagcgaagtgaacaacagacccagcggcgtgtcccacagattcagcggctctaagtctggcaacaccgccagcctgacaatctctggactgcaagccgaggacgaggccgactacttctgtagcagctacaccagcggcagaaccctgtacgtgttcggcacaggcagcaaagtgacagtgctggga

SEQ ID NO: 173 - DNA, 333 bp, Artificial Sequence
  Synthetic Polynucleotide
caatctgctctgacacagcctgccagcgcctctggatctcctggacagagcgtgaccatctcctgtaccggcacctcttctgatgtcggcggctacaactacgtgtcctggtatcagcagcaccccggcaaggcccctaagctgatgatctacgacgtgtccaacagacccagcggcgtgtccaatagattctccggcagcaagagcggcaacaccgccagcctgacaatttctggactgcaagccgaggacgaggccgactactactgtagcagctacaccagcagcagcacactgtacgtgttcggcacaggcacccagctcacagttctt

SEQ ID NO: 174 - DNA, 327 bp, Artificial Sequence
  Synthetic Polynucleotide
gagatcgtgctgacacagtctcccgccacactgtcactgtctccaggcgaaagagccacactgagctgtagcgccagcagcagcgtgtcctacatgtactggtatcagcagaagcccggacaggcccctagactgctgatctacagaaccagcaacctggcctctggcatccccgccagattttctggctctggcagcggcaccgatttcaccctgaccataagcagcctggaacctgaggacttcgccgtgtactactgccagcagtaccacagctaccccaccacctttggacagggcaccaaggtggaaatcaagcggacagtt

SEQ ID NO: 175 - DNA, 321 bp, Artificial Sequence
  Synthetic Polynucleotide
gacgtggtcatgacacagagcccttctagcctgtctgccagcgtgggcgacagagtgaccatcacctgtaaagccagcgaggacatctacatccggctggcctggtatcagcagaagcctggaaaggcccctaagctgctgatctacgccgccacctctctggaaacaggcgtgccaagcagattttccggcagcggctctggcaccgatttcaccctgacaatatccagcctccagcctgaggacttcgccacctactactgccagcagtattggaccacaccttggacctttggcggaggcaccaaggtggaaatcaaa

SEQ ID NO: 176 - DNA, 324 bp, Artificial Sequence
  Synthetic Polynucleotide
gacatccagctgactcagagccctagctttctgagcgccagcgtgggcgacagagtgaccattacatgtagagccagccagggcatcagcaccgacctgaactggtatcagcagaagcctggcaaggcccctaagctgctgatctacgccgccagcaatctggaaagcggcgtgccaagcagattttccggctctggcagcggcaccgagttcaccctgacaatatctagcctccagcctgaggacttcgccacctactactgccagcagagctacaactggccctacacctttggcggaggcaccaaggtggaaatcaagaga

SEQ ID NO: 177 - DNA, 324 bp, Artificial Sequence
  Synthetic Polynucleotide
gacatccaactgactcagagccccagctttctgagcgcctctgtgggcgacagagtgaccatcacatgtagtctcagcctgggcatcagcacatggcgggattggtttccgccgaggcttggcaggggccttgagccgctgacctacgccgccagcacactgcaaagcggagtgcctagcagattttccggcagcggctctggcaccgagttcaccctgacaatatccagcctccagcctgaggacttcgccacctactactgccagcagctcaacagctaccctctgacctttggcggaggcaccaaggtggaaatcaagaga

SEQ ID NO: 178 - DNA, 324 bp, Artificial Sequence
  Synthetic Polynucleotide
gacatccagatgacccagaccacaagcagcctgtctgccagcctgggcgacagagtgaccatctcttgtagagccagccaggacatcagcaactacctgaactggtatcagcagaaacccgacggcaccgtgaagctgctgatctactacaccagcatcctgcacagcggcgtgcccagcagattttctggctctggcagcggcaccgactacagcctgaccatcagcaatctggaacaagaggacttcgctacctacttctgccagcaaggcaacaccctgccttggacatttggcggaggcaccaagctggaaatcaaagct

SEQ ID NO: 179 - DNA, 348 bp, Artificial Sequence
  Synthetic Polynucleotide
gacatcgtgatgacacagagccctgatagcctggccgtgtctctgggagagagagccaccatcaactgcaagagcagccagagcctgctgtacagaagcaaccagaagaactacctggcctggtatcagcagaagcccggccagcctcctaagctgctgatctactgggccagcaccagagaaagcggcgtgcccgatagattttctggctctggcagcggcaccgacttcaccctgacaatttctagcctgcaagccgaggacgtggccgtgtactactgccagcagtattacaactaccccagaaccttcggccagggcaccaaggtggaaatcaagagaacagtt

SEQ ID NO: 180 - DNA, 339 bp, Artificial Sequence
  Synthetic Polynucleotide
gacgtggtcatgacacagagccctctgagcctgcctgtgacacttggacagcctgccagcatcagctgtagaagcagccagagcctgctgcacagcagcggcaatacctacctggaatggtatcagcagaggcccggacagagccccagacctctgatctacaagatcagcacccggttcagcggcgtgcccgatagattttctggctctggcagcggcaccgacttcaccctgaagattagcagagtggaagccgaggacgtgggcgtgtactactgcttccaaggcagccacgtgccatacacctttggcggcggaacaaaggtggaaatcaagaga

SEQ ID NO: 181 - DNA, 327 bp, Artificial Sequence
  Synthetic Polynucleotide
gacatccagatgacacagagccctagcagcctgtctgccagcgtgggagacagagtgaccatcacctgtagagccagcgagaacatctacagcaacctggcctggtatcagcagaagcctggcaaggcccctaagctgctgatctacgccgccaccaatctggctgatggcgtgccaagcagattttccggctctggcagcggcaccgatttcaccctgacaatatccagcctccagcctgaggacttcgccacctactactgccagcacttttggggcacccctacattcggccagggcaccaaggtggaaatcaagagaacagtt

SEQ ID NO: 182 - DNA, 339 bp, Artificial Sequence
  Synthetic Polynucleotide
gacttcgtgatgacacagagccctctgagcctgcctgtgacacctggcgaacctgccagcatcagctgtagaagcagccagagcatcgtgcacagcaacggcaacacctacctggaatggtatctccagaagcctggacagagcccacagctgctgatctacaaggtgtccaacagattcagcggcgtgcccgacagattttctggcagcggctctggcaccgacttcaccctgaagattagcagagtggaagccgaggacgtgggcgtgtactactgcttccaaggctctcacgtgcccctgacctttggacagggcaccaagctggaaatcaagaga

SEQ ID NO: 183 - DNA, 318 bp, Artificial Sequence
  Synthetic Polynucleotide
gacatccagctgactcagagccctagctttctgagcgccagcgtgggcgacagagtgaccatcacatgtagcgccagatccagcatcagcttcatgtactggtatcagcagaagcccggcaaggcccctaagctgctgatctacgacaccagcaatctggcctctggcgtgcccagcagattttctggaagcggcagcggcaccgagttcaccctgacaatctctagcctggaagccgaggatgccgccacctactattgccagcagtggtccagctatcccctgacatttggacagggcaccaagctggaaatcaaa

SEQ ID NO: 184 - DNA, 336 bp, Artificial Sequence
  Synthetic Polynucleotide
cagctggtgctgacacagtctccaagcgcctctgccagcctgggatctagcgtgaagctgacctgtacactgagcagcggccacaagaccgacaccatcgactggtatcagcagcagcctggcaaggcccctagatacctgatgaagctggaaggcagcggcagctacaacaaaggctctggcgtgcccgatagattcagcggcagttcttctggcgctgattggtatctgaccatcagcagcctccagagcgaggacgaggccgattactactgcggcacagactaccccggcaactacctgtttggcggcggaacacagctgacagtgcttggc

SEQ ID NO: 185 - DNA, 333 bp, Artificial Sequence
  Synthetic Polynucleotide
gacatcgtgctgacacagagccctccaagcctggctatgagcctgggaaagagagccaccatcagctgtagagccagcgagagcgtgacaatcctgggctctcacctgatccactggtatcagcagaagcccggccagcctcctacactgctgattcagctggcctccaatgtgcagacaggcgtgccagccagattttctggcagcggcagcagaaccgacttcaccctgaccattgatcccgtggaagaggacgacgtggccgtgtactactgcctccagagcagaacaatccccagaacctttggcggaggcaccaagctggaaatcaaa

SEQ ID NO: 186 - DNA, 324 bp, Artificial Sequence
  Synthetic Polynucleotide
gatatccagctcactcaaagcccctctagtctctctgcctcagtgggggatcgggtcagttttacttgtcaagcttcacaggatatcaacaacttccttaattggtatcagcagaagccaggaaaagcacccaagctgctcatctatgatgcctcaaatttggagacgggtgttcccagtcgattctctgggtcagggtccgggaccgactttacgtttacgatctcctctctgcagcccgaagacatcgccacatactattgtcaacagtacggcaacttgcctttcacatttgggggcgggactaaggttgaaatcaagagg

SEQ ID NO: 187 - DNA, 324 bp, Artificial Sequence
  Synthetic Polynucleotide
gatattcaactgacacaatcccccagctcactcagcgccagcgtgggggacagggttagctttacctgtcaagcctctcaggatataaataactttctgaactggtatcaacagaagcctgggaaggcgcccaaactcctgatctatgatgcgtccaacctggaaactggcgtgccttcacgctttagcggctctggcagtggtacagacttcacttttaccatctcttcacttcagccggaggacatcgccacatattactgtcaacagtacggaaacttgccctttacttttggaggcggcaccaaagttgaaatcaaaaga

SEQ ID NO: 188 - DNA, 324 bp, Artificial Sequence
  Synthetic Polynucleotide
gacattcagatgacccaaagcccgtccagcctgtccgccagcctgggagatagagtgacaatcacgtgtagagcttcccaagggataagaaatgatctcgggtggtatcagcagaagcccggcaaagcccccaaaaggcttatatatgctagtagtacactgcagtctggagttccttcccgattttcaggtagcggctccggtacagagttcaccctcacgataagctcactccagcctgaggatttcgcaacgtactactgcctccagcacaacaattttccctggactttcggccagggcaccaaggtggagatcaagagg

SEQ ID NO: 189 - DNA, 327 bp, Artificial Sequence
  Synthetic Polynucleotide
gagattgtgttgacacagtctcccgataccctgtcactgtcacccggcgagaaggcaacgctgagttgcagagcaagccagtcagtctcctcttcttttctggcctggtatcagcaaaaaccaggtcaggcaccatctctcctgatttacgttgccagcagacgggcggctggcattcccgacaggttctctggaagcggatctgggaccgattttaccctgacaattagccgcttggagcccgaagactttggtatgttttactgccagcactacggaaggacacctttcacatttggcccgggcacgaaagtcgatataaaacgc

SEQ ID NO: 190 - DNA, 324 bp, Artificial Sequence
  Synthetic Polynucleotide
gacatccaactgactcagagccccagctttctgagcgcctctgtgggcgacagagtgaccatcacatgtagagccagccagggcatcagcagctacctggcttggtatcagcagaagcctggcaaggcccctaaactgctgatctacgccgccagcacactccagtctggcgtgccaagcagattttctggcagcggctctggcaccgagttcaccctgacaatatccagcctccagcctgaggacttcgccacctactactgccagcaagtgaacagctaccctctgacctttggcggaggcaccaaggtggaaatcaagaga

SEQ ID NO: 191 - DNA, 336 bp, Artificial Sequence
  Synthetic Polynucleotide
cagtctgctctgacccagcctagatccgtgtctggctctcctggacacagcgtgaccatcagctgtaccggcacctcttccgacgtgggcgactacaattacgtgtcctggtatcagcagaggcccggcaaggtgccaaagctgctgatctacgacgtgtccaagaggccaagcggcgtgcccgatagattttccggcagcaagtctggcaacaccgccagcctgacaatctctggactgcaagccgaggacgaggccatctacttttgtgccagctacgccggcaactacaacgtggtgtttggcggaggcaccaagctgacagtgcttggacaa

SEQ ID NO: 192 - DNA, 324 bp, Artificial Sequence
  Synthetic Polynucleotide
gacatccagatgacacagagccctagcagcctgtctgccagcgtgggagacagagtgaccatcacatgtagcgccagccagggcatcaacaactacctgaactggtatcagcagaagcccggcaaggcccctaagctgctgatccactacacatctggactgcacgctggcgtgcccagcagattttctggctctggcagcggcaccgactacaccctgacaatatctagcctccagcctgaggacgtggcaacctactactgccagcagtacagcatcctgccttggacctttggcggaggcaccaaggtggaaatcaagaga

SEQ ID NO: 193 - DNA, 339 bp, Artificial Sequence
  Synthetic Polynucleotide
gacattcagatgacacagagccctagcagcctgagcgcctctgtgggagacagagtgaccatcacatgcaagagcagccagagcgtgctgtactccagcaatcagaagaactacctggcctggttccagcagaagcctggcaaggctcctaagctgctgatctactgggccagcaccagagaaagcggcgtgccaagcagattttctggcagcggctctggcaccgacttcaccctgacaatatccagcctccagcctgaggacttcgccacctacttttgccaccagtacctgagcagctacacattcggacagggcaccaaggtggaaatcaagcgg

SEQ ID NO: 194 - DNA, 324 bp, Artificial Sequence
  Synthetic Polynucleotide
gacatccagatgacacagagccctagcagcctgtctgccagcgtgggagacagagtgaccatcacctgtagagccagccaggacatcagcaactacctgaactggtatcagcagaagcccggcaaggcccctaagctgctgatctactacaccagcagactgcacagcggcgtgcccagcagattttctggctctggcagcggcaccgacttcaccctgacaatatctagcctccagcctgaggacttcgccacctactattgccagcagggcaacaccctgccttacacatttggacagggcaccaaggtggaaatcaagaga

SEQ ID NO: 195 - DNA, 327 bp, Artificial Sequence
  Synthetic Polynucleotide
gacatccagatgacacagagccctagcagcctgtctgccagcgtgggagacagagtgaccatcacctgtaccgccagcagcagagtgtccagcagctacctgcactggttccagcagaagcctggcaaggcccctaagctgctgatctacagcaccagcaatctggcctctggcgtgcccagcagattttctggctctggcagcggcaccgacttcaccctgacaatatctagcctccagcctgaggacttcgccacctactactgccaccagtaccacagaagcccctacacattcggccagggcaccaaggtggaaatcaagaga

SEQ ID NO: 196 - DNA, 318 bp, Artificial Sequence
  Synthetic Polynucleotide
gacatccagatgacacagagccctagcagcctgtctgccagcgtgggagacagagtgaccatcacatgtagcgccagcagcagcgtgacctacatgtactggtatcagcagaagcccggcaaggcccctaagctgctgatctacgacaccagcaatctggcctctggcgtgcccagcagattttctggctctggcagcggcaccgactacaccctgacaatatctagcctccagcctgaggacttcgccacctactactgccagcagtggtccaactatcccctgacattcggccagggcaccaaggtggaaatcaaa

SEQ ID NO: 197 - DNA, 321 bp, Artificial Sequence
  Synthetic Polynucleotide
gagatcgtgctgacacagagcccttctagcctgtctgccagcgtgggcgacagagtgaccatcacatgtagagccagcgagaacatctacagctacctggcctggtatcagcagaagcctggcaaggcccctaagctgctgatctacaacaccaagacactcggcgagggcgtgcccagcagattttctggttctggcagcggcaccgacttcaccctgaccatatctagcctgcagcctgaggacttcgccacctactactgccagcaccactacggcacccctttcacatttggccctggcaccaaggtggacatcaaa

SEQ ID NO: 198 - DNA, 321 bp, Artificial Sequence
  Synthetic Polynucleotide
caaattgtgctgacacagagccccgccatcatgagcgcttctccaggcgagaaagtgaccatgacctgtagcgccagcagctccgtgtcttacatgcactggtatcagcagaagtccggcacaagccccaagcggtggatctacgataccagcaaactggcctccggcgtgcccgatagattttctggcagcggcagcggaaccagctacttcctgaccatcaacaacatggaagccgaggacgccgccacctactactgccagcagtggaacatcaaccctctgacctttggagccggcaccaagctggaactgaagaga

SEQ ID NO: 199 - DNA, 324 bp, Artificial Sequence
  Synthetic Polynucleotide
gacatccagatgacacagagcagcgcctacctgagcgtgtcccttggaggcagagtgaccatcacatgcaaggccagcgaccacatcaacaactggctggcctggtatcagcacaagcccggcaatgcccctagactgctgatctctggcgctaccacactggaaacaggcgtgcccagcagattttctggcagcggctctggcaaggactacaccctgagcatcaccagcctccagaccgaggatgtggctacctactactgccagcagagctggaacaccccttggacatttggcggaggcaccaagctggaaatcaagaga

SEQ ID NO: 200 - DNA, 324 bp, Artificial Sequence
  Synthetic Polynucleotide
gaaatcgtgctgacacagagccccggcacactgtcactttctccaggcgaaggcgctaccctgtcttgtagagctggacagtctgtgcggagcagctacctcggatggtatcagcagaagcctggacaggcccctcggctgttgatctacggtgcttctagcagagccacaggcatccccgatagattttctggcagcggctccggcaccgacttcaccctgacaatcagcagactggaacccgaggacttcgccgtgtattactgccagcagtacggctacagccctcctacatttggcggaggcaccaagctggaaatcaag

SEQ ID NO: 201 - DNA, 333 bp, Artificial Sequence
  Synthetic Polynucleotide
gacatcgtgctgacacagagccctccaagcctggctatgagcctgggaaagagagccaccatcagctgtagagccagcgagagcgtgacaatcctgggctctcacctgatccactggtatcagcagaagcccggccagcctcctacactgctgattcagctggcctccaatgtgcagacaggcgtgccagccagattttctggcagcggcagcagaaccgacttcaccctgaccattgatcccgtggaagaggacgacgtggccgtgtactactgcctccagagcagaacaatccccagaacctttggcggaggcaccaagctggaaatcaag

SEQ ID NO: 202 - DNA, 321 bp, Artificial Sequence
  Synthetic Polynucleotide
gagatcgtgctgacacagtctcccgccacactgtcactgtctccaggcgaaagagccacactgagctgtagagccagccagagcgtgtcctcttacctggcctggtatcagcagaagcctggacaggctccccggctgctgatctacgatgccagcaatagagccacaggcatccccgccagattttctggctctggcagcggcaccgatttcaccctgaccataagcagcctggaacctgaggacttcgccgtgtactactgccagcagagaagcaactggcccagaacattcggccagggcaccaaggtggaaatcaaa

SEQ ID NO: 203 - DNA, 327 bp, Artificial Sequence
  Synthetic Polynucleotide
gagatcgtgctgacacagagccctggcacactgtcactgtctccaggcgaaagagccacactgagctgtagagccagccagagcgtgtccagctcttacctggcttggtatcagcagaagcccggacaggctcccagactgctgatctacggtgcctctagcagagccacaggcatccccgatagattttctggcagcggctccggcaccgacttcaccctgacaatcagcagactggaacccgaggacttcgccgtgtactactgccagcagtaccaccactctccactgacctttggcggaggcaccaaggtggaaatcaagaga

SEQ ID NO: 204 - DNA, 324 bp, Artificial Sequence
  Synthetic Polynucleotide
gagatcgtgctgacacagagccctggcacactgtcactgtctccaggcgaaagagccacactgagctgtagagccagccagagcgtgtccagcgattacctggcttggtatcagcagaagcccggacaggctcccagactgctgatctatggtgcctctcggagagccacaggcatccccgatagattttctggcagcggctccggcaccgacttcaccctgacaatcagcagactggaacccgaggacttcgccgtgtactactgccagcagtacgtgtcctactggacctttggcggaggcaccaaggtggaaatcaagaga

SEQ ID NO: 205 - DNA, 327 bp, Artificial Sequence
  Synthetic Polynucleotide
gacatccagatgacacagagccctagcagcctgtctgccagcgtgggagacagagtgaccatcacctgtagagccagccaggacgtgaacacagccgtggcttggtatcagcagaagcctggcaaggcccctaagctgctgatctacagcgccagctttctgtacagcggcgtgcccagcagattcagcggaagcagaagcggcaccgacttcaccctgacaatatccagcctccagcctgaggacttcgccacctactactgccagcagcactacaccacacctccaacattcggccagggcaccaaggtggaaatcaagagaaca

SEQ ID NO: 206 - DNA, 321 bp, Artificial Sequence
  Synthetic Polynucleotide
gatattcagatgacacagagccccagcagcgtgtccgcctctgtgggagatagagtgaccatcacctgtagagccagccagggcatcacaagatggctggcctggtatcagcagaagccaggcaaggcccctaagctgctgatctacgccgcttctgtgctccagagcggagtgcctagcagattttctggcagcggctccggcaccgatttcaccctgacaatatccagcctccagcctgaggacttcgccacctactactgccagcagagcaacagcttccccagaacattcggacagggcaccaaggtggaaatcaag

SEQ ID NO: 207 - DNA, 321 bp, Artificial Sequence
  Synthetic Polynucleotide
gatattcagatgacacagagccccagcagcgtgtccgcctctgtgggagatagagtgaccatcacctgtcgggccagccaggacattagcagatggctggcttggtatcagcagaagccaggcaaggcccctaagctgctgatttcagccgccagcagactccagagcggagtgcctagcagattttctggctctggcagcggcaccgacttcaccctgacaatatctagcctccagcctgaggacttcgccatctactattgccagcaggccaagagcttccccagaacatttggacagggcaccaaggtggaaatcaag

SEQ ID NO: 208 - DNA, 336 bp, Artificial Sequence
  Synthetic Polynucleotide
gataccgtgatgacccagacacctctgagcagccacgtgacacttggacagcctgccagcatcagctgtagaagcagccagagcctggtgcacagcgacggcaatacctacctgtcttggctccagcagaggccaggacagcctcctagactgctgatctaccggatcagcagacggttcagcggcgtgcccgatagattttctggaagcggagccggcaccgacttcaccctggaaatcagcagagtggaagccgaggatgtgggcgtctactactgtatgcagagcacccacgtgccacggacctttggacagggcaccaaggtggaaatcaag

SEQ ID NO: 209 - DNA, 321 bp, Artificial Sequence
  Synthetic Polynucleotide
gatattcagctgactcagagccccagcttcctgtctgcctctgtgggcgacagagtgaccatcacatgttgggccagccagggcatcaacaactacctggcctggtatcagcagaagcccggcaaggctcctaagctgctgatctacgccgccagcacactgcaaacaggcgtgccaagcagattttccggctctggcagcggcaccgagttcaccctgacaatatctagcctccagcctgaggacttcgccacctactactgccagcagctgaacagctaccctctgacctttggaggcggcaccaaggtggaaatcaag

SEQ ID NO: 210 - DNA, 324 bp, Artificial Sequence
  Synthetic Polynucleotide
gaaattgtgctgacacagagccccggcacactgtcactttctccaggcgaaagagccacactgagctgtagagccagccagagcgtgaacaagaactacctggcttggtatcagcagaagcccggacaggctcccagactgctgatctacggtgcctctagcagagccacaggcatccccgatagattttctggcagcggctccggcaccgacttcaccctgacaatcagcagactggaacccgaggacttcgccgtgtattattgccagcagtacgacagaagccctctgacctttggaggcggcaccaaggtggaaatcaag

SEQ ID NO: 211 - DNA, 336 bp, Artificial Sequence
  Synthetic Polynucleotide
gatgtggtcatgacacagacccctctgagcctgcctgtgacacttggacagcctgccagcatcagctgtagatccagccagagcctggtgtacagagatggcaacacctacctgagctggttccagcagaggcctggacagtctcctcggcggctgatctacaaggtgtccaactggcagagcggcgtgcccgatagattttctggcggtggcagcggcaccgacttcaccctgaagatcagcagagtggaagccgaggacgtgggcgtgtactactgtatgcagggcacacactggcctccaacattcggccagggaacaaaggtggaaatcaag

SEQ ID NO: 212 - DNA, 318 bp, Artificial Sequence
  Synthetic Polynucleotide
atcgtgatgacccagactcctaagttcctgctggtgtctgccggcgacagagtgaccatcacctgtaaagccagccagagcgtgaacaacgacgtgtcctggttccagcagaagcccggccaatctcctacactgctgatctactacgccagcaacagatacaccggcgtgcccgatagattcaccggctctggctacggcaccgacttcacctttaccatcagcaccgtgcaggccgaggacctggctgtgtacttctgccagcaagactacagcagcccttacacctttggaggcggcaccaagctggaaatcaag

SEQ ID NO: 213 - DNA, 318 bp, Artificial Sequence
  Synthetic Polynucleotide
gacattcagatgacacagagccctagcagcctgagcgcctctgtgggagacagagtgacaattacctgtcgggccagccagtctatcaacaactacctgaactggtatcagcagaagcccggcaaggcccctacactgctgatctatgccgccagctctctccagagcggagtgcctagcagattcagcggaagcagaagcggcaccgacttcaccctgacaatatccagcctccagcctgaggacttcgccgcctacttttgccagcagacctacagcaaccccacctttggccagggcaccaaggtggaagtgaag

SEQ ID NO: 214 - DNA, 324 bp, Artificial Sequence
  Synthetic Polynucleotide
agctacgagctgacacagcctccaagcgtgtccgtgtctcctggacagacagccagcatcacctgtagcggcgataagctgggcgataagtacgccagctggtatcagcagaagcccggccagtctcctgtgctggtcatctaccaggacaacagaaggcccagcggcatccccgagagattcagcggcagcaatagcggcaataccgccacactgaccatcagcggcacccaggctatggacgaggccgactactattgccaggcttgggacagcgacacctacgtgttcggcaccggcaccaaagtgacagtgcttggacaa

SEQ ID NO: 215 - DNA, 321 bp, Artificial Sequence
  Synthetic Polynucleotide
gatattcagatgacacagagccccagcagcctgtctgcctctgtgggagacagagtgaccatcacctgtagagccagccagagcatcagcagctacctgaactggtatcagcagaagcccggcaaggcccctaaactgctgatctatgccgcctccagtctgcagagcggagtgcctagcagattttctggctctggcagcggcaccgacttcaccctgacaatatctagcctgcagcctgaggacttcgccacctactactgccagcagagctacatcacccctctgacattcggtggcggcaccaaggtggaaatcaag

SEQ ID NO: 216 - DNA, 339 bp, Artificial Sequence
  Synthetic Polynucleotide
gacatcgtgctgacacagagccctgcttctctggccgtgtctcttggacagggcgctaccatcagctgtagagccagcaagagcgtgtccaccagcggctacacctacatgcactggtatcagcagaagcccggccagcctcctaagctgctgatctacctggcctccaacctggaaagcggagtgcctgccagattttctggcagcggctctggcaccgacttcaccctgaatatccatcctgtggaagaagaggacgccgccacctactactgtcagcactctggcgaactgccacctagctttggcggaggcaccaagctggaaatcaagagagct

SEQ ID NO: 217 - DNA, 336 bp, Artificial Sequence
  Synthetic Polynucleotide
gacatccagatgacacagagccctagcagcctgtctgccagcgtgggagacagagtgaccatcacatgtagcgccagccagggcatcagaaactacctgaactggtatcagcagaaacccggcaaggtgcccaagctgctgatctactacaccagcagactgcacagcggcgtgcccagcagattttctggctctggcagcggcaccgacttcaccctgacaatatctagcctccagcctgaggacgtggcaacctactactgtcagcagtacggcaagctgccctacacattcggccagggcaccaagctggaaatcaagagaacagtggctgcc

SEQ ID NO: 218 - DNA, 348 bp, Artificial Sequence
  Synthetic Polynucleotide
gacatcgtgatgacacagagccccgatagcctggccgtgtctctgggagaaagagccaccatcaactgtagagccggcgagagcgtggacatcttcggcgtgggatttctgcactggtatcagcagaagcccggccagcctcctaagctgctgatctacagagccagcaacctggaaagcggcgtgcccgatagattttctggcagcggctctggcaccgacttcaccctgacaatcagacctctccaggccgaggatgtggccgtgtattattgccagcagaccaacgaggacccctacacatttggacagggcaccaagctggaaatcaagagaacagtggccgcc

SEQ ID NO: 219 - DNA, 336 bp, Artificial Sequence
  Synthetic Polynucleotide
gacatcgtgctgacacagtctcccgccacactgtcactgtctccaggcgaaagagccacactgagctgtagagccagccagaacatcgtgttcaacctggcctggtatcagcagaagcctggacaggctccccggctgctgatctacgatgccagcaatagagccaccggcgtgcccgccagattttctggttctggcagcggcaccgacttcaccctgaccatatctagcctggaacctgaggacttcgccgtgtactactgccagcagaaaaagtccatgcctctgaccttcggccagggcaccaaggtggaaatcaagagaacagtggctgcc

SEQ ID NO: 220 - DNA, 339 bp, Artificial Sequence
  Synthetic Polynucleotide
cagacagtggtcacccaagagcctagcctgacagtgtctcctggcggaaccgtgacactgacatgtggcagttctaccggcgctgtgaccaccagcaattacgccaactgggtgcagcagaagccaggccaagctcctagaggactgatcggcggcacaaacaagagagcccctggcacaccagccagattttctggctctctgctcggcggaaaggccgctcttacactgtctggtgtccagcctgaggacgaggccgagtattattgcgccctgtggtacagcaacctgtgggttttcggcggaggcaccaagctgacagtgctgactgttgctgct

SEQ ID NO: 221 - DNA, 342 bp, Artificial Sequence
  Synthetic Polynucleotide
gaaattgtgctgacacagagccccggcacactgtcactttctccaggcgaaagagccacactgagctgtagagccagccagagcgtgtccagctcttacctggcttggtatcagcagaagcccggccaggctcctagactgctgatctacggtgccagcagcagagccacaggcatccccgatagattttctggcagcggctccggcaccgacttcaccctgacaatcagcagactggaacccgaggactttgccgtgtattattgccagcagtacaccaacgagcactactacaccttcggccagggcaccaaggtggaaatcaagagaacagtggccgcc

SEQ ID NO: 222 - DNA, 339 bp, Artificial Sequence
  Synthetic Polynucleotide
gagatcgtgctgacacagtctcccgccacactgtcactgtctccaggcgaaagagccacactgagctgtagcgtgtccagcagcatcagcagcagcaacctgcactggtatcagcagaagcctggacaggcccctcggctgctgatctacggcacatctaatctggcctctggcatccccgccagattttctggctctggaagcggcaccgacttcaccctgaccataagcagcctggaacctgaggacttcgccgtgtactactgccagcagtggtccagctatccccacacatttggcggaggcaccaaggtggaaatcaagagaacagtggctgcc

SEQ ID NO: 223 - DNA, 336 bp, Artificial Sequence
  Synthetic Polynucleotide
gacatccagatgacacagagccctagcagcctgtctgccagcgtgggagacagagtgaccatcacctgtaaagccggccagaacgtgggcacaagcgtggcatggtatcagcagaagcctggcaaggcccctaagctgctgatctacagcgccagctacagatacagcggcgtgcccagcagattttctggcagcggctctggcaccgacttcaccctgacaatatccagcctccagcctgaggacttcgccacctactactgccagcagtacatcacatacccctacaccttcggccagggcaccaaggtggaaatcaagagaacagtggctgcc

SEQ ID NO: 224 - DNA, 336 bp, Artificial Sequence
  Synthetic Polynucleotide
gacatccagatgacacagagccctagcagcctgtctgccagcgtgggagacagagtgaccatcacatgtagcgccagccaggacatcggcaactttctgaactggtatcagcagaagcccggcaaggcccctaagctgctgatctactacacctccagcctgtacagcggcgtgcccagcagattttctggcagcggctctggcaccgacttcaccctgacaatatccagcctccagccagaggacttcgccacctactactgccagcagtacagcaagctgcccctgacctttggacagggcaccaagctggaaatcaagagaacagtggctgcc

SEQ ID NO: 225 - DNA, 336 bp, Artificial Sequence
  Synthetic Polynucleotide
gatgtgcaagtgacacagagccctagcagcctgtctgcctctgtgggcgacagagtgacaatcacctgtcggagcagccagagcctggctaactcctacggcaataccttcctgagctggtatctgcacaagcccggaaaggctccccagctgctgatctacggcatcagcaacagattcagcggcgtgcccgataggtttagcggctctggaagcggcaccgacttcaccctgacaatatccagcctccagcctgaggactttgccacctactactgtctgcaaggcacccaccagccttacacattcggacagggcaccaaggtggaaatcaag

SEQ ID NO: 226 - DNA, 321 bp, Artificial Sequence
  Synthetic Polynucleotide
gacatccagatgacacagagccctagcagcctgtctgccagcgtgggagacagagtgaccatcacctgtagagccagccaggacatcagcaactacctgaactggtatcagcagaaacccggcaaggccgtgaagctgctgatctactacaccagcatcctgcacagcggcgtgcccagcagattttctggctctggcagcggcaccgactacaccctgacaatatctagcctccagcctgaggacttcgctacctacttctgccagcaaggcaacaccctgccttggacatttggcggaggcaccaaggtggaaatcaaa

SEQ ID NO: 227 - DNA, 324 bp, Artificial Sequence
  Synthetic Polynucleotide
gacatcgtgatgacccagagccagcggttcatgaccacaagcgtgggcgatagagtgtccgtgacatgcaaggccagccagagcgtggactctaacgtggcctggtatcagcagaagcccagacagagccccaaggctctgatctttagcgccagcctgagattcagcggagtgcccgctagattcacaggcagcggctctggcaccgatttcaccctgaccatcagcaacctccagagcgaggacctggccgagtatttctgccagcagtacaacaactaccctctgaccttcggagccggcaccaagctggaactgaagaga

SEQ ID NO: 228 - DNA, 324 bp, Artificial Sequence
  Synthetic Polynucleotide
gacatccagatgacacagagccctagcagcctgtctgccagcgtgggagacagagtgaccatcacctgtagagccagccaggacatcagcaactacctgaactggtatcagcagaagcccggcaaggcccctaagctgctgatctactacaccagcatcctgcacagcggcgtgcccagcagattttctggctctggcagcggcaccgacttcaccctgacaatatctagcctccagcctgaggacttcgccacctactattgccagcagggcaacaccctgccttggacctttggacagggcaccaaggtggaaatcaagaga

SEQ ID NO: 229 - DNA, 324 bp, Artificial Sequence
  Synthetic Polynucleotide
gacatccagatgacacagagccctagcagcctgtctgccagcgtgggagacagagtgaccatcacatgcaaggccagcgaccacatcaacaactggctggcctggtatcagcagaagcctggcaaggcccctaagctgctgatctacggcgctaccacactggaaacaggcgtgcccagcagattttctggcagcggctctggcaccgacttcaccctgacaatatccagcctccagcctgaggacttcgccacctactactgtcagcagagctggaacaccccttggacattcggccagggcaccaaggtggaaatcaagaga

SEQ ID NO: 230 - DNA, 324 bp, Artificial Sequence
  Synthetic Polynucleotide
agctacgtgctgacacagcctccatccgtgtctgtggctccaggacagaccgccagaatcacatgcggcggcaacaacatcggcagcaagagcgtgcactggtatcagcagccacctggacaggctccagtggtggtggtgtacgacgacagcgatagacctagcggcatccccgagagattcagcggcagcaattccggcaataccgccacactgaccatcagcagagtggaagctggcgacgaggccgtgtactactgccaagtgtgggacagcagcagcgatcacgtggtgtttggcggcggaacaaagctgacagtgctt

SEQ ID NO: 231 - DNA, 324 bp, Artificial Sequence
  Synthetic Polynucleotide
gacatccagatgacacagagccctagcagcctgtctgccagcgtgggagacagagtgaccatcacctgtatggcctccgaggacatctacatccggctggcctggtatcagcagaagcctggaaaggcccctaagctgctgatctacgccgccacctctctggaaacaggcgtgccaagcagattttccggcagcggctctggcaccgatttcaccctgaccataagcagcctgcagcctgaggacttcgccacctactactgccagcagtattggagcagcccctggacctttggacagggcaccaaggtggaaatcaagaga

SEQ ID NO: 232 - DNA, 336 bp, Artificial Sequence
  Synthetic Polynucleotide
gacatccagatgacacagagccctagcagcgtgtccgcctctgtgggagacagagtgaccatcacctgtagagccagcgagagcgtggacaactacggcatcagcttcatgaactggtatcagcagaagcccggcaaggcccctaagctgctgattagcgccgccagcaatagagccacaggcgtgccaagcagattttccggctctggcagcggcaccgatttcaccctgacaatatccagcctccagcctgaggacttcgccatctactactgccagcagagcaaagaggtgccctggacctttggacagggcaccaaggtggaaatcaagaga

SEQ ID NO: 233 - DNA, 336 bp, Artificial Sequence
  Synthetic Polynucleotide
gacatccagctgacacagagcccttctagcctgtctgccagcgtgggcgacagagtgaccatcacatgtagagccagcaagagcgtgtccaccagcggctacagctacatgcactggtatcagcagaagcccggcaaggcccctaagctgctgatctacctggtgtccaacctggaaagcggcgtgcccagcagattttctggcagcggctctggcaccgacttcaccctgacaatatccagcctccagcctgaggacttcgccacctactactgccagcagttcagcgagctgccttggacctttggacagggcaccaaggtggaaatcaagaga

SEQ ID NO: 234 - DNA, 327 bp, Artificial Sequence
  Synthetic Polynucleotide
gacatccagatgacacagagccctagcagcgtgtccgcctctgtgggagacagagtgaccatcacctgtcgggccagccagttcatcagcagcagctacctgagctggtatcagcagaagcctggcaaggcccctaagctgctgatctctggcagctctagcagagccacaggcgtgccaagcagattttctggcagcggctctggcaccgacttcaccctgacaatatccagcctccagcctgaggacttcgccatctactactgccagcagctgtactctagccccatgacattcggccagggcaccaaggtggaaatcaagaga

SEQ ID NO: 235 - DNA, 324 bp, Artificial Sequence; identical to SEQ ID NO: 230
  Synthetic Polynucleotide

SEQ ID NO: 236 - DNA, 324 bp, Artificial Sequence; identical to SEQ ID NO: 230
  Synthetic Polynucleotide

SEQ ID NO: 237 - DNA, 324 bp, Artificial Sequence; identical to SEQ ID NO: 230
  Synthetic Polynucleotide

SEQ ID NO: 238 - DNA, 324 bp, Artificial Sequence; identical to SEQ ID NO: 230
  Synthetic Polynucleotide

SEQ ID NO: 239 - DNA, 324 bp, Artificial Sequence; identical to SEQ ID NO: 230
  Synthetic Polynucleotide

SEQ ID NO: 240 - DNA, 324 bp, Artificial Sequence; identical to SEQ ID NO: 230
  Synthetic Polynucleotide

SEQ ID NO: 241 - DNA, 324 bp, Artificial Sequence; identical to SEQ ID NO: 230
  Synthetic Polynucleotide

SEQ ID NO: 242 - DNA, 324 bp, Artificial Sequence
  Synthetic Polynucleotide
agctacgtgctgacacagcctccatccgtgtctgtggctccaggacagaccgccagaatcacatgcggcggcaagaacatcggcagcaagagcgtgcactggtatcagcagccacctggacaggctccagtggtggtggtgtacgacgacagcgatagacctagcggcatccccgagagattcagcggcagcaattccggcaataccgccacactgaccatcagcagagtggaagctggcgacgaggccgtgtactactgccaagtgtgggacagcagcagcgatcacgtggtgtttggcggcggaacaaagctgacagtgctt

SEQ ID NO: 243 - DNA, 324 bp, Artificial Sequence
  Synthetic Polynucleotide
agctacgtgctgacacagcctccatccgtgtctgtggctccaggacagaccgccagaatcacatgcggcggcaacaacctcggcagcaagagcgtgcactggtatcagcagccacctggacaggctccagtggtggtggtgtacgacgacagcgatagacctagcggcatccccgagagattcagcggcagcaattccggcaataccgccacactgaccatcagcagagtggaagctggcgacgaggccgtgtactactgccaagtgtgggacagcagcagcgatcacgtggtgtttggcggcggaacaaagctgacagtgctt

SEQ ID NO: 244 - DNA, 324 bp, Artificial Sequence
  Synthetic Polynucleotide
agctacgtgctgacacagcctccatccgtgtctgtggctccaggacagaccgccagaatcacatgcggcggcaacaacatcggcggcaagagcgtgcactggtatcagcagccacctggacaggctccagtggtggtggtgtacgacgacagcgatagacctagcggcatccccgagagattcagcggcagcaattccggcaataccgccacactgaccatcagcagagtggaagctggcgacgaggccgtgtactactgccaagtgtgggacagcagcagcgatcacgtggtgtttggcggcggaacaaagctgacagtgctt

SEQ ID NO: 245 - DNA, 324 bp, Artificial Sequence
  Synthetic Polynucleotide
agctacgtgctgacacagcctccatccgtgtctgtggctccaggacagaccgccagaatcacatgcggcggcaacaacatcggcagcaagaccgtgcactggtatcagcagccacctggacaggctccagtggtggtggtgtacgacgacagcgatagacctagcggcatccccgagagattcagcggcagcaattccggcaataccgccacactgaccatcagcagagtggaagctggcgacgaggccgtgtactactgccaagtgtgggacagcagcagcgatcacgtggtgtttggcggcggaacaaagctgacagtgctt

SEQ ID NO: 246 - DNA, 324 bp, Artificial Sequence; identical to SEQ ID NO: 242
  Synthetic Polynucleotide

SEQ ID NO: 247 - DNA, 324 bp, Artificial Sequence; identical to SEQ ID NO: 243
  Synthetic Polynucleotide

SEQ ID NO: 248 - DNA, 324 bp, Artificial Sequence; identical to SEQ ID NO: 244
  Synthetic Polynucleotide

SEQ ID NO: 249 - DNA, 321 bp, Artificial Sequence
  Synthetic Polynucleotide
gagatcgtgctgacacagtctcccgccacactgtcactgtctccaggcgaaagagccacactgagctgtagagccagccagagcgtgtcctcttacctggcctggtatcagcagaagcctggacaggctccccggctgctgatctacgatgccagcaatagagccacaggcatccccgccagattttctggctctggcagcggcaccgatttcaccctgaccataagcagcctggaacctgaggacttcgccgtgtactactgccagcagagaagcaactggcccctgacctttggacagggcaccaaggtggaaatcaaa

SEQ ID NO: 250 - DNA, 339 bp, Artificial Sequence
  Synthetic Polynucleotide
gacatcgtgatgacacagagccctgatagcctggccgtgtctctgggagagagagccaccatcaactgcaagagcagccagagcgtgctgtactccagcaacaacaagaactacctggcctggtatcagcagaagcccggccagcctcctaagctgctgatctactgggccagcaccagagaaagcggcgtgcccgatagattttctggcagcggctctggcaccgacttcaccctgacaattagcagcctccaggccgaggatgtggccgtgtactactgccagcagtattacagcacccctctgaccttcggccagggcaccaaggtggaaatcaaa

SEQ ID NO: 251 - DNA, 324 bp, Artificial Sequence
  Synthetic Polynucleotide
gacatccagatgacacagagccctagcagcctgtctgccagcgtgggagacagagtgaccatcacctgtagagccagccagagcatcaacaagtggctgaactggtatcagcagaagcccggcaaggcccctaagctgctgatctatgccgccagctctctccagagcggagtgcctagcagattttctggcagcggctccggcaccgatttcaccctgacaatatccagcctccagcctgaggacttcgccacctactactgccagcaggactacaacttcccctacaccttcggccagggcaccaaggtggaaatcaaaaga

SEQ ID NO: 252 - DNA, 318 bp, Artificial Sequence
  Synthetic Polynucleotide
cagatcgtgctgtctcagtctcctgccatcctgagtgcctctccaggcgagaaagtgaccatgacctgtagagccagcagcagcgtgtcctacatccactggttccagcagaagcctggcagcagccctaagccttggatctacgccaccagcaatctggcctctggcgtgccagtcagattttctggcagcggctctggcaccagctacagcctgacaatcagcagagtggaagccgaggatgccgccacctactactgtcagcagtggacctccaatcctcctacctttggcggaggcaccaagctggaaatcaaa

SEQ ID NO: 253 - DNA, 321 bp, Artificial Sequence
  Synthetic Polynucleotide
gatattcagctgacccagagccacaagtttctgagcaccagcgtgggcgacagagtgtccatcacctgtaaagccagccaggacgtgtacaacgccgtggcctggtatcagcagaagcctggacagagccccaagctgctgatctacagcgccagcagcagatacacaggcgtgcccagcagattcaccggctctggatctggccccgacttcacctttaccatcagctctgtgcaggccgaggacctggccgtgtacttttgtcagcagcacttcagaacccctttcaccttcggcagcggcaccaagctggaaatcaag

SEQ ID NO: 254 - DNA, 318 bp, Artificial Sequence
  Synthetic Polynucleotide
gacatccagctgacacagagcccttctagcctgtctgccagcgtgggcgacagagtgaccatcacctgtaaagccagccaggacgtgggcacaagcgtggcatggtatcagcagaagcctggcaaggcccctaagctgctgatctactggaccagcaccagacacacaggcgtgcccagcagattttctggcagcggctctggcaccgacttcaccttcacaatatccagcctccagcctgaggacattgccacctactactgccagcagtacagcctgtaccgctctttcggccagggcaccaaggtggaaatcaaa

SEQ ID NO: 255 - DNA, 315 bp, Artificial Sequence
  Synthetic Polynucleotide
gacatccagctgacacagagcccttctagcctgtctgccagcgtgggcgacagagtgaccatcacctgtagcacaagcagcagcgtgtcctacatgcactggtatcagcagaagcccggcaaggcccctaagctgctgatctacagcaccagcaatctggcctctggcgtgcccagcagattttctggctctggcagcggcaccgacttcaccttcacaatatccagcctccagcctgaggacattgccacctactactgccaccagtggtctagctaccccacattcggccagggcaccaaggtggaaatcaaa

SEQ ID NO: 256 - DNA, 327 bp, Artificial Sequence
  Synthetic Polynucleotide
gacatccagatgacacagagccctagcagcctgtctgccagcgtgggagacagagtgaccatcacctgtagagccagccaggacgtgaacacagccgtggcttggtatcagcagaagcctggcaaggcccctaagctgctgatctacagcgccagctttctgtacagcggcgtgcccagcagattcagcggaagcagaagcggcaccgacttcaccctgacaatatccagcctccagcctgaggacttcgccacctactactgccagcaggcttacaccacacctccaacattcggccagggcaccaaggtggaaatcaagagaaca

SEQ ID NO: 257 - DNA, 333 bp, Artificial Sequence
  Synthetic Polynucleotide
gagatcgtgctgacacagagccctggcacactgtcactgtctccaggcgaaagagccacactgagctgtagagccagccagagcgtgtccagcgattacctggcttggtatcagcagaagcccggacaggctcccagactgctgatctacggtgcctctagcagagccacaggcatccccgatagattttctggcagcggctccggcaccgacttcaccctgacaattagcagactgcccgaggacttcgccgtgtactactgccagcagtacgtgtcctactggacctttggcggaggcaccaaggtggaaatcaaaagaacagtggctgcc

SEQ ID NO: 258 - DNA, 327 bp, Artificial Sequence
  Synthetic Polynucleotide
agctacgagctgatccagcctccttctgccgctgtgacactgggcaataccgtgtctctgacctgtgtgggagatgagctgcccaagagatacgcctactggtatcagcagaagcccgaccagagcatcgtgcgcgtgatctacgaagatagcgtgcggcctcctggcatcagcgatagattttctggcagcagcagcggcaccaccgccacactgacaattagagatgcccagaacgaggacgaggccgactactactgtcagagcacctacggcgacgacaagctgtacatctttggcggaggcaccaagctgacagtgcttgga

SEQ ID NO: 259 - DNA, 327 bp, Artificial Sequence
  Synthetic Polynucleotide
agcgtgatcgagctgacacagagccccaagttcatgagcaccagcgtgggcgacagagtgaacgtgacatacaaggccagccagaacgtgggcaccaacgtggcatggttccagcagaagcctggacagagccctaaggtgctgatctacagcgccagctacagatacagcggcgtgcccgatagattcacaggctctggcagcggcaccgacttcaccctgacaatcagcaacgtgcagagcgaggacctggccgagtatttctgccagcagtaccacacataccctctgacctttggcggaggcaccaagctggaaatcaagaga

SEQ ID NO: 260 - DNA, 324 bp, Artificial Sequence
  Synthetic Polynucleotide
gacatccagatgacacagagccctagcagcgtgtccgcctctgtgggagacagagtgaccatcacctgtagagccagccagagcgtgtccagctacctgaactggtatcagcagaagcccggcaaggcccctaagctgctgatctatgctgccagctctctgcagtctggcgtgcccagcagattttctggcagcggctctggcaccgacttcaccctgaccatatctagcctgcagcctgaggacttcgccacctactactgccagcagagctacagcaccccttggacctttggacagggcaccaagctggaaatcaagaga

SEQ ID NO: 261 - DNA, 333 bp, Artificial Sequence
  Synthetic Polynucleotide
cagtctgctctgacccagcctagatccgtgtctggctctcctggacagagcgtgaccatcagctgtaccggcacctcttctgacgtgggcagctacaactacgtgtcctggtatcagcagagccccggcaaggcccctaagctgatgatctacgacgtgtccaacagacccagcggcgtgtccaatagattctccggcagcaagagcggcaacaccgccagcctgacaatctctggactccagtctgaggacgaggccgactactactgtaccagctacggcagctacgacatccccgtgatttttggcggaggcaccaaggtggaaatcaaa

SEQ ID NO: 262 - DNA, 324 bp, Artificial Sequence
  Synthetic Polynucleotide
gacgtggtcatgacacagagcccttctagcctgtctgccagcgtgggcgacagagtgaccatcacctgtaaagccagccagagcgtgtccagctacctgaactggtatcagcagaagcccggcaaggcccctaagctgctgatctatgctgccagcagcctggaaacaggcgtgcccagcagattttctggcagcggctctggcaccgacttcaccctgacaatatccagcctccagcctgaggacttcgccacctactactgtcagcagagctacagcaccccttggacctttggccagggcaccaaggtggaaatcaagaga

SEQ ID NO: 263 - DNA, 324 bp, Artificial Sequence
  Synthetic Polynucleotide
gacatccagatgacacagagccctagcagcgtgtccgcctctgtgggagacagagtgaccatcacctgtagagccagccagagcatcagcagctacctgaactggtatcagcagaagcccggcaaggcccctaaactgctgatctatgccgccagctctctccagagcggagtgcctagcagattttctggcagcggctccggcaccgatttcaccctgacaatatccagcctccagcctgaggacttcgccacctactactgccagcagagctacagcaccccttggacctttggacagggcaccaaggtggaaatcaagaga

SEQ ID NO: 264 - DNA, 321 bp, Artificial Sequence
  Synthetic Polynucleotide
gacacagtgctgacacagtctccagctctggctgtgtctcctggcgagagagtgaccatctcttgcaaggccagcgagagcgtgtccaccagaatgcactggtacagacagaagcccggccagcagccaaagctgctgatctacaagaccagcaacctggcctctggcgtgccagccagattttctggctctggcagcggcaccgacttcaccctgaccattgatcccgtggaagccgacgacaccgccacctacttttgtcagcagtcctggaacggccctctgacatttggaagcggcaccaagctggaaatcaagaga

SEQ ID NO: 265 - DNA, 342 bp, Artificial Sequence
  Synthetic Polynucleotide
gacctggtcatgacacagagcccttttagcctggccgtgtccgagggcgagatggtcacaatcaagtgcaagagcagccagagcctgctgagcagcagacaccagaagaactttctggcctggtacagacagaagcccggacagtctcccaagctgctgatctaccacgccagcacaagacagagcggcgtgcccgatagattcatcggctctggcagcggcaccgacttcaccctgacaatctctgatgtgcaggccgaggacctggccgactactattgtctccagcactacacaagcccctacacctttggagccggcaccaagctggaactgaaaaga

SEQ ID NO: 266 - DNA, 327 bp, Artificial Sequence
  Synthetic Polynucleotide
gacatccagctgactcagagccctagctttctgagcgccagcgtgggcgacagagtgaccattacatgtagagccagccaggacatcagcagctacctggcctggtatcagcagaagcctggcaacgcccctaaactgctgatctacgccgccagcctgctgcaatctggcgtgccaagcagattcagcgcctttggcagcggcaccgagttcaccctgacaatatctagcctccagccagaggacttcgccacctactactgccagcacctgaagtcttaccctctgttcaccttcggacccggcaccaaggtggacatcaaaaga

SEQ ID NO: 267 - DNA, 321 bp, Artificial Sequence
  Synthetic Polynucleotide
gaactccagatgacacagagccctagcagcctgtctgccagcgtgggagacagagtggctatcacctgtagagccagccagagcatcagcagccacctgaactggtatcagcagaagcctggcaaggcccctaagctgctgatctatgccgccagctctctccagagcggagtgcctagcagattttctggcagcggctccggcaccgatttcaccctgacaatatccagcctccagcctgaggacttcgccacctactactgccagcagagctacagcaccccttacacattcggccagggcaccaagctggaaatcaaa

SEQ ID NO: 268 - DNA, 324 bp, Artificial Sequence
  Synthetic Polynucleotide
gacatcgtgatgacccagagccacaagttcatgagcaccagcgtgggcgacagagtgtccatcatctgcaaggccagccaggatgtgggcacagccgtggattggtatcagcagaagcctggacagagccccaagctgctgatctactgggccagcacaagacacaccggcgtgcccgatagattcacaggctctggcagcggcaccgatttcaccctggccatcacaaacgtgcagagcgaggacctggccgactacttctgccagcagtacaacagctaccctctgacctttggagccggcaccaagctggaaatcaagaga

SEQ ID NO: 269 - DNA, 324 bp, Artificial Sequence
  Synthetic Polynucleotide
gacatccagatgacacagagccctagcagcctgtctgccagcgtgggagacagagtgaccatcacatgcaaggccagccaggatgtgggcacagccgtggattggtatcagcagaagcctggcaaggcccctaagctgctgatctactgggccagcacaagacacacaggcgtgcccagcagattttctggcagcggctctggcaccgacttcaccctgacaatatccagcctccagcctgaggacttcgccacctactactgccagcagtacaacagctaccctctgaccttcggccagggcaccaaggtggaaatcaaaaga

SEQ ID NO: 270 - DNA, 330 bp, Artificial Sequence
  Synthetic Polynucleotide
gacatccagatgacacagagccctagcagcctgtctgccagcgtgggagacagagtgaccatcacatgcaaggccagccaggatgtgggcacagccgtggattggtatcagcagaagcctggcaaggcccctaagctgctgatctcttgggccagcacaagacacacaggcgtgcccagcagattttctggcagcggctctggcaccgacttcaccctgacaatatccagcctccagcctgaggacttcgccacctacttttgccagcagtacaacagctaccctctgaccttcggccagggcaccaaggtggaaatcaagagaacagtt

SEQ ID NO: 271 - DNA, 324 bp, Artificial Sequence; identical to SEQ ID NO: 269
  Synthetic Polynucleotide

SEQ ID NO: 272 - DNA, 324 bp, Artificial Sequence; identical to SEQ ID NO: 268
  Synthetic Polynucleotide

SEQ ID NO: 273 - DNA, 321 bp, Artificial Sequence
  Synthetic Polynucleotide
gagatcgtgctgacacagtctcccgccacactgtcactgtctccaggcgaaagagccacactgagctgtagcgccaccagcagcgtgtcctacatccactggtatcagcagaagcccggacaggcccctagactgctgatctacagcaccagcaatctggcctctggcatccccgccagattttctggctctggaagcggcaccgacttcaccctgacaatcggcagactggaacccgaggacttcgccgtgtactactgccagcagagaagcagcagccccttcacctttggacagggcaccaaggtggaaatcaagaga

SEQ ID NO: 274 - DNA, 318 bp, Artificial Sequence
  Synthetic Polynucleotide
cagatcgtgctgacacagagccctgccatcatgagtgcctctccaggcgaggaagtgaccctgacctgtagcgccaccagcagcgtgtcctacatccactggtttcagcagaggcccggcacaagccctaagctgtggatctacagcaccagcaatctggcctctggcgtgccagtgcggtttagcggatctggctacggcaccagctacagcctgaccatcagcagaatggaagccgaggatgccgccacctactactgccagcagagaagcagcagccccttcacatttggcagcggcaccaagctggaaatcaaa

SEQ ID NO: 275 - DNA, 339 bp, Artificial Sequence
  Synthetic Polynucleotide
gacatcgtgctgacacagagccctgcttctctggccgtttctcctggacagagggccaccatcacatgcagagccagcaagagcgtgtccaccagcggctacagctacatgcactggtatcagcagaagcccggccagcctcctaagctgctgatctacctggcctccaacctggaaagcggagtgcctgccagattttctggcagcggctctggcaccgacttcaccctgacaatcaaccccgtggaagccaacgacaccgccaactactactgccagcacagcagagagctgcccttcacatttggcggaggcaccaaggtggaaatcaagagaaca

SEQ ID NO: 276 - DNA, 324 bp, Artificial Sequence
  Synthetic Polynucleotide
gacatccagatgacacagagccctagcagcctgtccgtgtccgtgggagacagagtgaccatcacatgcaaggccagccagaacgtgcggacagtggtggcttggtatcagcagaagcctggactggcccctaagacactgatctacctggcctccaacagacacaccggcgtgccaagcagattttctggcagcggctctggcaccgacttcaccttcacaatatccagcctccagcctgaggacattgccacctacttttgccagcagcactggtcttaccctctgacctttggacagggcaccaaggtggaagtgaagaga

SEQ ID NO: 277 - DNA, 339 bp, Artificial Sequence
  Synthetic Polynucleotide
gacattcagatgacacagagccctagcagcctgagcgcctctgtgggagacagagtgaccatcacatgcaagagcagccagagcctgctgtactccagcaatcagaagaactacctggcctggttccagcagaagcctggcaaggctcctaagctgctgatctactgggccagcaccagagaaagcggcgtgccaagcagattttctggcagcggctctggcaccgacttcaccctgacaatatccagcctccagcctgaggacttcgccacctacttttgccaccagtacctgagcagctacacattcggacagggcaccaaggtggaaatcaagcgg

SEQ ID NO: 278 - DNA, 339 bp, Artificial Sequence; identical to SEQ ID NO: 193
  Synthetic Polynucleotide

SEQ ID NO: 279 - DNA, 345 bp, Artificial Sequence
  Synthetic Polynucleotide
gaggtgcagctggttgaatctggcggaggactggttcagcctggcggatctctgagactgtcttgtgccgccagcggctacaccttcaccacctattggatgcactgggtccgacaggcccctggcaaaggacttgagtgggtcggatatatcaggcccagcaccggctacacagagtacaaccagaagttcaaggaccgcttcaccatcagcgccgacaccagcaagaataccgcctacctccagatgaacagcctgagagccgaggacaccgccgtgtactactgtgccagatccagatggctgctggactattggggccagggcacactggttacagtttct

SEQ ID NO: 280 - DNA, 324 bp, Artificial Sequence; identical to SEQ ID NO: 194
  Synthetic Polynucleotide

SEQ ID NO: 281 - DNA, 324 bp, Artificial Sequence
  Synthetic Polynucleotide
gacatccagatgacacagagccctagcagcctgtctgccagcgtgggagacagagtgaccatcacctgtagagccagccaggacatcagcagctacctgaactggtatcagcagaagcccggcaaggcccctaagctgctgatctactacaccagcagactgcacagcggcgtgcccagcagattttctggctctggcagcggcaccgacttcaccctgacaatatctagcctccagcctgaggacttcgccacctactattgccagcagggcaacaccctgccttacacatttggacagggcaccaaggtggaaatcaagaga

SEQ ID NO: 282 - DNA, 324 bp, Artificial Sequence
  Synthetic Polynucleotide
gacatccagatgacacagagccctagcagcctgtctgccagcgtgggagacagagtgaccatcacctgtagagccagccaggacatcagcaactacctgaactggtatcagcagaagcccggcaaggcccctaagctgctgatctactacaccagcagactgcacagcggcgtgcccagcagattttctggctctggcagcggcaccgacttcaccctgacaatatctagcctccagcctgaggacttcgccacctactattgccagcagggcaacaccctgccttggacatttggacagggcaccaaggtggaaatcaagaga

SEQ ID NO: 283 - DNA, 32 bp, Artificial Sequence
  Synthetic Polynucleotide
  misc_feature (30)..(32): n is a, c, g, or t
gggggggggggggggggggggggggggggnnn

SEQ ID NO: 284 - DNA, 32 bp, Artificial Sequence; identical to SEQ ID NO: 283
  Synthetic Polynucleotide
  misc_feature (30)..(32): n is a, c, g, or t

SEQ ID NO: 285 - DNA, 32 bp, Artificial Sequence; identical to SEQ ID NO: 283
  Synthetic Polynucleotide
  misc_feature (30)..(32): n is a, c, g, or t

SEQ ID NO: 286 - DNA, 32 bp, Artificial Sequence; identical to SEQ ID NO: 283
  Synthetic Polynucleotide
  misc_feature (30)..(32): n is a, c, g, or t

SEQ ID NO: 287 - DNA, 32 bp, Artificial Sequence; identical to SEQ ID NO: 283
  Synthetic Polynucleotide
  misc_feature (30)..(32): n is a, c, g, or t

SEQ ID NO: 288 - DNA, 375 bp, Artificial Sequence
  Synthetic Polynucleotide
gggggaggcggctctcaggtgcaactccagcagtctggcgctgagcttgtgaagcctggggccagcgtgaagattagctgcaaggccagcggctacgccttcagcagctactggatgaactgggtcaagcagcggcctggcaagggcctggaatggatcggccaaatctaccccggcgacggcgacaccacctacaacggcaagttcaagggcaaggccaccctgacagccgacaagagcagcagcaccgtgtacatgcaactgaacagcctgaccagcgaggacagcgccgtgtacttctgcgtgcggtactactacggcagctccggctacttcgactattggggccagggcaccacactgaccgtgtcctct

SEQ ID NO: 289 - DNA, 360 bp, Artificial Sequence
  Synthetic Polynucleotide
gctctccagctccagcagtctggcgcagaactcgtgcggcctggcgcttctgtgaccctgagctgtaaagccagcggctacaccttcaccgactacgagatgcactgggtcaagcagacccctgtgcacggcctggaatggatcggagccatcgaccctgagacaggcggcaccgcctacaaccagaagttcgagggcaaggccatcctgaccgccgacaagagcagcagcacagcctacatggaactgcggagcctgacctccgaggacagccccgtgtactactgtgccagacggcggtactacggcagcagctccttcgactattggggccagggcaccaccctgaccgtgtctagt

SEQ ID NO: 290 - DNA, 351 bp, Artificial Sequence
  Synthetic Polynucleotide
caggtgcagctggtgcagtctggccccgaagtgaagaaacccggcgagtccgtgaagatcagctgcaaggccagcggctacaccttccggcactacagcatgaactgggtcaagcaggccccaggccagggcctgaagtggatgggcagaatcaacaccgagagcggcgtgcccatctacgccgacgacttcaagggccggttcagcttcaccgtggacaccagcgccagcaccgcctacctggaaatctccagcctgaccagcgaggataccgccgtgtatttctgctccaacgactacctgtacagcctggatttctggggccagggaaccaccctgacagtgtcctct

SEQ ID NO: 291 - DNA, 363 bp, Artificial Sequence
  Synthetic Polynucleotide
caggtgcagctggtccagagcggcgccgaagtgaagaagcccggcagctccgtgaaagtgagctgcaaggccagcggcggcaccttcagcaactactggatgcactgggtgaggcaggcccccggacagggcctggagtggatgggcgccacctacaggggccacagcgacacctactacaaccagaagttcaagggccgggtgaccatcaccgccgacaagagcaccagcaccgcctacatggaactgagcagcctcaggagcgaggacaccgctgtgtattactgcgccaggggcgccatctacgacggctacgacgtgctggacaactggggccagggcacactggtgaccgtgtccagc

SEQ ID NO: 292 - DNA, 360 bp, Artificial Sequence
  Synthetic Polynucleotide
gaagtgcagctggtgcagtctggggccgaagtgaagaagcctggcgagagcctgaagatcagctgcaagggcagcggctacagcttcaccgactactacatgaagtgggccagacagatgcccggcaagggcctggaatggatgggcgacatcatccccagcaacggggccaccttctacaaccagaaattcaagggccaagtgaccatctccgccgacaagagcatcagcaccacctacctccagtggtccagcctgaaggccagcgacaccgccatgtactattgcgccagaagccatctgctgcgggccagttggttcgcctattggggccagggaacaatggtcacagtgtccagc

SEQ ID NO: 293 - DNA, 366 bp, Artificial Sequence
  Synthetic Polynucleotide
caggtgcaactccagcagtccggaagcgagcttatgatgccaggggcatcagtgaagatcagctgcaaggctactggctacaccttctctaattactggatagagtgggttaaacaaaggccagggcacggcctggaatggatcggcgagatcctgcctgggacaggccgaaccatttataacgagaagttcaaaggcaaggctactttcaccgcagatataagctctaatacagtgcaaatgcagctctcttccctgacaagtgaggatagtgccgtgtattattgcgcacgaagagattactatggaaatttttattacgctatggattattggggtcaaggaacaagtgtgaccgttagcagc

SEQ ID NO: 294 - DNA, 354 bp, Artificial Sequence
  Synthetic Polynucleotide
gaagtgcaactccagcagagcggccctgagcttgtgaagcctggcgcttccgtgaagatgagctgcaaggccagcggctacaccttcaccgactactacatgaagtggatgaagcagagccacggcaagtccctggaatggatcggcgacatcaaccccaacaacggcggcaccacctacaaccagaagttcaagggcaaggccaccctgaccgtggacaagagcagcagcaccgcctacatgcaactgaacagcctgaccagcgaggacagcgccgtgtactactgcgccagagactacggctacggctatttcgactactggggccagggcacaaccctgacagtgtcctct

SEQ ID NO: 295 - DNA, 360 bp, Artificial Sequence
  Synthetic Polynucleotide
caggtgcagctccaggaatctggccctggcctcgtgaagcctagccagaccctgagcctgacctgtaccgtgtctggcggcagcatcagcacaagcggcatgggcgtgggctggatcagacagcaccctggcaagggcctggaatggatcggccacatttggtgggacgacgacaagcggtacaaccccgccctgaagtccagagtgaccatcagcgtggacaccagcaagaaccagttcagcctgaagctgagcagcgtgacagccgccgataccgccgtgtattattgcgcccggatggaactgtggtcctactacttcgactactggggccagggaaccctcgtgaccgtgtctagt

SEQ ID NO: 296 - DNA, 360 bp, Artificial Sequence
  Synthetic Polynucleotide
gaggtgaaactgcaggagtcaggacctggcctggtggcgccctcacagagcctgtccgtcacatgcactgtctcaggggtctcattacccgactatggtgtaagctggattcgccagcctccacgaaagggtctggagtggctgggagtaatatggggtagtgaaaccacatactataattcagctctcaaatccagactgaccatcatcaaggacaactccaagagccaagttttcttaaaaatgaacagtctgcaaactgatgacacagccatttactactgtgccaaacattattactacggtggtagctatgctatggactactggggtcaaggaacctcagtcaccgtctcctca

SEQ ID NO: 297 - DNA, 360 bp, Artificial Sequence
  Synthetic Polynucleotide
caggtgcaactccaggaatctggccctggcctcgtgaagcccagcgagacactgagcctgacctgtaccgtgtccggcgtgtccctgcctgactatggcgtgtcctggatcagacagccccctggcaagggcctggaatggatcggagtgatttggggcagcgaaaccacctactacaacagctccctgaagtccagagtgaccatctccaaggacaactccaagaaccaggtgtccctgaagctgagcagcgtgacagccgccgacaccgccgtgtattactgcgccaagcactactactacggcggcagctacgctatggactactggggccagggaaccctcgtgaccgtgtctagt

SEQ ID NO: 298 - DNA, 366 bp, Artificial Sequence
  Synthetic Polynucleotide
gaagtgcagctggtggaatcaggcggcggactggtgcagcctggcagaagcctgagactgagctgtgccgccagcggcttcaccttcaacgactacgccatgcactgggtgcgccaggcccctggaaaaggactggaatgggtgtccacaatcagctggaacagcggcagcatcggctacgccgatagcgtgaagggccggttcaccatcagccgggacaacgccaagaagtccctgtacctccagatgaacagcctgcgggccgaggacacagccctgtactattgcgccaaggacatccagtacggcaactactactacggcatggacgtgtggggccagggaaccaccgtgaccgtgtcatct

SEQ ID NO: 299 - DNA, 357 bp, Artificial Sequence
  Synthetic Polynucleotide
caggtgcaactggtgcagagcggagccgaagtgaaaaagcccggcagcagcgtgaaggtgtcctgcaaggccagcggctacgccttcagctactcctggatcaactgggtgcgccaggcccctggacagggcctggaatggatgggcagaatcttccccggcgacggcgacaccgactacaacggcaagttcaagggcagagtgaccatcaccgccgacaagagcaccagcaccgcctacatggaactgagcagcctgcggagcgaggataccgccgtgtactattgtgccagaaacgtgttcgacggctactggctggtgtactggggccagggaacacttgtgaccgtgtccagc

SEQ ID NO: 300 - DNA, 360 bp, Artificial Sequence
  Synthetic Polynucleotide
gaagtgcaactggtggaaagcggaggcggcctggtgcagcctggcggatctctgagactgagctgtgccgccagcggctacgagttcagccggtcctggatgaactgggtgcgccaggcccctggcaagggactggaatgggtgggaagaatctaccccggcgacggcgacaccaactacagcggcaagttcaagggccggttcaccatcagcgccgacaccagcaagaacaccgcctacctccagatgaacagcctgcgggccgaggataccgccgtgtactactgtgccagagatggcagctcctgggactggtacttcgacgtgtggggacagggaacccttgtgaccgtgtccagc

SEQ ID NO: 301 - DNA, 351 bp, Artificial Sequence
  Synthetic Polynucleotide
caggtgcaactggtgcagagcggagccgaagtgaagaaacccggcagcagcgtgaaggtgtcctgcaaggcttccggcggcaccttcagcagctacgccatttcttgggtgcgccaggctcctggacagggcctggaatggatgggcggcatcatccctatcctgggcaccgccaactacgcccagaaattccagggcagagtgaccatcaccgccgacgagagcaccagcaccgcctacatggaactgagcagcctgcggagcgaggacacagccgtgtattattgcgccagatggggcggaggggccttcgacatttggggccagggaacaatggtcaccgtgtccagc

SEQ ID NO: 302 - DNA, 336 bp, Artificial Sequence
  Synthetic Polynucleotide
caggtgcaactgcagcagtggggagccggactgctgaagcctagcgagacactgagcctgacctgcgccgtgtacggcggcagcttcagcgcctactattggagctggatcagacagccccctggcaagggcctggaatggatcggcgacatcaatcacggcggaggcaccaactacaaccccagcctgaagtcccgcgtgaccatctccgtggacaccagcaagaaccagttctccctgaagctgaacagcgtgacagccgccgacacagccgtgtactactgtgccagcctgaccgcctattggggccagggatctcttgtgaccgtgtccagc

SEQ ID NO: 303 - DNA, 351 bp, Artificial Sequence
  Synthetic Polynucleotide
caggtgcaactggtgcagtccggcgctgaagtgaagaaacctggggccagcgtgaaggtgtcctgcaaggtgtccggctacacctttaccgactactacattacctgggtgcgccaggcccctggacaggccctggaatggatgggctggatctaccccggcagcggcaacaccaagtacagccagaagttccagggcagattcgtgttcagcgtggacaccagcgccagcaccgcctacctgcaactgtctagcctgaaggccgaagataccgccgtgtactactgcgccaactacggcaactattggttcgcctattggggccagggaacccttgtgaccgtgtcctct

SEQ ID NO: 304 - DNA, 357 bp, Artificial Sequence
  Synthetic Polynucleotide
gaagtgcaactggtgcagtctggcggagggctggtgcatcctgggggaagcctgagactgagctgtgccggctctggcttcgccttcagcagcagcaccatgcactggatcagacaggcccctggcaagggcctggaatggatcagcctgatcggaagcggagggggcatctactacggcgacagcgtgaagggccggttcaccatcagccgggacaacgccaagaacagcctgtacctccagatgaactccctgcgggccgaggacatggccgtgtactattgtgtgcggggctacttcgactgggtggactacttcgattactggggccagggcaccctcgtgaccgtgtcatct

SEQ ID NO: 305 - DNA, 360 bp, Artificial Sequence
  Synthetic Polynucleotide
gaagtgcaactggtggaatcaggcggcggactggtgcagcctggcggatctctgagactgagctgtgccgccagcggcttcaccttcagcagctacggaatgcactgggtgcgccaggcccctggcaaaggactggaatgggtggcctacatcaccaccagaagcagcaccatctactacgccgacagcgtgaagggccggttcaccatctccagagacaacgccaagaacagcctgtacctccagatgaactccctgcgggccgaggacaccgccgtgtactattgcaccagagagcccctgaccggctactacgctatggactattggggccagggcaccagcgtgaccgtgtctagt

SEQ ID NO: 306 - DNA, 348 bp, Artificial Sequence
  Synthetic Polynucleotide
gatgtgcaactccaggaaagcggccctggccttgtgaagcctagccagagcctgtccctgacctgtaccgtgaccggcttcagcatcaccagcgactactcttggaactggatcagacagttccctggcaacaaactggaatggatgggctacatcagctactccggccacacctcctacaaccccagcctggaaagccggatctccatcaccagagacaccagcaagaaccagttcttcttgcaactgaacagcgtgaccaccgaggataccgccacatattactgtaccagaggcaactgggacgtggtgtactggggccagggcacacttgtgaccgtgtctgct

SEQ ID NO: 307 - DNA, 354 bp, Artificial Sequence
  Synthetic Polynucleotide
caggtgcaactgcagcagcctggcgctgaggtcgtgaagccaggcgcttccgtgaagatgtcctgcaaggccagcggctacaccttcaccagctactacatccactggatcaagcagacccctggacagggcctggaatgggtgggagtgatctaccccggcaacgacgacatcagctacaaccagaagttccagggcaaggccaccctgaccgccgacaagtctagcaccaccgcctacatgcaactgtccagcctgaccagcgaggacagcgccgtgtactactgcgccagagaagtgcggctgcggtacttcgatgtgtggggccagggaaccaccgtgaccgtgtcatct

SEQ ID NO: 308 - DNA, 366 bp, Artificial Sequence
  Synthetic Polynucleotide
caggtgcagctggtgcagagcggtgccgaagtgaagaaaccaggtgcatccgttaaagtttcatgtaaggctagtggatataccttcaccaattacggaatgaactgggtgaaacaggcccctggccagggactgaagtggatggggtggattaacacctacaccggggagccgacttatgcagacgactttaaggggcgggtcacgatgacctccgacacctccaccagtaccgcctacctggagctgcacaaccttaggtcagacgataccgccgtgtattactgtgcccgatggtcttggtccgacggatactatgtctacttcgactattggggccaggggaccacagttaccgtgtcctct

SEQ ID NO: 309 - DNA, 366 bp, Artificial Sequence
  Synthetic Polynucleotide
cagatccaactggtgcagagcggcagcgagctgaagaaacctggggccagcgtgaaggtgtcctgcaaggccagcggctacacctttaccaactacggcatgaactgggtgcgccaggcccctggacagggcctgaaatggatgggctggatcaacaccaacaccggcgagcctaagtacgccgaagagttcaagggcagattcgccctgagcctggacaccagcgtgtccacagcctacctccagatcaacagcctgaaggccgaggataccgccgtgtacttctgcgccagaggctacggcaactacgccagaggggcttggctggcctattggggccagggaacactcgtgaccgtgtcctct

SEQ ID NO: 310 - DNA, 363 bp, Artificial Sequence
  Synthetic Polynucleotide
caggtgcagctgaaagagagcggccctgagctggaaaagcctggggccagcgtgaagattagctgcaaggccagcggctacagcttcaccgcctacagcatgaactgggtcaagcagaacaacggcatgagcctggaatggatcggcagcatcgacccctactacggcgacaccaaatacgcccagaagttcaagggcaaggccaccctgaccgtggataaggccagcagcaccgcctacctccagctgaagtctctgaccagcgaggacagcgccgtgtactactgcgccagacggatgattaccaccggcgactggtacttcgacgtgtggggagccggaaccaccgtgacagtgtctagc

SEQ ID NO: 311 - DNA, 363 bp, Artificial Sequence; identical to SEQ ID NO: 310
  Synthetic Polynucleotide

SEQ ID NO: 312 - DNA, 354 bp, Artificial Sequence
  Synthetic Polynucleotide
caggtgcagctggtgcagtctggggccgaagtgaagaaacctggggccagcgtgaaggtgtcctgcaaggccagcggatacacctttaccaactacggcatgaactgggtgcgccaggcccctggacagggcctggaatggatgggctggatcaacacctacaccggcgagcccacatacgccgacgccttcaagggcagattcgccttcagcctggacaccagcacctccaccgcctacctccagatcaacagcctgcggagcgacgacaccgccgtgtattattgcgccagagattacggcgactacgggatggactattggggccagggaaccaccgtgaccgtgtcctct

SEQ ID NO: 313 - DNA, 339 bp, Artificial Sequence
  Synthetic Polynucleotide
caggtgcaactgcagcagcctggcgctgaacttgtgcggccaggcgcctctgtgaagctgagctgtaaagccagcggctacaccttcaccagctactggatgaactgggtcaagcagcgcccaggccagggcctggaatggatcggaatgatcgaccccagcgacagcgagacacactacaaccacatcttcaaggacaaggccaccctgaccgtggacaagtccagcagcacagcctacctgcaactgtccagcctgaccagcgaggacagcgccgtgtactactgcgcccggaacctgtatctgtggggccagggaacaagcgtgaccgtgtctagc

SEQ ID NO: 314 - DNA, 351 bp, Artificial Sequence
  Synthetic Polynucleotide
gaagtccaacttgtggagtctggagggggcctggtgcagcccggcggctctctcagactgtcttgtgcggcaagcggctacaccttcagctcttactggatagaatgggtgaggcaggcacctggaaagggactggagtggattggagagattctgccaggagggggagatacaaattacaatgaaatcttcaaggggcgggccaccttttcagcggataccagcaagaatacagcttacctgcagatgaatagcctccgggcagaagataccgctgtttattattgcacgagacgggtgccaataagactggactattgggggcaagggactcttgtcaccgtcagttca

SEQ ID NO: 315 - DNA, 369 bp, Artificial Sequence
  Synthetic Polynucleotide
gaagtgcaactccagcagagcgtggccgagcttgtgaagcctggcgcttccgtgaagatgtcctgcaaggtgtccggctacaccctgacagaccacaccatccactggatgaagcagcggcctgagcagggcctggaatggatcggctacatctaccccagggacggcatcaccggctacaacgagaagttcaagggcaaggccacactgaccgccgacaccagcagcagcacagcctacatgcaactgaacagcctgaccagcgaggacagcgccgtgtacttctgtgccagatggggctacagctacagaaactacgcctactactacgactactggggccagggcacaaccctgaccgtgtctagt

SEQ ID NO: 316 - DNA, 375 bp, Artificial Sequence
  Synthetic Polynucleotide
caggtgcaactccaggaatctggccccggactggctaagcccagcgagacactgagcctgacctgtaccgtgtccggcgacagcatcaccagctactactggtcctggatcagacagccccctggcaagggcctggaatggatcggctacatctactacagcggcagcaccaactacaaccccagcctgaagtccagagtgaccatcagcgtggacaccagcaagaaccagttctccctgaagctgagcagcgtgacagccgccgacaccgccgtgtattattgcgccagagatcagcggagaatcgccgctgccggcacccacttttacggcatggatgtgtggggccagggcaccaccgtgaccgtgtcatct

SEQ ID NO: 317 - DNA, 348 bp, Artificial Sequence
  Synthetic Polynucleotide
caggtgcaactgctggaatctggcggcggactggtgcagcctggcggatctctgagactgagctgtgccgccagcggcttcaccttcagcagctacgccatgagctgggtgcgccaggcccctggaaaaggactggaatgggtgtccgtgatccggtccagcggcagcagcacctattacgccgatagcgtgaagggccggttcaccatcagccgggacaacagcaagaacaccctgtacctccagatgaacagcctgcgggccgaggacaccgccgtgtactattgtgctaggggaggcggctacttcgactactggggccagggaacactcgtgaccgtgtcctct

SEQ ID NO: 318 - DNA, 354 bp, Artificial Sequence
  Synthetic Polynucleotide
caggtgcaactgctggaatctggcggcggactggtgcagcctggcggatctctgagactgagctgtgccgccagcggcttcaccttcagcagccacggaatgcactgggtgcgccaggcccctggaaagggactggaatgggtgtccgtgatctccggcagcggcagcaataccggctacgccgatagcgtgaagggccggttcaccatcagccgggacaacagcaagaacaccctgtacctccagatgaacagcctgcgggccgaggacaccgccgtgtactattgtgccagacagtggggcagctacgccttcgattcttggggccagggcaccctcgtgaccgtgtcatct

SEQ ID NO: 319 - DNA, 354 bp, Artificial Sequence
  Synthetic Polynucleotide
caggtgcagctggaagagtctggacccgagcttgtgaagcctggggccagcgtgaagctgtcctgtaaagccagcggctacaccttcaccgagtacatcatccactgggtcaagcagcggagcggccagggcctggaatggatcggctggttttaccctggctccggcagcatcaagtacaacgagaagttcaaggacaaggccaccctgaccgccgacaagtccagcagcaccgtgtacatggaactgagcggcctgaccagcgaggacagcgccgtgtatttctgcgccagacacgacggctacagctacttcgactattggggccagggcaccacactgaccgtgtcctct

SEQ ID NO: 320 - DNA, 345 bp, Artificial Sequence
  Synthetic Polynucleotide
gaatctggaagaggactggtgcagcctggcggcagcagaaagctgtcttgtgccgccagcggcttcaccttcagcaccagcggaatgcactgggtgcgccaggcccctgagaagggactggaatgggtggcctacatcagctccggcagcaccaccatctaccacgccgataccgtgaagggccggttcaccatcagccgggacaaccccaagaataccctgttcctccagatgaccagcctgcggagcgaggacaccgccatgtactattgctgcgccagaagcggccagttcggcaactacttcgactactggggccagggcaccaccctgaccgtgtcatct

SEQ ID NO: 321 - DNA, 360 bp, Artificial Sequence
  Synthetic Polynucleotide
gaggtgcaactgcagcagtctggccccgagcttgtgaagcctggcgcctccgtgaagatgagctgcaaggccagcggctacacctttaccagctacttcatccactgggtcaagcagaaacccggccagggcctggaatggatcggcttcatcaacccttacaacgacggcagcaagtacaacgagaagttcaagggcaaggccaccctgaccagcgacaagagcagcagcaccgcctacatggaactgtccagcctgacatccgaggacagcgccgtgtactactgcaccagggacgacggctactacggctacgccatggactactggggccagggaacaagcgtcaccgtgtcctct

SEQ ID NO: 322 - DNA, 360 bp, Artificial Sequence
  Synthetic Polynucleotide
gaagtgcaactccagcagagcggccctgagcttgtgaagcctggcgcttccgtgaagatgagctgcaaggccagcggctacaccttcaccagctacgtgatgcactgggtcaagcagaaacctggacagggcctggaatggatcggctacatcaacccctacaacgacggcaccaagtacaacgagaagttcaagggcaaggccaccctgacaagcgacaccagcagcagcaccgcctacatggaactgaacagcctgaccagcgaggacagcgccgtgtacttctgcgccagacccatctacttcgacaacgactacttcgattactggggccagggcaccaccctgaaggtgtcctct

SEQ ID NO: 323 - DNA, 357 bp, Artificial Sequence
  Synthetic Polynucleotide
gaagtgcaactggtggaatcaggcggcggactggtgcagcctggcggatctctgagactgagctgtgccgccagcggcttcgacttcagccggtactggatgagctgggtgcgccaggcccctggcaaaggactggaatggatcggcgagatcaaccccgacagcagcaccatcaactacgcccccagcctgaaggacaagttcatcatcagccgggacaacgccaagaacagcctgtacctccagatgaactccctgcgggccgaggacaccgccgtgtactattgcgccagacccgacggcaactactggtacttcgacgtgtggggccagggaaccctcgtgaccgtgtcatct

SEQ ID NO: 324 - DNA, 360 bp, Artificial Sequence
  Synthetic Polynucleotide
caggtgcagctgcagcagcccggcgccgagctggtgagacccggcgccagcgtgaagctgagctgcaaggccagcggctacagcttcaccacctactggatgaactgggtgaagcagagacccggccagggcctggagtggatcggcatgatccaccccagcgacagcgagaccagactgaaccagaagttcaaggacaaggccaccctgaccgtggacaagagcagcagcaccgcctacatgcagctgagcagccccaccagcgaggacagcgccgtgtactactgcgccagaagcaccatgatcgccaccagagccatggactactggggccagggcaccagcgtgaccgtgagcagc

SEQ ID NO: 325 - DNA, 360 bp, Artificial Sequence
  Synthetic Polynucleotide
caggtgcaactggtgcagagcggagccgaagtgaagaaacctggggccagcgtgaaggtgtcctgcaaggtgtccggctacaccctgaccgagctgagcattcactgggtgcgccaggcccctggcaagggactggaatggatgggcggcttcgaccccgaagagaacgagatcgtgtacgcccagcggttccagggcagagtgacaatgaccgaggacaccagcaccgacaccgcctacatggaactgagcagcctgcggagcgaggataccgccgtgtactactgtgccatcgtgggcagcttcagcggaatcgcctacagaccttggggccagggcacaatggtcaccgtgtctagc

SEQ ID NO: 326 - DNA, 360 bp, Artificial Sequence
  Synthetic Polynucleotide
caggtgcaactggtgcagagcggagccgaagtgaagaaacctggggccagcgtgaaggtgtcctgcaaggtgtccggctacaccctgaccgagctgagcattcactgggtgcgccaggcccctggcaagggactggaatggatgggcggcttcgaccccgaagagaacgagatcgtgtacgcccagcggttccagggcagagtgacaatgaccgaggacaccagcaccgacaccgcctacatggaactgagcagcctgcggagcgaggataccgccgtgtactactgcgccatcgtgggcagcttcagccctctgacactgggcctgtggggccagggaactatggtcaccgtgtccagc

SEQ ID NO: 327 - DNA, 372 bp, Artificial Sequence
  Synthetic Polynucleotide
cagatcaccctgaaagagtccggccccaccctcgtgaagcctacccagaccctgacactgacctgcaccttcagcggcttcagcctgagcacaagcggcatgggcgtgggctggatcagacagcctcctggaaaggccctggaatggctggcccacatttggtgggacgacgtgaagcggtacagccccagcctgaagtcccggctgaccattaccaaggacaccagcaagaaccaggtggtgctgaccatgacaaacatggaccccgtggacaccgccacatattactgcgcccggatcgtgtccttcgacaacgacgtggtgtccgctatggactactggggccagggaaccctcgtgaccgtgtctagt

SEQ ID NO: 328 - DNA, 354 bp, Artificial Sequence
  Synthetic Polynucleotide
caggtgcaactggtgcagagcggagccgaagtgaagaaacctggggccagcgtgaaggtgtcctgcaaggccagcggctacacctttaccaactacggcatgaactgggtgcgccaggctcctggacagggcctggaatggatgggctggatcaacacctacaccggcgagcccacctacgccgacgacttcaagggcagagtgaccatgaccaccgacaccagcacctccaccgcctacatggaactgcggagcctgagaagcgacgacaccgccgtgtattattgcgcccggatcggcgacagcagccccagcgattattggggccagggaaccctcgtgaccgtgtcctct

SEQ ID NO: 329 - DNA, 357 bp, Artificial Sequence
  Synthetic Polynucleotide
caggtgcagctgaagcagagcggacctggcctggtgcagcctagccagagcctgtccatcacctgtaccgtgtccggcttcagcctgaccaactacggcgtgcactgggtgcgccagagccctggaaaaggactggaatggctgggagtgatttggagcggcggcaacaccgactacaacacccccttcaccagcagactgtctatcaacaaggacaacagcaagagccaggtgttcttcaagatgaacagcctccagagcaacgacaccgccatctactactgtgctagagccctgacctactatgactacgagttcgcctactggggccagggcacactcgtgacagtgtctgct

SEQ ID NO: 330 - DNA, 342 bp, Artificial Sequence
  Synthetic Polynucleotide
gagatccagctggtgcagagcggagccgaagtgaagaagcctggcgagagcctgcggatcagctgcaagggcagcggcttcaacatcgaggactactacatccactgggtgcgccagatgcccggcaagggcctggaatggatgggcagaatcgaccccgagaacgacgagactaagtacggccccatcttccagggccacgtgaccatcagcgccgacaccagcatcaacaccgtgtacctccagtggtccagcctgaaggccagcgacaccgccatgtactactgcgcctttagaggcggcgtgtactggggccagggcaccacagtgacagtgtctagc

SEQ ID NO: 331 - DNA, 381 bp, Artificial Sequence
  Synthetic Polynucleotide
gaggtgcaactgctggaatctgggggcggagtggtgcagcctggcagaagcctgagactgagctgtgccgccagcggcttcaccttcagctcctacggaatgcactgggtgcgccaggcccctggcaaaggactggaatgggtggccgtgatctcctacgacggcagcaacaagtactacgccgacagcgtgaagggccggttcaccatcagccgggacaacagcaagaacaccctgtacctgcagatgaacagcctgcgggccgaggacaccgccgtgtactactgcgccaaggatatgggctggggcagcggctggcggccttactactactacggcatggacgtgtggggccagggcaccaccgtgacagtgtcatct

SEQ ID NO: 332 - DNA, 360 bp, Artificial Sequence
  Synthetic Polynucleotide
gaagtgcagctgctggaacagtctggcgccgaacttgtgcggcctggcaccagcgtgaagatcagctgtaaagccagcggctacgccttcaccaactactggctgggctgggtcaagcagaggcctggacacggcctggaatggatcggcgacatctttcccggctccggcaacatccactacaacgagaagttcaagggcaaggccaccctgaccgccgacaagtctagcagcaccgcctacatgcagctgtccagcctgacctttgaggacagcgccgtgtatttctgtgcccggctgcggaactgggacgagcccatggattattggggccagggcaccaccgtgaccgtgtctagt

SEQ ID NO: 333 - DNA, 372 bp, Artificial Sequence
  Synthetic Polynucleotide
gtgcacgaggtccagcttgtgcagtccggggcagaggtcaagaagcctggttctagcgtaaaagtgagttgcaaagcctcaggtgggacattttcatcctacgcgatcagttgggttagacaggctcctggtcaagggctggaatggatgggcggaattattccaatcttcggaacagcgaattacgcgcagaagttccagggtagagtaaccatcactgctgacaagtccacctccaccgcatacatggaattgtctagtctccggagcgaggatacggcggtgtattattgtgctacgttcgccctgtttggcttccgcgaacaggctttcgacatctgggggcagggcacgacagtcacggttagtagt

SEQ ID NO: 334 - DNA, 366 bp, Artificial Sequence
  Synthetic Polynucleotide
agggcacacctggtgcagtctggcaccgccatgaagaaacctggcgcttccgtcagagtgtcctgtcagacaagcggctacaccttcacagcccacatcctgttctggttcagacaggccccaggcagaggactggaatgggtcggatggatcaagccccagtacggggccgtgaatttcggcggaggcttcagagacagagtgaccctgaccagggacgtgtaccgggaaatcgcctacatggacatccggggcctgaagcctgatgacaccgccgtgtactactgcgccagggatagaagctacggcgacagctcttgggctctcgatgcttggggacagggcacaacagtggtggtgtctgct

SEQ ID NO: 335 - DNA, 354 bp, Artificial Sequence
  Synthetic Polynucleotide
caggtccaactggtgcagagcggagccgaggtcgtgaagcctggcgcttccgtgaagattagctgcaaagccagcggctacacctttaccggctactttatgaactgggtcaagcagagccctggccagagcctggaatggatcggcagaatccacccctacgacggcgacaccttctacaaccagaagttccagggcaaggccaccctgacagtggacaagagcagcaacaccgcccacatggaactgctgagcctgaccagcgaggacttcgccgtgtactactgcaccagatacgacggcagccgggctatggactattggggccagggcaccaccgtgaccgtgtctagt

SEQ ID NO: 336 - DNA, 339 bp, Artificial Sequence
  Synthetic Polynucleotide
gaagtgcagctggtgcagtctggcgctgaggtggaaaagcctggggccagcgtgaagattagctgcaaggccagcggcagcagcttcaccggctacaacatgaactgggtgcgccagaacatcggcaagagcctggaatggatcggagccatcgacccctactacggcggcaccagctacaaccagaagttcaagggcagagccaccctgaccgtggacaagagcaccagcaccgcctacatgcacctgaagtccctgcggagcgaggacaccgccgtgtactactgtgtgtccggcatggaatattggggccagggcaccagcgtgaccgtgtctagt

SEQ ID NO: 337 - DNA, 363 bp, Artificial Sequence
  Synthetic Polynucleotide
caggtgcagctggtggaatctggacctggcgtggtgcagcctggcagaagcctgagaatcagctgtgccgtgtccggcttcagcgtgaccaactacggcgtgcactgggtgcgccagccacctggaaaaggactggaatggctgggcgtgatctgggctggcggcatcaccaactacaacagcgccttcatgtcccggctgaccatctccaaggacaacagcaagaacaccgtgtacctccagatgaacagcctgcgggccgaggacaccgccatgtactactgtgcttccagaggcggccactacggctacgccctggattattggggccagggaaccctcgtgaccgtgtcctctacgcgt

SEQ ID NO: 338 - DNA, 357 bp, Artificial Sequence
  Synthetic Polynucleotide
gaagtgaccctggtggaaagcggcggagacttcgtgaagcctggcggctctctgaaggtgtcctgtgccgccagcggcttcgcctttagccactacgccatgagctgggtgcgccagacccctgccaagagactggaatgggtggcctacatcagcagcggcggctccggcacctactactccgatagcgtgaagggccggttcaccatcagccgggacaacgccaagaacaccctgtacctccagatgcggagcctgcggagcgaggacagcgccatgtatttctgcaccagagtgaagctgggcacctattacttcgactcttggggccagggcaccaccctgaccgtgtcatct

SEQ ID NO: 339 - DNA, 354 bp, Artificial Sequence
  Synthetic Polynucleotide
gagcaactgaaagagtctggcggcggactgttcaagcccaccgataccctgaccctgacctgcaccgtgtccggcttcagcctgagctactacggcgtgaactgggtgcgccaggcccctggcaatggcctggaatggatcggcacaatcggcggcagcggcgacacctactatgcctcttgggccaagtccagaagcaccatcatcagaaacaccaacgagaacaccgtgaccctgaagatgaccagcctgacagccgccgacaccgccacctacttttgcgtcagatacgccaacatcggctacgagtatttcaacgtgtggggacccggcaccctcgtgaccgtgtcatct

SEQ ID NO: 340 - DNA, 363 bp, Artificial Sequence
  Synthetic Polynucleotide
gaagtgcaactggtggaatcaggcggcggactggtgcagcctggcgagtctctgagactgagctgtgtggcctccggcttcaccttcagccggtacaagatgaactgggtgcgccaggcccctggcaagggactggaatgggtgtcctacatcagccgcagcggcagagacatctactacgccgacagcgtgaagggccggttcaccatcagcagagacaacgccaagaacagcctgtacctccagatgaactccctgcgggacgaggacaccgccgtgtactactgtgccggaaccgtgaccacctattactacttcggcatggacgtgtggggccacggcaccaccgtgacagtgtcatct

SEQ ID NO: 341 - DNA, 348 bp, Artificial Sequence
  Synthetic Polynucleotide
gaagtgcagctcgttgagtctggcggcggactgattcaacctggcggaagcctgagactgagctgtgccgcttccggcttcaccttcagcaactacgccatgaactgggttcgacaggcccctggcaaaggactggaatgggtgtccaccatcaacggcagaggcagcagcaccatctacgccgattctgtgaagggcagattcaccatcagccgggacaacagcaagaacaccctgtacctccagatgaactccctgagagccgaggacaccgccacctattactgtgcccggtacatcagcagaggactgggcgattcttggggccagggcacactggttacagtg

SEQ ID NO: 342 - DNA, 351 bp, Artificial Sequence
  Synthetic Polynucleotide
gaagttcagctggttgaatctggcggcggactggttaagcctggcggatctctgagactgtcttgtgccgccagcggcttcaccttcagcgattactacatgagctggatcagacaggcccctggcaaaggactggaatgggtgtcctacatcagcagcagcggctccaccatctactacgccgatagcgtgaagggcagattcaccatcagccgggacaacgccaagaacagcctgtacctccagatgaactccctgagagccgaggacaccgccgtgtactattgcgccagaggctacggcaaagcctacgatcaatggggccagggcacactggtcaccgtttcttct

SEQ ID NO: 343 - DNA, 360 bp, Artificial Sequence
  Synthetic Polynucleotide
gaagtgcaactggtggaatctggcggcggactggtgcagcctggcggatctctgagactgagctgtgccgccagcggcttcaacatcaaggacacctacatccactgggtgcgccaggcccctggaaagggactggaatgggtggcccggatctaccccaccaacggctacaccagatacgccgacagcgtgaagggccggttcaccatcagcgccgacaccagcaagaataccgcctacctccagatgaacagcctgcgggccgaggataccgccgtgtactactgctcaagatggggaggcgacggcttctacgctatggacgtgtggggccagggcacccttgtgaccgtgtcatct

SEQ ID NO: 344 - DNA, 405 bp, Artificial Sequence
  Synthetic Polynucleotide
cagccccagctccaggaatctggccccacactggtggaagccagcgagacactgagcctgacctgtgccgtgtccggcgattctaccgccgcctgcaatagcttctggggctgggtgcgccagcctcctggaaagggactggaatgggtgggaagcctgagccactgcgccagctattggaaccggggctggacctaccacaaccccagcctgaagtccagactgaccctggccctggacacccccaagaacctggtgttcctgaagctgaacagcgtgacagccgccgacaccgccacctactactgtgccagatttggcggcgaggtgctgcggtacaccgactggcctaaacctgcctgggtggacctgtggggcagaggaacactcgtgaccgtgtccagc

SEQ ID NO: 345 - DNA, 384 bp, Artificial Sequence
  Synthetic Polynucleotide
ctggaacagagcggagccgaagtgaagaaacccggcagcagcgtgcaggtgtcctgcaaagcaagcggcggcaccttctctatgtacggcttcaactgggtgcgccaggctcctggacacggcctggaatggatgggcggcatcatccccatcttcggcacctccaactacgcccagaaattccggggcagagtgaccttcaccgccgaccaggccacaagcaccgcctacatggaactgaccaacctgcggagcgacgacaccgccgtgtattattgcgccagagacttcggccccgactgggaggatggcgacagctacgatggcagcggcagaggcttcttcgacttctggggccagggaacccttgtgaccgtgtcctca

SEQ ID NO: 346 - DNA, 354 bp, Artificial Sequence
  Synthetic Polynucleotide
gaagtgcaactgctggaatctggcggcggactggtgcagcctggcggatctctgagactgagctgtgccgccagcggcttcacctttagctggtacagcatgacctgggtgcgccaggcccctggcaaaggactggaatgggtgtccagcatcgtgccctggggcgatttcacccagtacgccgatagcgtgaagggccggttcaccatcagccgggacaacagcaagaacaccctgtacctgcagatgaacagcctgcgggccgaggacaccgccgtgtactattgtgccaagggacctggctggggcagcttcgatctgtggggcagaggaacccttgtgaccgtgtccagc

SEQ ID NO: 347 - DNA, 348 bp, Artificial Sequence
  Synthetic Polynucleotide
gaagtgcaactggtggaatctggcggcggactggtgcagcctggcggatctctgagactgagctgtgccgccagcggcttcagcctgaccaaatacggcgtgcactgggtgcgccaggcccctggaaaaggactggaatgggtgggagtgaagtgggctggcggctccaccgactacaacagcgccctgatgagccggttcaccatcagcaaggacaacgccaagaacagcctgtacctccagatgaactccctgcgggccgaggacaccgccgtgtactactgtgccagagatcaccgggacgctatggactactggggccagggaacactcgtgaccgtgtcctct

SEQ ID NO: 348 - DNA, 366 bp, Artificial Sequence
  Synthetic Polynucleotide
gaagtgcaactggtggaatcaggcggcggactggtgcagcctggcggatctctgagactgagctgtgccgccagcggcttcaccttcagcagaaacggcatgagctgggtgcgccaggcccctggaaaaggactggaatgggtggcaaccgtgtccagcggcggcagctacatctactacgccgacagcgtgaagggccggttcaccatctccagagacaacgccaagaacagcctgtacctccagatgaactccctgcgggccgaggacaccgccgtgtactattgtgccagacagggcaccaccgccctggctaccagattcttcgatgtgtggggccagggcaccctcgtgaccgtgtcatct

SEQ ID NO: 349 - DNA, 351 bp, Artificial Sequence
  Synthetic Polynucleotide
gaagtgcaactggtgcagtccggcggagggctggtgcagagcggaggatctctgagactgagctgcagagccagcggctacaccttcacccggtactggatgctgtgggtgcgccagaggccaggcaagggactggaatgggtggccgagatcaacccccggaacgaccggaccaactacaacgagaagttcaagacccggttcaccatcagcgtggacagaagcaagaacaccctgtacctgcagatggacagcctgcgggccgaggataccgccgtgtacttttgtgctctgggaggcggctacgctatggactactggggccagggaacccttgtgaccgtgtcctct

SEQ ID NO: 350 - DNA, 354 bp, Artificial Sequence
  Synthetic Polynucleotide
caggtgcaactggtgcagagcggagccgagcttgtgaagcctggcgcttccgtgaagatgagctgcaaagccagcggctacatcttcaccaactacaacatccactgggtcaagaagtccccaggccagggcctggaatggatcggagccatctaccccggaaacggcgacgccccttacagccagaagttccaggacagagccaccctgaccgccgacaccagcagcagcaccacctacatggaactgagcagcctgaccagcgaggacagcgccgtgtactattgcgtgcgggccaactgggatgtggccttcgcctattggggccagggcacactggtgtccgtgtcctct

SEQ ID NO: 351 - DNA, 357 bp, Artificial Sequence
  Synthetic Polynucleotide
caggtgcaactccagcagtctggcgcttccgtgaaggtgtcctgcaaggccagcgaactcgtgcggcctggcacaggctacgccttcaccaattacctgatcgagtgggtcaagcagaggcccggacagggcctggaatggatcggagtgattaacccaggcagcggcggcaccaactacaacgagaagttcaagggcaaggccaccctgaccgccgacaagagcagcagcacagcctacatgcaactgagcagcctgaccagcgacgacagcgccgtgtacttctgcgcccggtacagaagctacgactggtacttcgacgtgtggggagccggcaccaccgtgacagtgtcatct

SEQ ID NO: 352 - DNA, 357 bp, Artificial Sequence
  Synthetic Polynucleotide
caggtacagttgaaagaaagcgggcctggactggtagcgccttcccaatctctctccatcacgtgcaccatctctggcttctccctgacttcctatggagttcactgggtgaggcagccccccggcaagggactggaatggctggtcgtcatctggtccgacgggtccacaacctacaactccgctctgaaaagtcggctctctatttctaaagataatagcaagagccaggtgtttctgaaaatgaactctctgcagaccgatgatacggccatttactactgcgcttcacactatggctcaaccttggcattcgcttcctggggccacggaacactggtgaccgtttccgcagcc

SEQ ID NO: 353 - DNA, 381 bp, Artificial Sequence
  Synthetic Polynucleotide
gaggtacagctggaggaaagcggtggaggactggtgcaacctggagggtctatgaagctctcttgcgtagcttctgggttcacgttctccaattactggatgaactgggtgcggcagtcccccgagaaaggcctggaatgggtagcagaaattcggttcaagtcccataactatgctacacactttgccgagtctgtcaaaggccggttcactattagtcgagacgacagcaagtcttcagtctacctgcagatgaataacttgcgggcagaggacacaggtatctactactgcaccaggagaatcggcaactccgactatgactggtggtactttgacgtctggggagcaggcaccagcgtgacggtgagttcagcctca

SEQ ID NO: 354 - DNA, 354 bp, Artificial Sequence
  Synthetic Polynucleotide
gatgtgcagctccaggaatctggccccggactcgtgaagcctagccagagcctgagcctgacatgcaccgtgaccggctacagcatcaccatcgactacacctggaactggatcagacagttccccggcaacaaactggaatggatgggctacatcacctacagcggcagcaccgactacaaccccagcctgaagtccagaagctccatcaccagagacacctctatgaaccagttcttcttgcagctgaacagcgtgaccaccgaggacaccgccacctactattgcgccagactgggcagaagatacgccctggactattggggccagggcaccagcgtgacagtgtcctct

SEQ ID NO: 355 - DNA, 354 bp, Artificial Sequence
  Synthetic Polynucleotide
gatgtgcagctccaggaaagcggccctggcctcgtgaagcctagccagagcctgagcctgacatgcaccgtgaccggctacagcatcaccagcgactacacctggaactggatcagacagttccccggcaacaagctggaatggatgggctacatcacctacagcggcagcaccagctacaaccccagcctgaagtcccggaactccatcaccagagacaccagcaagaaccagttcttcttgcagctgaacagcgtgaccaccgaggacaccgccacctactactgcgccagactgggcagacggtacaccatggactattggggccagggcacctccgtgaccgtgtctagc

SEQ ID NO: 356 - DNA, 354 bp, Artificial Sequence
  Synthetic Polynucleotide
gacgtgcagctgcaggagagcggccccggcctggtgaagcccagccagagcctgagcctgacctgcaccgtgaccggctacagcatcaccagcgactacacctggaactggatcagacagttccccggcaacaagctggagtggatgggctacatcacctacagcggcagcaccagctacaaccccagcctgaagagcagaaacagcatcaccagagacaccagcaagaaccagttcttcctgcagctgaacagcgtgaccaccgaggacaccgccacctactactgcgccagactgggcagaagatacacaatggactactggggccagggcaccagcgtgaccgtgagcagc

SEQ ID NO: 357 - DNA, 360 bp, Artificial Sequence
  Synthetic Polynucleotide
gaggtgcagctggtggaatctgggggcggcctggtccaacctaagggatcactcaagctctcttgtgcggccagcggattctctttcaatacctatgctatgaattgggtgagacaggcgcccggaaagggcctcgaatggatagcccatatccggtcaaaatcaaacaatttcgcaacctactatgcggactccgtgaaggaccgattttccatctcccgagatgcctccgagaatattctgttcctgcagatgaataacctcaagacagaggacaccgccatgtactactgtgtgcgccagggcggtgactttcccatggattactgggggcaggggaccagcgtgaccgtgagctct

SEQ ID NO: 358 - DNA, 360 bp, Artificial Sequence
  Synthetic Polynucleotide
caggtgcaactggtggaatctggcggcggagtggtgcagcctggcagaagcctgagactgagctgtgccgccagcggcttcacctttagcagctacgccatgcactgggtgcgccaggcccctggaaaaggcctggaatgggtggccgtgatctcctacgacggctccaacaagtattacgccgacagcgtgaagggccggttcaccatctccagagacaacagcaagaacaccctgtacctccagatgaacagcctgcgggccgaggacaccgccgtgtactattgtgccagggctcacaacagcagctcttggagcttcgactactggggccagggcaccctcgtgaccgtgtcatct

SEQ ID NO: 359 - DNA, 372 bp, Artificial Sequence
  Synthetic Polynucleotide
gaagtgcggctgcagcagtctggccccgacctgattaagcctggggccagcgtgaagatgagctgcaaggccagcggctacaccttcaccggctacgtgatgcactgggtcaagcagaggccaggccagggcctggaatggatcggcttcatcaacccctacaacgacgacatccagagcaacgagcggttccggggcaaggccaccctgaccagcgataagagcagcaccaccgcctacatggaactgagcagcctgacctccgaggacagcgccgtgtactactgtgctaggggagccggctacaacttcgacggggcctacagattcttcgacttttggggccagggcaccacactgaccgtgtcctct

SEQ ID NO: 360 - DNA, 357 bp, Artificial Sequence
  Synthetic Polynucleotide
caggtgcaactggtggaaagcggagccgaagtgaagaaacctggggccagcgtgaaggtgtcctgcaaggccagcggctacacctttaccggctactacatgcactgggtgcgccaggctccaggccagggactggaatggatgggccggatcaaccccaatagcggcggcaccaactacgcccagaaattccagggcagagtgaccatgaccagagacaccagcatcagcaccgcctacatggaactgagccggctgagaagcgacgacaccgccgtgtactactgcgccagccctagaggcagaggcagcgccttcgatatttggggccagggcacactcgtgaccgtgtcctct

SEQ ID NO: 361 - DNA, 354 bp, Artificial Sequence
  Synthetic Polynucleotide
gaagtgcaactggtggaaagcgggggaggcgtggtgcagccaggcggatctctgagactgagctgtgccgccagcggcttcaccttcagcagctacgccatgagctgggtgcgccaggcccctggaaaaggcctggaatgggtgtccgccatctctggctctggcggcagcacctactacgccgatagcgtgaagggccggttcagcatcagccgggacaacagcaagaacaccctgtacctccagatgaacagcctgcgggccgaggacaccgccgtgtactactgtgccagaaccagaagctccggggccttcgacatctggggccagggaacactcgtgaccgtgtcctct

SEQ ID NO: 362 - DNA, 357 bp, Artificial Sequence
  Synthetic Polynucleotide
gaagtgcaactccagcagagcggcccagagcttgtgaagcctggcgcttccgtgaagattagctgcaaagccagcggctacagcttcaccggctacttcatgaactgggtcaagcagagccacggcaagagcctggagtacatcggcagattcaacccctacaacggcgagacactgtacaaccagaagttcaagggcaaggccaccctgaccgtggacaagagcagcagcaccgtgcacatggaactgctgagcgtgaccagcgaggacagcgccgtgtactactgtggcagaagcggcaacgacgacgctatggactattggggccagggcaccagcgtgaccgtgtctagtgct

SEQ ID NO: 363 - DNA, 348 bp, Artificial Sequence
  Synthetic Polynucleotide
caggtgcaactccagcagtccgacgccgagcttgtgaagcctggcgcttccgtgaagattagctgcaaggccagcggctacaccttcaccgaccacgccattcactgggtcaagcagaagcccgagcagggcctggaatggatcggctacttcagccccggcaacggcgacatcaagtacaacgagaagttcaagggcaaggccaccctgaccgccgacaagagcagcagcacagcctacatgcaactgaacagcctgaccagcgaggactccgccgtgtacttctgcaagcggagctacggcaactacgactactggggccagggcaccacactgaccgtgtctagt

SEQ ID NO: 364 - DNA, 348 bp, Artificial Sequence
  Synthetic Polynucleotide
caggtgcagctggtgcagtctggggccgaagtgaagaaaaccggcagcagcgtgaaggtgtcctgcaaggccagcggctacacctttaccgaccacgccattcacgtgtggcggcaggctccaggacaggccctggaatggatgggccacttcagccccggcaacaccgacatcaagtacaacgacaagttcaagggcagagtgaccctgaccgtggaccgcagcatgagcaccgcctacatggaactgagcagcctgcggagcgaggacaccgccatgtactattgcaagaccagcaccttctttttcgactactggggccagggaacaatggtcaccgtgtccagc

SEQ ID NO: 365 - DNA, 363 bp, Artificial Sequence
  Synthetic Polynucleotide
cagatccaactggtgcagagcggccacgaagtgaagaaacctggggccagcgtgaaggtgtcctgcaaagccagcggctacacctttaccaactacggcatgaactgggtgcgccaggcccctggacagggcctggaatggatgggctggatcaacaccaagaccggcgagcccacctacgccgaagagttcaagggcagattcgtgttcagcctggaaaccagcgcctccaccgcctacctccagatcagctctctgaaggccgaggacaccgccatgtacttttgcggcagaggcggctacggcagcagctactggtacttcgatgtgtggggccagggcaccaccgtgaccgtgtcatct

SEQ ID NO: 366 - DNA, 363 bp, Artificial Sequence
  Synthetic Polynucleotide
cagatgcaactggtgcagagcggagccgaagtgaaagagcctggcgagagcctgcggatctcctgcaagggcagcggctacagcttcaccaatttctggatctcttgggtgcgccagatgcccggcaagggcctggaatggatgggcagagtggaccccggctactcctacagcacctacagccctagcttccagggccacgtgaccatcagcgccgacaagagcaccagcaccgcctacctccagtggaacagcctgaaggccagcgacaccgccatgtactactgcgccagagtgcagtacagcggctattacgattggttcgacccctggggccagggcacactcgtgacagtgtcaagc

SEQ ID NO: 367 - DNA, 354 bp, Artificial Sequence
  Synthetic Polynucleotide
caggtgcagctggtgcagtctggggccgaagtgaagaagcctggcgagagcctgaagatcagctgcaagggctccggctacaacttctctaacaagtggatcggctgggtgcgccagctgcctggcagaggactggaatggatcgccatcatctaccccggctacagcgacatcacctacagccccagcttccagggccgcgtgacaatcagcgccgacaccagcatcaacaccgcctacctgcactggcacagcctgaaggccagcgacaccgccatgtactactgcgtgcggcatacagccctggctggcttcgattattggggcctgggcaccctcgtgaccgtgtctagt

SEQ ID NO: 368 - DNA, 363 bp, Artificial Sequence
  Synthetic Polynucleotide
gaagtgcaactggtgcagtctggcggaggggtcatgcggcctggcggatctctgagactgtcttgtgccgccagcggcttcaccttcgacgactacggcatgagctgggtgcgccaggcccctggaaaaggcctggaatgggtgtccggcatcaactggaatggcggcagcaccggctacgccgattctgtgcggggcagattcaccatcagccgggacaacgccaagaacagcctgtacctgcagatgaactccctgcgggccgaggacaccgccctgtactattgcgccagagagcggggctacggctaccacgaccctcacgattattggggccagggcacccttgttaccgtgtcctct

SEQ ID NO: 369 - DNA, 354 bp, Artificial Sequence
  Synthetic Polynucleotide
cagattcagctggtgcagtctggccccgagctgaagaaacctggcgagacagtgaagatcagctgcaaggccagcggctacatcttcaccaattacggcatgaactgggtcaagcaggcccctggcaagagcttcaagtggatgggctggatcaacacctacaccggcgagagcacatacagcgccgacttcaagggcagattcgccttcagcctggaaaccagcgccagcacagcctacctgcacatcaacgacctgaagaacgaggacaccgccacctacttttgcgccagaagcggcggctacgaccctatggattattggggccagggcaccagcgtgaccgtttcttct

SEQ ID NO: 370 - DNA, 357 bp, Artificial Sequence
  Synthetic Polynucleotide
caggtgcaactggtggaatctggcgggggagtggtgcagcctggcagaagcctgagactgtcttgtgccgccagcggcttcaccttcagcagctacgacatgcactgggtgcgccaggcccctggcaaaggactggaatgggtggccgtgatctcctacgacggcaccaacgagtattacgccgacagcgtgaagggccggttcaccatctccagagacaccagcaagaacaccctgtacctccagatgaacagcctgcgggccgaggacacagccgtgtattattgcgccagagagcggtacttcgactggtccttcgactactggggccagggaaccctggtgtccgtgtctagt

SEQ ID NO: 371 - DNA, 354 bp, Artificial Sequence
  Synthetic Polynucleotide
gaagttcagctggtgcagagcggagccgaagtgaagaaacctggggcctctgtgaaggtgtcctgcaaggcttccggctacacctttaccagctacgccatgcactgggtccgacaggcacctggacaacggcttgaatggatgggctggatcaacgccggcaacggcaacaccaagtacagccagaaattccagggccgcgtgaccatcaccagagatacaagcgccagcaccgcctacatggaactgtctagcctgagatccgaggacaccgccgtgtactactgtgccagagacatcagctacggcagcttcgactattggggccagggcacactggtcaccgttagctct

SEQ ID NO: 372 - DNA, 348 bp, Artificial Sequence
  Synthetic Polynucleotide
gaagtgcaactggttcagagcggagccgaagtgaagaaacctggggcctctgtgaaggtgtcctgcaaggcttccggctacacctttaccaatttctggattcactgggtccgacaggctccaggccaaggactggaatggatcggagagatcgaccccagcgacagctacaccaactacaaccagaaattcaaaggccgggtcaccatcaccagagacaccagcacaagcaccgcctacctggaactgagcagcctgagaagcgaggacaccgccgtgtactactgcgccagggaaatcaccaccgtggattattggggccagggaaccctggtcaccgtgtcatct

SEQ ID NO: 373 - DNA, 363 bp, Artificial Sequence
  Synthetic Polynucleotide
gaagttcagcttgtgcagagcggagccgaagtgaagaaacctggggcctctgtgaaggtgtcctgcaaagccagcggctacacctttaccagctactggatcggctgggtccgacaggctcctggacaaggactggaatggatcggcgacatctatcccggcggaggctacaccaactacaacgagaagttcaagggccgcgtgacaatcaccagagacacctctacaagcaccgcctacctggaactgagcagcctgagaagcgaggacaccgccgtgtactactgcgccagactggatggcagcagctacagaggcgctatggattcttggggccagggcacactggtcaccgtttcttct

SEQ ID NO: 374 - DNA, 354 bp, Artificial Sequence
  Synthetic Polynucleotide
gaagtgcagcttgttgaatctggcggcggactggctaagcctggcggatctctgagactgtcttgtgccgccagcggcttccggttcaccttcaacaactactacatggactgggtccgacaggcccctggacaaggacttgaatgggtgtccagaatcagcagcagcggcgaccctacttggtacgccgattctgtgaagggcagattcaccatcagcagagagaacgccaagaacaccctgttcctccagatgaactccctgagagccgaggacaccgccgtgtactattgtgcctctctgaccaccggcagcgattcttggggacagggcgtgctggttaccgtgtcatct

SEQ ID NO: 375 - DNA, 360 bp, Artificial Sequence
  Synthetic Polynucleotide
gaagttcagctccttgagtcaggtggcggcctggttcaacctggcggatctctgagactgagctgtgccgccagcggcttcacctttagcagatacgccatgaactgggtccgacaggcccctggcaaaggactggaatgggtgtccggcatctctggaagcggcggcagaacctactacgccgattctgtgaagggcagattcaccatcagccgggacaacagcaagaacaccctgtacctccagatgaacagcctgagagccgaggacacagccgtgtattattgcgccaaggaccgggacttttggagcggcccttttgactattggggccagggaaccctggtcaccgttagctct

SEQ ID NO: 376 - DNA, 372 bp, Artificial Sequence
  Synthetic Polynucleotide
caggtgcaactccaggaatctggccccggactcgtgaagcccagcgagacactgagcctgacctgtaccgtgtccggctacaccatcaccagcggctacgactggtcctggatcagacagcctcctggcaagggcctggaatggatcggctacatcaactacggcggctccaccaactacaagcccagcctgggaagccgcgtgacaatcagcgtggacacctccaagaaccagttcagcctgaagctgagcagcgtgacagccgccgataccgccgtgtactactgcgcccggtacaacgagtacaagagctacatctacgattggtacttcgacttctggggccagggaaccctcgtgaccgtgtctagt

SEQ ID NO: 377 - DNA, 372 bp, Artificial Sequence
  Synthetic Polynucleotide
gaagtgcaactggtggaatctggcggcggactggttaagcctggcggatctctgagactgtcttgtgccgccagcggcttcaccttcagcaatgcctggatgagctgggttcgacaggcccctggaaaaggactggaatgggtcggattcatccggtccaaagcctacggcggcaccacagaatatgccgcctctgtgaagggcagattcaccatcagccgggacgacagcaagtctatcgcctacctccagatgaacaacctgaaaaccgaggacaccgccgtgtactactgcgccagagatggcctgtacagcagctcttggtacgacagcgattactggggccagggcacactggtcacagtgtcatct

SEQ ID NO: 378 - DNA, 378 bp, Artificial Sequence
  Synthetic Polynucleotide
caaatgcaactggttcaaagcggcggtggcctggtgcaacctggaagaagtctgagactgagctgtgccgccagcggcttcaccttcgatgattacgccatgcactgggtccgacaggcccctggaaaaggactggaatgggtgtccggcatctcctggaatagcggctctatcggctacgccgacagcgtgaagggcagattcaccatcagccgggacaacgccaagaacagcctgtacctccagatgaactccctgagagccgaggatacagccctgtactactgcgccaaggacatccacagcggcagctactacggcctgctgtactacgctatggacgtgtggggccagggcacaaccgtgacagtttcttct

SEQ ID NO: 379 - DNA, 375 bp, Artificial Sequence
  Synthetic Polynucleotide
cttgaaatggctcaggtgcagctggtgcagagcggagccgaagtgaagaaacctggcagcagcgtgaaggtgtcctgcaaagcttctggcggcaccttcagcagctacgccatctcttgggttcgacaggcccctggacaaggactggaatggatgggcagaatcatccccatcctgggaatcgccaactacgcccagaaattccagggcagagtgacaatcaccgccgacaagagcaccagcaccgcctacatggaactgagcagcctgagaagcgaggacaccgccgtgtactattgtgcaagaggcggctactacagccacgacatgtggagcgaagattggggccagggcacactggtcacagtgtcatct

SEQ ID NO: 380 - DNA, 351 bp, Artificial Sequence
  Synthetic Polynucleotide
caagttcagctggtgcagtctggctccgagctgaagaaacctggcgagtccgtgaagatcagctgcaaggccagcggctacaccttcaccgactacagcatcaactgggtcaagcaggcccctggacagggactgaaatggatgggctggatcaacaccgagacaagagagcccgcctacgcctacgacttcagaggcagattcgtgttctccctggacaccagcgccagcacagcctatctccagatcagctctctgaaggccgaggataccgccgtgtacttctgcgccctggactacagctacgctatggactattggggccagggcaccctggtcacagtctcttct

SEQ ID NO: 381 - DNA, 351 bp, Artificial Sequence
  Synthetic Polynucleotide
caagttcaactggtgcagagcggctccgagctgaagaaacctggcgagtccgtgaagattagctgcaaggccagcggctacaccttcacacactacagcatgaactgggtccgacaggctccaggccaaggactggaatggatgggcagaatcaacaccgagacaggcgagcccctgtacgccgacgatttcaagggcagattcgtgttcagcctggacaccagcgccagcacagcctatctccagatcagctctctgaaggccgaggacaccgccgtgtattattgcagcaacgactacctgtactccctggactattggggccagggcacactggtcacagtgtctagt

SEQ ID NO: 382 - DNA, 360 bp, Artificial Sequence
  Synthetic Polynucleotide
gaagtgcaactggttcagagcggagccgagctgaagaaacctggggccagcgtgaaggtgtcctgtaaagccagcggctacacctttaccgactactacatgaaatgggtccgacaggccccaggccagggactcgaatggatcggcgatattatccccagcaacggggccaccttctacaaccagaaattcaagggccgcgtgaccatcaccgtggacaagagcacaagcaccgcctacatggaactgagcagcctgagaagcgaggacaccgccgtgtattattgcgccagaagccatctgctgcgggccagttggttcgcctattggggacagggaaccctggtcaccgttagctct

SEQ ID NO: 383 - DNA, 360 bp, Artificial Sequence
  Synthetic Polynucleotide
caagtgcaactggttcagagcggagccgagctgaagaaacctggggccagcgtgaaggtgtcctgtaaagccagcggctacacctttaccgactactacatgaaatgggtccgacaggccccaggccagggactcgaatggatcggcgatattatccccagcaacggggccaccttctacaaccagaaattcaagggccgcgtgaccatcaccgtggacaagagcacaagcaccgcctacatggaactgagcagcctgagaagcgaggacaccgccgtgtattattgcgccagaagccatctgctgcgggccagttggttcgcctattggggacagggaaccctggtcaccgttagctct

SEQ ID NO: 384 - DNA, 345 bp, Artificial Sequence
  Synthetic Polynucleotide
caagttcaactgcaacagcctggggccgagcttgttagacctggcgcttctgtgaagctgagctgcaaggccagcggctacaccttcaccagctactggatgaactgggtcaagcagcggcctgaccagggcctcgaatggatcggcagaatcgacccctacgacagcgagacacactacaaccagaagttcaaggacaaggccatcctgaccgtggacaagagcagctccaccgcctacatgcaactgagcagcctgacctctgaggatagcgccgtgtactattgcgccagaggcaactgggacgactattggggccagggcacaaccctgacagtgtctagt

SEQ ID NO: 385 - DNA, 357 bp, Artificial Sequence
  Synthetic Polynucleotide
gaagtgcagctcgttgagtctggtggcggactggttcagcctggaagaagcctgaagctgagctgtgccgccagcggcttcaccttcagcgactacaatatggcctgggtccgacaggcccctaagaaaggactggaatgggtcgccaccatcctgtacgatggcggcagaacctactaccggggcagcgtgaagggcagattcaccatcagcagagacaacgccaagagcaccctgtacctgcggatggactctctgagaagcgaggataccgccacatattactgtgccacacacagccggggcaccgactactttgattattggggccagggcgtgatggttaccgtgtctagt

SEQ ID NO: 386 - DNA, 363 bp, Artificial Sequence
  Synthetic Polynucleotide
gaagtgaagctgcaagagtctggccccagcctggtgcagagtagccaaacactgagcctgacctgtaccgtgtccggctttagcctgaccagctaccacatccactgggtccgacagacccctggcaaaggactggaatggatgggcgtgatgtggagcgacggcgacaccagctataacagcgccctgaagtcccggctgagcatcagcagagatacaagccagagccaggtgttcctgaagatgaacagcctccagaccgaggacaccgccacctactattgtgccagaggctactacagcagctacctgtacctttggttcgcctattggggccagggcaccctggttacagtcagctct

SEQ ID NO: 387 - DNA, 375 bp, Artificial Sequence
  Synthetic Polynucleotide
caggttcagctccagcagtctggacccgagcttagaaggccaggatctagcgtcagactgagctgcaaggccagcggctaccggatcaaggacttcctgatccactggattaagaacagacccgagcacggcctggaatggatcggatggattgaccctgaggacggcgagactaagtacgcccagaagttccagaccaaggccacactgaccgccgacacctctagcaacaccgcctacatgcaactgagcagcctgaccagcgaggacaccgccacctacttttgtgctagatggggcgacgtgtactacggcctgatgagaggccatgtgatggatgcctggggccagggaacaagcgtgacagtctcttct

SEQ ID NO: 388 - DNA, 363 bp, Artificial Sequence
  Synthetic Polynucleotide
gaagtgcagctcgttgagtctggtggcggactggttcaacctggcggaagcctgagactgtcttgtgccgccagcggcttcaccttcagcagctcttggatgaactgggtccgacaggcccctggcaaaggactggaatgggtcggaagaatctaccccggcgacggcgacaccaactacaacggcaagttcaagggcagattcaccatcagccgggacgacagcaagaacagcctgtacctgcagatgaactccctgaaaaccgaggacaccgccgtgtactactgtgccagatccggcttcatcaccaccgtgctggacttcgattattggggccagggcaccctggtcaccgtttcttct

SEQ ID NO: 389 - DNA, 363 bp, Artificial Sequence
  Synthetic Polynucleotide
gaagtgcaactggttcagagcggagccgaagtgaagaagcctggcgagagcctgaagattagctgcaaaggctccggctacagcttcagcagctcttggatcggctgggtccgacagatgcctggcaaaggactggaatggatgggcatcatctaccccgacgacagcgacaccagatacagccctagcttccagggccaagtgacaatcagcgccgacaagagcatcagaaccgcctacctccagtggtcctctctgaaggccagcgataccgccatgtactactgcgccagacacgtgaccatgatctggggagtgattatcgacttctggggccagggaaccctggtcacagtctcttct

SEQ ID NO: 390 - DNA, 363 bp, Artificial Sequence
  Synthetic Polynucleotide
gaagtgcaactggttgaatctggcggcggactggttaagcctggcggatctctgaagctgagctgtgccgccagcggctacacctttaccagctacgtgatgcactgggtccgacaggcccctggcaaaggacttgagtggatcggctacatcaacccctacaacgatggcaccaagtacaacgagaagttccagggcagagtgaccatcagctccgacaagagcatcagcaccgcctacatggaactgagcagcctgagaagcgaggataccgccatgtactattgcgccagaggcacctactactacggcaccagagtgttcgactactggggccagggaaccctggtcacagtctcttct

SEQ ID NO: 391 - DNA, 363 bp, Artificial Sequence
  Synthetic Polynucleotide
caagttcagcttcaacagcctggcgctgagctggtcaaacctggcgcttctgtgaagatgagctgcaaagccagcggctacgccttcagcagctactggatcaactggatgaagcagaaacccggccagggactcgaatggatcggccaaatctatcccggcgacggcgacaccaactacaacggcaagttcaagggcagagccacactgaccgccgatacctctagcagcacagcctacatgcagctgagcagcctgaccagcgaagatagcgccgtgtacttctgtgcccggtccatcacaacagtcgtgggctgcgctatggactattggggccagggaacaagcgtgaccgtgtctagt

SEQ ID NO: 392 - DNA, 360 bp, Artificial Sequence
  Synthetic Polynucleotide
caagttcagctggttcagtctggggccgaagtgaagaaacctggggcctctgtgaaggtgtcctgcaaggcttccggctacacctttaccagctacaatatgcactgggtccgacaggctcccggccagagacttgaatggatgggcggcatctaccccggcaatggcgacacctcctacaaccagaaattcaagggccgcgtgacaatcaccagagacacctctgccagcaccgcctacatggaactgagcagcctgagaagcgaggacaccgccgtgtactactgcgccagatacgactacaactacgctatggactactggggccagggaaccctggtcacagtgtctagtgcttcc

SEQ ID NO: 393 - DNA, 366 bp, Artificial Sequence
  Synthetic Polynucleotide
gaggtgcagcttgttgagtctggcggaggactggtgcagcccgatagaagcctgagactgtcttgtgccgccagcggcttcaccttccacgattatgccatgcactgggtccgacaggcccctggcaaaggacttgaatgggtgtccaccatctcttggaacagcggcacaatcggctacgccgactctgtgaagggcagattcaccatcagccgggacaacgccaagaacagcctgtacctccagatgaactccctgagagccgaggacacagccctgtactactgcgccaaggacatccagtacggcaactactactacggcatggacgtgtggggccagggcacaacagtgacagtctcttct

SEQ ID NO: 394 - DNA, 351 bp, Artificial Sequence
  Synthetic Polynucleotide
caggtgcaactggtgcagtctggggccgaagtgaagaaacctggggcctctgtgaaggtgtcctgcaaagccagcggctacacctttaccaactacgacatcaactgggtccgacaggctccaggccaaggactggaatggatcggctggatctatcctggcgacggcagcaccaagtacaacgagaagttcaaggccaaggccacactgaccgccgataccagcacaagcaccgcctacatggaactgcggagcctgagaagcgacgacaccgccgtgtactattgtgcctccggctacgaggacgctatggactattggggccagggcaccaccgtgacagtgtctagt

SEQ ID NO: 395 - DNA, 342 bp, Artificial Sequence
  Synthetic Polynucleotide
caagtgcaactggttcagagcggagccgaagtgaagaaacctggggcctctgtgaaggtgtcctgcaaggccagcggctacaccttcaaggacacctacatccactgggtccgacaggcccctggacaaggacttgagtggatgggcagaatcgaccccgccaacggcaacaccaaatacgaccccaagttccagggcagagtgaccatgaccagagacaccagcatcagcaccgcctacatggaactgagccggctgagatccgatgacaccgccgtgtactattgcgctagaagaggcggagtggattggggccagggaacactggttaccgtgtctagt

SEQ ID NO: 396 - DNA, 363 bp, Artificial Sequence
  Synthetic Polynucleotide
gaagtgcaactggttcagagcggagccgaagtgaagaaacctggggcctctgtgaaggtgtcctgcaaagccagcggctacacctttaccgactactacctggacgtggtcgtgcggcaagctcctggacaaggactggaatggatcggcagagtgaacccctacaacggcggcaccatctacaaccagaaattcaagggaagagtgaccctgaccagagacaccagcacctccacagcctacctggaactgagcagcctgagaagcgaagataccgccgtgtactactgcgccagggaccactacagatatgaccctctgctggactactggggccagggaaccctggttacagtgtctagt

SEQ ID NO: 397 - DNA, 366 bp, Artificial Sequence
  Synthetic Polynucleotide
gaagtgcaactggttcagagcggagccgaagtgaagaaacctggggcctctgtgaaggtgtcctgcaaggccagcggctacagcttcaccgactattatatgcactgggtccgacaggctccaggccagggacttgagtggatcggcagaatcaacccctacaacggcgctgccttctacagccagaacttcaaggatagagtgaccctgaccgtggacaccagcaccagcacagcctacctggaactgagcagcctgagaagcgaggacaccgccgtgtactactgcgccattgagagaggcgctgacctggaaggctacgctatggattattggggccagggaaccctggtcaccgtgtcatct

SEQ ID NO: 398 - DNA, 369 bp, Artificial Sequence
  Synthetic Polynucleotide
caagttcagctgcaagagtctggccctggcctggtcaagcctagcgaaacactgagcctgacctgcgccgtgtctggctactctatcaccagcgcctactattggaactggatcagacagcctcctggcaaaggactggaatggatcggctacatcagctacgacggcagaaacaactacaaccccagcctgaagaaccggatcaccatcaatcccgacaccagcaagaaccagttcagcctccagctgaacagcgtgacccctgaggataccgccgtgtactactgtgccagagaaggcgactacgacgtgggcaactactacgctatggactactggggccagggaaccctggtcacagtctcttct

SEQ ID NO: 399 - DNA, 369 bp, Artificial Sequence
  Synthetic Polynucleotide
gaagtgcaactggtggaaagtggcggcggactggtgcaacctggaagaagcctgagactgtcctgtgccgccagcggctactctatcacaagcgcctactactggaactgggtccgacaggctcctggcaaaggactggaatgggtgtcctacatcagctacgacggcagaaacaactacaaccccagcctgaagaaccgcttcaccatcagccgggacaacgccaagaagtccctgtacctccagatgaacagcctgagagccgaggacacagccctgtactattgcgccaaagagggcgactacgacgtcggcaactactacgctatggactactggggccagggaaccaccgtgactgtctcttct

SEQ ID NO: 400 - DNA, 354 bp, Artificial Sequence
  Synthetic Polynucleotide
ggcgtgaagctggacgagacaggcggaggacttgttcaacctggcggagccatgaagctgagctgtgtgaccagcggctttaccttcggccactactggatgaactgggtccgacagtcccctgagaaaggactggaatgggtcgcccagttcagaaacaagccctacaactacgaaacctactacagcgacagcgtgaagggcagattcaccatcagccgggacgacagcaagtccagcgtgtacctccagatgaacaacctgcgcgtggaagataccggcatctactactgtaccggggccagctacggcatggaatatctcggccagggcaccagcgtgaccgtgtctaca

SEQ ID NO: 401 - DNA, 378 bp, Artificial Sequence
  Synthetic Polynucleotide
caggtgcaactggtggaatctggcggcaatctggttcagcctggcggctctctgagactgtcttgtgccgccagcggcttcaccttcggcagcttttctatgagctgggtccgacaagctcctggcggaggacttgaatgggtggcaggactgtctgccagaagcagcctgacacactacgccgactctgtgaagggcagattcaccatcagccgggacaacgccaagaacagcgtgtacctccagatgaacagcctgagagtggaagataccgccgtgtactactgcgccagaagaagctacgacagcagcggctactggggccacttctacagctacatggatgtgtggggccagggcaccctggttacagtttct

SEQ ID NO: 402 - DNA, 342 bp, Artificial Sequence
  Synthetic Polynucleotide
gaagttcaactggtggaaaccggcggcaacctggttcaacctggcgcttctctgagactgagctgtgccgccagcggctttagctttagcggaacagccatgcactgggtccgacaggcacctggcaaaggactggaatgggtgtccaccatcagcagcacaggcagaagcacctactaccgggacagcgtgaagggcagattcaccatctccagagacaacagcaagaacaccctgtacctccagatgaacagcctgagaggcgaggacaccgccgtgtactattgtgccagagtgtccttcgactactggggccagggaaccctggtcacagtctcttct

SEQ ID NO: 403 - DNA, 354 bp, Artificial Sequence
  Synthetic Polynucleotide
gaagttcagctggttgaaagcggcggagcctttgttcagcctggcggatctctgagactgagctgtgccgccagcggcttcacattttccagctacgccatgacctgggtccgacaggctcctggcaaaggactggaatgggtgtccaccatctccggcagaggcagaagcaccttctacgccgatagcgtgaagggcagattcacaatcagccgggacaacagcaagaacaccctgtacctccagatgaacagcctgagagccgaggataccgccgtgtactactgtgcccggtactatcacgctggcgcctttgatctttggggccagggaacactggtcaccgtgtcatct

SEQ ID NO: 404 - DNA, 369 bp, Artificial Sequence
  Synthetic Polynucleotide
caagttcaactggttcaatcaggcggaggcgtggtgcaacctggtggctctctgagagtgtcttgtgctgcctctggcgtgaccctgagcgactatggaatgcactgggtccgacaggcccctggcaaaggacttgagtgggtcgccttcatcagaaacgacggcagcgacaagtattacgccgacagcgtgaagggcagattcaccatcagccgggacaacagcgagaaaaccgtgtctctccagatgtctagcctgagagccgaggacaccgccgtgtactactgtgccaagaatggcgagagcggccctctggactactggtatctggatctgtggggcagaggcaccctggtcacagtctcttct

SEQ ID NO: 405 - DNA, 342 bp, Artificial Sequence
  Synthetic Polynucleotide
caagtgaagctccagcagagcggccctagccttgtgaaacctggcgcttccgtgaagatgagctgcaaggccagcggctacaccttcaccgatttctacatgaaatgggtcaagcagagccacggcaagtctctggaatggatcggcgacatcaaccccaacatcggagacaccttctacaaccagaagttcaagggcaaagccacactgaccgtggacaagagcagcagcaccgcctacatgcagctcaacagcctgaccagcgaggacagcgccgtgtacttttgttccgtgggctacttcgacgtgtggggagccggaacaaccgtgacagtctcttct

SEQ ID NO: 406 - DNA, 390 bp, Artificial Sequence
  Synthetic Polynucleotide
gaagttcaactggtgcagagcggagccgaagtgaagaagccaggcgagagcctgaagattagctgcaaaggcagcggctacagcttcaccagctactggatcggctgggtccgacagatgcctggcaaaggactggaatggatgggcatcatctaccccggcgacagcgacaccagatacagccctagctttcagggccaagtgaccatctccgccgacaagagcatcagcacagcctacctccagtggtcctctctgaaggccagcgataccgccatgtactactgcgccagacaagtctggggatggcaaggcggcatgtaccccaggtctaactggtggtacaacctggactcttggggccagggcacactggtcacagtctcttct

SEQ ID NO: 407 - DNA, 360 bp, Artificial Sequence
  Synthetic Polynucleotide
gaagtgcagctcgaacagtctggccccgagcttgtgaaacctggcgcttccgtgaagatgagctgcaaggccagcggctacaccttcaccaactactacatgaaatgggtcaagcagagccacggcaagtccctggaatggatcggcgatctgaaccccaacaacggcgacaccttctacaaccagaagttcaagggcaaagccacactgaccgtggacaagagcagcaacaccgcctacatgcagctcaactccctgaccagcgaggacagcgccgtgtactactgtgccagaaccggcagatacgaagagaacgctatggactactggggccagggcacaagcgtgacagtctcttct

SEQ ID NO: 408 - DNA, 351 bp, Artificial Sequence
  Synthetic Polynucleotide
caggttcagctggtgcagtctggcagcgagctgaagaaacctggcgagagcgtgaagatcagctgcaaggccagcggctacaccttcacacactacagcatgaactgggtccgacaggcccctggacaaggactggaatggatgggcagaatcaacaccgagacaggcgagcccctgtacgccgacgatttcaagggcagattcgtgttcagcctggacaccagcgccagcacagcctatctccagatcagctctctgaaggccgaggacaccgccgtgtactactgctccaacgactacctgtactccctggactattggggccagggcacactggtcacagtgtctagt

SEQ ID NO: 409 - DNA, 351 bp, Artificial Sequence
  Synthetic Polynucleotide
caggtgcagctcgttcagagtggccccgaagtgaaaaagccaggcgagtccgtgaagatttcctgcaaagcctccggctacacattccggcactactctatgaattgggtcaagcaggccccaggccagggccttaagtggatgggacgcatcaataccgagtccggcgtgccaatctacgccgatgacttcaaaggccggttcagcttcaccgtggatacctctgcctccaccgcctacctggaaatcagcagcctgaccagcgaggatacagctgtgtacttctgtagcaacgattacctctacagcctggatttctggggacagggaaccacactgaccgtgtctagc

SEQ ID NO: 410 - DNA, 354 bp, Artificial Sequence
  Synthetic Polynucleotide
caggttcagctgcaagagtctggccccggactggtcaagcctagccaaacactgagcctgacctgtaccgtgtccggctacagcatcaccagcgactacacctggaactggatcagacagcctcctggcaacggactggaatggatcggctacatcacctacagcggcagcaccagctacaaccccagcctgaaaagccgggtgctgatctccgtggacaccagcaagaatcaggtgtccctgaagctgagcagcgtgacagccgctgataccgccgtgtactactgtgccagactggggagaagatacacaatggactactggggccagggcaccaccgtgacagtttcttct

SEQ ID NO: 411 - DNA, 372 bp, Artificial Sequence
  Synthetic Polynucleotide
gaggtgcaactggttgagtctggcggaggactggtgcagcctggaagaagcctgagactgtcttgtgccgccagcggcttcaccttcgacgattatgccatgcactgggtccgacaggcccctggcaaaggacttgaatgggtgtccggcatctcctggaacagcggctctatcggctacgccgattccgtgaagggcagattcaccatcagccgggacaacgccaagaacagcctgtacctccagatgaactccctgagagccgaggacacagccctgtactactgcgccaaagacaaaggcggaggctactacgacttttggagcggcagcgattattggggccagggcacactggtcacagtgtctagc

SEQ ID NO: 412 - DNA, 381 bp, Artificial Sequence
  Synthetic Polynucleotide
gaagtgcagctccagcagtctggacctggcctggttaagcctagccagacactgagcctgacctgtgccatcagcggcgatagcgtgctgagcaacagcgacacctggaactggatcagacagagccctagcagaggactggaatggctgggcagaacctaccacagaagcacttggtacgacgactacgccagctctgtgcggggcagagtgtccatcaatgtggacaccagcaagaaccagtacagcctgcaactgaacgccgtgacacctgaggataccggcgtgtactactgcgccagagacagactccaggacggcaactcttggagcgacgcctttgatgtgtggggccagggcacaatggtcaccgtttctagc

SEQ ID NO: 413 - DNA, 366 bp, Artificial Sequence
  Synthetic Polynucleotide
caggtgcaactggttcagtctggggccgaagtgaagaaacctggggcctctgtgaaggtgtcctgcaaggcttccggctacacctttaccagctacgacatcaactgggtccgacaggccacaggccaaggactggaatggatgggctggatgaaccccaacagcggcaataccggctacgcccagaaattccagggcagagtgaccatgaccagaaacaccagcatcagcaccgcctacatggaactgagcagcctgagaagcgaggacaccgccgtgtactattgcgccagaggcgacagcaactactggtcctactacggcatggacgtgtggggccagggaacactggttacagtttctagc

SEQ ID NO: 414 - DNA, 381 bp, Artificial Sequence
  Synthetic Polynucleotide
gaagtgcagctccagcagtctggacctggcctggttaagcctagccagacactgagcctgacctgtgccatcagcggcgatagcgtgtcctctaatagcgccgcctggaactggatcagacagagccctagcagaggactggaatggctgggcagaacctactaccgcagcaagtggtacagcgactacgccgtgtccgtgaagtcccggatcaccatcaatcccgacaccagcaagaaccagttcagcctgcaactgaacagcgtgacccctgaggataccgccgtgtactactgcgccagagatccctacgacttttggagcggctaccccgacgcctttgacatctggggacagggcacaatggtcaccgtttctagc

SEQ ID NO: 415 - DNA, 381 bp, Artificial Sequence
  Synthetic Polynucleotide
gaagtgcagctccagcagtctggacctggcctggttaagcctagccagacactgagcctgacctgtgccatcagcggcgattccatgctgagcaacagcgacacctggaactggatcagacagagccccagcagaggcctggaatggctgggcagaacataccacagaagcacttggtacgacgactacgccagctctgtgcggggcagagtgtccatcaatgtggacaccagcaagaaccagtacagcctgcaactgaacgccgtgacacctgaggataccggcgtgtactactgtgccagagtgcggctccaggacggcaattcttggagcgacgcctttgatgtgtggggccagggcacaatggtcaccgtttctagc

SEQ ID NO: 416 - DNA, 360 bp, Artificial Sequence
  Synthetic Polynucleotide
gaagtgcagctggttgaatcaggtggcggcctggttcaacctggcggatctctgagactgtcttgtgccgccagcggcttcagcttcaacacctacgccatgaactgggtccgacaggctcctggcaaaggactggaatgggtgtcccacatcagaagcaagagcaacaacttcgccacctactacgccgacagcgtgaaggacagattcaccatcagccgggacaacgccaagaacagcctgtacctccagatgaactccctgagagccgaggacaccgccgtgtattattgcgccagacaaggcggcgacttccctatggattattggggccagggcaccctggtcaccgtttcttct

SEQ ID NO: 417 - DNA, 354 bp, Artificial Sequence
  Synthetic Polynucleotide
caggtgcagctccaagagtctggccctggactggtcaagcctagccagacactgagcctgacctgtaccgtgtccggctacagcatcaccatcgactacacctggaactggatcagacagcctcctggcaaaggactggaatggatcggctacatcacctacagcggcagcaccgactacaaccccagcctgaaaagccgggtgctgatctccgtggacaccagcaagaatcaggtgtccctgaagctgagcagcgtgacagccgctgataccgccgtgtactactgtgccagactgggcagaagatacgccctggattattggggccagggcaccaccgtgacagtgtcatct

SEQ ID NO: 418 - DNA, 366 bp, Artificial Sequence
  Synthetic Polynucleotide
gaagttcagctggttgaatcaggcggaggactcgtgaaacctggcggctctctgagactgtcttgtgccgccagcggcttcaccttcagcaacttcgagatgaactgggtccgacaggccccaggcaaaggactggaatgggtgtccggcatcagctccaatggccggtacatcaactacgccgacagcgtgaagggcagattcaccatcagccgggacaacgccaagaacagcctgtacctccagatgaactccctgagagccgaggacaccgccgtgtactattgtgccagagtggtggacttcgaccaggactacaacggcttcgactattggggccagggcaccctggttaccgttagctct

SEQ ID NO: 419 - DNA, 360 bp, Artificial Sequence
  Synthetic Polynucleotide
gaagttcaactggttgagtctggtggcggcctggttaagcctggcggatctctgagactgagctgtgccgccagcggcttcacctttagcacatacggcatgagctgggtccgacaggcccctggaaaaggacttgagtgggtcgcctacatcaacaacggctccggctacatctactacgccgacagcgtgaagggcagattcaccatcagccgggacaacgccaagaacagcctgtacctccagatgaactccctgagagccgaggacaccgccgtgtactattgtgccagaggacagtggtggagcggcggagactttgattattggggccagggcaccctggtcaccgtttcttct

SEQ ID NO: 420 - DNA, 366 bp, Artificial Sequence
  Synthetic Polynucleotide
gaagtgcaactggttgaatctggcggcggactggttaagcctggcggatctctgaagctgagctgtgccgcctctggcttcgccttcagcatctacgatatgagctgggtccgacagacccctgagaagagactggaatgggtcgcctacatctctagcggcggagggacctactatcccgacacagtgaagggcagattcaccatctccagagacaacgccaagaacaccctgtacctccagatgagcagcctgaagtccgaggacaccgccatgtactactgcgccagacacagcggctatggcacacattggggagtgctgtttgcctactggggccagggaacactggtcacagtttctgct

SEQ ID NO: 421 - DNA, 372 bp, Artificial Sequence
  Synthetic Polynucleotide
gaagttcagctgcttgaatcaggcggcggactggttcaacctggcggatctctgagactgagctgtgccgccagcggctacagcatcacaagcgactatgcctggaactgggtccgacaggcccctggcaaaggactggaatgggtgtcctacatcagcaacagcggcagcaccagctacaaccccagcctgaagtcccggttcaccatcagcagagacaacagcaagaacaccctgtacctccagatgaacagcctgagagctgaggacaccgccgtgtattattgcgccaaagagcggaactacgactacgacgattactactacgctatggactactggggccagggaaccctggtcacagtctcttct

SEQ ID NO: 422 - DNA, 360 bp, Artificial Sequence
  Synthetic Polynucleotide
caagttcagctggttcagagcggagccgaagtgaagaaacctggggcctctgtgaaggtgtcctgcaaagcctctggcctgaccatcgaggactactacatgcactgggtccgacaggcccctggacaaggacttgaatggatgggctggatcgaccccgagaacggcgatacagagtacggccctaagttccagggcagagtgaccatgaccagagacaccagcatcaacaccgcctacatggaactgagccggctgagatccgatgacaccgccgtgtactattgcgccgtgcacaatgcccactacggcacttggtttgcctattggggccagggcacactggtcaccgttagctct

SEQ ID NO: 423 - DNA, 348 bp, Artificial Sequence
  Synthetic Polynucleotide
gaagtgcagctggttgaatcaggtggcggcctggttcaacctggcggatctctgagactgagctgtgccgcctctggcttcagcctgacaaattacggcgtgcactgggtccgacaggcccctggaaaaggactggaatgggtgtccgtgatttggagcggcggcagcaccgattacaacgccgccttcatcagccggttcaccatcagcgccgacaccagcaagaataccgcctacctccagatgaactccctgagagccgaggacaccgccgtgtactattgcgccagagaactgatccacgctatggacaactggggccagggaaccctggtcacagtctcttct

SEQ ID NO: 424 - DNA, 357 bp, Artificial Sequence
  Synthetic Polynucleotide
gaagtgcagctggttgaaagcggagccgaagtgaagaaacctggggcctctgtgaaggtgtcctgcaaggccagcggctacacctttaccagctactggattcactgggtccgacaggcccctggacaaggacttgagtggatgggcgagaacgacccctccaacggcaggaccaactacaacgagaagttcaagaaccgcgtgaccctgaccgtggacaccagcatctctaccgcctacatggaactgagccggctgagatccgatgacaccgccgtgtactattgcgccagaggacccaactacttttacagcatggactactggggccagggcacaatggtcaccgttagctct

SEQ ID NO: 425 - DNA, 357 bp, Artificial Sequence
  Synthetic Polynucleotide
caggttcagctggttcagtctggggccgaagtgaagaaacctggggcctctgtgaaggtgtcctgcaaggcttccggctacacctttaccggctcttggatgaactgggtccgacaggctcctggacagggactcgaatggatcggcagaatctatcctggcgacggcgagacaaactacaacggcaagttcaaggaccgcgtgacaatcaccgccgacaagagcacaagcaccgcctacatggaactgagcagcctgcggagcgaagataccgccgtgtactactgcgcccggatctacggcaacaacgtgtacttcgatgtgtggggccagggcacaaccgtgacagtctcttct

SEQ ID NO: 426 - DNA, 363 bp, Artificial Sequence
  Synthetic Polynucleotide
caagaacagctggttgaaagcggcggaggactggttcaacctggcggttctctgagactgagctgtgccgccagcggcttcaccttcagcgactactacatgagctggatcagacaggccccaggcaaaggactggaatgggtcgccacaatctaccccagcagcggcaagacctactacgccgattctgccaagggcagactgaccatctccagcgacaacgccaaggacagcctgtacctccagatgaacagcctgagagccgaggacaccgccgtgtactactgcaccagagatagctacgccgacgacgccgctctgtttgacatttggggccagggcaccaccgtgaccgtttcttct

SEQ ID NO: 427 - DNA, 351 bp, Artificial Sequence
  Synthetic Polynucleotide
caaatccagctggtgcagtctggccccgagctgaagaaacctggcgagacagtgaagatcagctgcaaggccagcggctacaccttcaccgactacagcatcaactgggtcaagagagcccctggcaagggcctgaaatggatgggctggatcaacaccgaaaccagagagcccgcctacgcctacgacttcagaggcagattcgccttcagcctggaaaccagcgccagcacagcctacctccagatcaacaacctgaagtacgaggacaccgccacctacttttgcgccctggactacagctacgctatggactattggggccagggcaccagcgtgacagtctcttct

SEQ ID NO: 428 - DNA, 372 bp, Artificial Sequence
  Synthetic Polynucleotide
caggtacagctgcaggaatctgggcccggacttgtcaagccaagtcagacactttctcttacatgtaccgtgagcggcggaagtataagcagtggaggcttttactggtcttggatacggcagcacccaggcaaaggcttggagtggattggatacattcatcattcaggatctacacactataatccatcccttaagtcccgggtcaccattagcattgatacgtctaagaatctgttcagtctcaggctgtcctccgtcactgctgccgacacagccgtgtactactgcgcctccttggtttactgcggaggcgactgttatagcggctttgattattgggggcaggggaccctcgtaaccgtgagctct

SEQ ID NO: 429 - DNA, 366 bp, Artificial Sequence
  Synthetic Polynucleotide
caggtccaactgcaagaaagcggacccggactggtgaagccttctgagacacttagtctgacgtgcacggtcagtggcggctccatctcctcctattattggtcatggatacgacaacccccaggtaagggcctggaatggattggctatatctactattcaggaagcacgaactacaatcccagcctgaagtcccgagtgacaatttcagtagataccagtaaaaaccagttcagtcttaaactgtcaagcgtgacagctgccgacaccgctgtgtattactgcgtctcactggtgtattgtggaggggattgttatagcgggttcgattattggggacagggaaccctggtgactgtatcttcc

SEQ ID NO: 430 - DNA, 381 bp, Artificial Sequence
  Synthetic Polynucleotide
caagttactttgaaggagtctggacctgtactggtgaagccaaccgagacactgacactcacgtgtacagtgagtggtttttccttgatcaacgcaaggatgggcgtcagctggatcaggcaaccccctggcaaggctctggaatggctcgctcacatattcagcaatgccgaaaaaagctaccggacaagcctgaaatcccgcctgactatttccaaggacacttctaagtctcaggtggtgctgaccatgaccaacatggacccggtggacaccgccacctattactgcgcaagaatccctgggtatggtgggaatggtgactaccattattatgggatggatgtgtgggggcaaggcacaaccgtaacggtctcaagc

SEQ ID NO: 431 - DNA, 360 bp, Artificial Sequence
  Synthetic Polynucleotide
cagatccagttggtggaatcagggggcggtgtggtgcagccgggtaggagcctgagactgtcatgcgtggcgtctggcttcacattcaagaactacggcatgcactgggtgcgacaggcccccggaaagggtttggagtgggtcgccgtgatctggtacgacggatctaatgagtattacggagatcctgtgaagggaaggttcaccatctcccgcgacaatagcaaaaatatgctctacctgcaaatgaactcactcagggcggatgatacggcggtctactattgcgctcgctcagggattgctgtggccggcgcattcgattactggggacagggtaccctggtgacagtatcaagc

SEQ ID NO: 432 - DNA, 366 bp, Artificial Sequence
  Synthetic Polynucleotide
caactgcaactgcaagagtctggccctggcctggtcaagcctagcgaaacactgagcctgacctgtaccgtgtctggcggcagcatcagctccagcacatattactggggctggatcagacagcctcctggcaaaggactggaatggatcggctccatctacttcaccggcagcaccgactacaaccccagcctgaagtccagggtgtccatctccgtggacaccagcaagaaccagttctccctgaagctgagcagcgtgacagccgctgataccgccgtgtactactgcgccaaagaggacgatagcagcggctactacagcttcgactattggggccagggcaacctggtcaccgttagctct

SEQ ID NO: 433 - DNA, 363 bp, Artificial Sequence
  Synthetic Polynucleotide
caagttcagctggtgcagtctggcagcgagctgaagaaacctggggcctctgtgaaggtgtcctgcaaggcttccggctacaccttcaacacctacgccatgaattgggtccgacaggctccaggccaaggactggaatggatgggctggatcaacaccaacaccggcaatcccacatacgcccagggcttcaccggcagattcgtgttctctctggacacctccgtgtccaccgcctacctccagatcagctctctgaaggccgaggataccgccgtgtactactgcgccagacggtacttcgattggctgctgggagccttcgacatctggggccagggaacaatggtcaccgtgtctagt

SEQ ID NO: 434 - DNA, 351 bp, Artificial Sequence
  Synthetic Polynucleotide
caagttcagcttgttcagagcggagccgaagtgaagaaacccggcagctctgtgaaggtgtcctgcaaggcttccggctacgcctttagcagcagctggatgaactgggtccgacaggctcctggacagggccttgaatggatgggcagaatctatcccggcgacggcaatacccactacgcccagaaattccagggccgcgtgacactgacagccgacaagtctacaagcaccgcctacatggaactgagcagcctgagaagcgaggacaccgccgtgtactattgcggcgaaggctatctggaccctatggactattggggccagggcacactggtcaccgttagctct

SEQ ID NO: 435 - DNA, 345 bp, Artificial Sequence; identical to SEQ ID NO: 279
  Synthetic Polynucleotide

SEQ ID NO: 436 - DNA, 351 bp, Artificial Sequence
  Synthetic Polynucleotide
gaagtgcagctggttgaatcaggtggcggcctggttcaacctggcggatctctgagactgagctgtgccgccagcggcttcaccttcagcgactactttatgagctgggtccgacaggcccctggcaaaggacttgaatgggtcgccaccatcagcaatggcggcacctacacttactaccccgacagcgtgaagggcagattcaccatctccagagacaacagcaagaacaccctgtacctccagatgaactccctgagagccgaggacaccgccgtgtactactgcgccagattcgacggctacatcttcgactattggggccagggcaccctggtcacagtctcttct

SEQ ID NO: 437 - DNA, 369 bp, Artificial Sequence
  Synthetic Polynucleotide
gaagttcagctggttgaatctggcggcggactggttcaacctggcggatctctgagactgagctgtgccgcctctggctacgccttcagcaacagctggatcaactgggtccgacaggcccctggcaaaggactggaatgggtcggacaaatctaccccggcgactacgacaccaactacaacggcaagttcaagggcagattcaccatcagccgggacaagagcaagaacaccgcctacctccagatgaactccctgagagccgaggacaccgccgtgtactattgtgctagaggcggctccatctactacggcaacctgggcttcttcgacgtgtggggacagggcacactggtcacagtctcttct

SEQ ID NO: 438 - DNA, 348 bp, Artificial Sequence
  Synthetic Polynucleotide
caagttcagctggttcagagcggagccgaagtgaagaaacctggggcctctgtgaaggtgtcctgcaaggccagcggctacagcttcatcgagtacaccatcaactgggtccgacaggcccctggacaaggcctggaatggatcggcaacatcgacccctactacggcacaacctactacaaccagatgttcaccggcagagccacactgaccgtggacacctctatcagcaccgcctacatggaactgagccggctgagatccgatgacaccgccgtgtactattgtgccagaggcagcgcctggtttccctattggggacagggaaccctggtcaccgttagctct

SEQ ID NO: 439 - DNA, 345 bp, Artificial Sequence
  Synthetic Polynucleotide
caagttcagctggttcagagcggagccgaagtgaagaaacctggggcctctgtgaaggtgtcctgcaaggccagcggctacaccttcagcgactattgggtgcactgggtccgacaggctccaggacaaggactggaatggatgggagccatcgacggcagcgataccttcaacgattacagccagaaattcaaaggccgcgtgaccatgaccagagacaccagcatcagcaccgcctacatggaactgagccggctgagatccgatgacaccgccgtgtactattgtgccagaggcggcctgctgcagtattggggacagggaacactggtcaccgtgtcctct

SEQ ID NO: 440 - DNA, 357 bp, Artificial Sequence
  Synthetic Polynucleotide
caggttcagctccagcagtctggacctgagctggttaagcctggcgcttccgtgaagatcagctgcaaggcttccggctacgccttcagcagcagctggatgaactgggtcaaacagaggcccggcaaaggactggaatggatcggcagaatctaccccggcgacgaggacaccaattacagcggcaagttcaaggacaaggccacactgaccgccgacaagagcagcaccacagcctacatgcagctgagcagcctgaccagcgaggatagcgccgtgtacttctgtgccagaagcctgctgtacggcgactacctggattattggggccagggcacaaccctgacagtgtctagc

SEQ ID NO: 441 - DNA, 363 bp, Artificial Sequence
  Synthetic Polynucleotide
caagttcagctgcaacagagcggagccgagcttgtcagacctggcagctctgtgaagattagctgcaaagccagcggctacgccttcagcagctactgggtcaactggatgaagcagcggcctggacagggcctcgaatggatcggccaaatctatcctggcgacggcgacaccaactacaacggcaagtttaagggcagagccaccgtgaccgccgacaagagcagcagcacatcctacatgcagttcagcagcctgaccagcgaggacagcgccgtgtatttctgtgccagatccatcaccaccgtcgtgggctgcgctatggattattggggccagggcacaagcgtgaccgtgtcatct

SEQ ID NO: 442 - DNA, 360 bp, Artificial Sequence
  Synthetic Polynucleotide
gaggttcagctgcttgagtctggcggaggactggttcaacctggcggaagcctgagactgtcttgtgccgccagcggcttcacctttagcagctacgccatgagctgggtccgacaggctcctggcaaaggactggaatgggtgtccgtgatctctggctctggcggcagacccaattacgccgattctgtgaagggcagattcaccatcagccgggacaacagcaagaacaccctgtacctccagatgaacagcctgcgcgacgaggataccgccgtgtactattgtgccaaggtggactacagcaactacctgttcttcgactactggggccagggcaccctggtcacagtttctagc

SEQ ID NO: 443 - DNA, 351 bp, Artificial Sequence
  Synthetic Polynucleotide
cagatccagctggtgcagtctggccccgagctgaagaaacctggcgagacagtgaagatcagctgcaaggccagcggctacaccttcaccgactacagcatcaactgggtcaagagagcccctggcaagggcctgaaatggatgggctggatcaacaccgaaaccagagagcccgcctacgcctacgacttcagaggcagattcgccttcagcctggaaaccagcgccagcacagcctacctccagatcaacaacctgaagtacgaggacaccgccacctacttttgcgccctggactacagctacgctatggactattggggccagggcaccagcgtgacagtctcttct

SEQ ID NO: 444 - DNA, 363 bp, Artificial Sequence
  Synthetic Polynucleotide
caagttcagctggttcagagcggagccgaagtgaagaaacctggggcctctgtgaaggtgtcctgcaaggcttccggctacacctttaccaactacggcatctcctgggtccgacaggcaccaggacaaggactggaatggatgggatggctgagcgcctacagcggcaataccatctacgcccagaaactccagggcagagtgaccatgaccaccgacaccagcaccaccaccgcctacatggaactgagaagcctgagatccgacgacaccgccgtgtattattgcgccagagacagaatcgtcgtgcggcccgactacttcgattattggggccagggaaccctggtcaccgtgtcatct

SEQ ID NO: 445 - DNA, 351 bp, Artificial Sequence
  Synthetic Polynucleotide
gaagttcagctggttgaatcaggtggcggcctggttcaacctggcggatctctgagactgtcttgtgccgccagcggcttcactttcagcggcagatccatgaactgggtccgacaggcccctggcaaaggactggaatgggtgtcctacatcagcagcgacagccggaccatctactacgccgatagcgtgaagggcagattcaccatctccagagacaacgccaagaacagcctgtacctccagatgaactccctgagagccgaggacacagccgtgtattattgtgccagaggcggccacggctacttcgatctttggggcagaggcaccctggtcaccgtttcttct

SEQ ID NO: 446 - DNA, 363 bp, Artificial Sequence
  Synthetic Polynucleotide
caagttcagctggttgaatcaggcggaggcgttgtgcagcctggcagaagtctgagactgtcttgtgccgccagcggcttcaccttcagcagctatggaatgcactgggtccgacaggcccctggcaaaggacttgaatgggtggccggcatttggtgggacggcagcaatgagaagtacgccgacagcgtgaagggcagattcaccatctccagagacaacagcaagaacaccctgtacctccagatgaacagcctgagagccgaggacacagccgtgtattattgcgccaaagaggccccttactacgccaaggactacatggacgtgtggggcaagggcaccacagtgactgtctcttct

SEQ ID NO: 447 - DNA, 360 bp, Artificial Sequence
  Synthetic Polynucleotide
gaagtgcagctggttgaatcaggtggcggcctggttcaacctggcggatctctgagactgagctgtgccgccagcggcttcaacatcaaggacacctacatccactgggtccgacaggcccctggcaaaggacttgaatgggtcgccagaatctaccccaccaacggctacaccagatacgccgactctgtgaagggcagattcaccatcagcgccgacaccagcaagaacaccgcctacctccagatgaactccctgagagccgaggacaccgccgtgtactactgtagcagatggggcggctggggcttctacgctatggattattggggccagggaaccctggtcaccgtgtcatct

SEQ ID NO: 448 - DNA, 351 bp, Artificial Sequence
  Synthetic Polynucleotide
caggtgcagctggttgaatctggcggcggacttgtgaagcctggcggatctctgagactgagctgtgccgccagcggcttcaccttcagcgactactacatgacctggatcagacaggcccctggcaaaggactggaatggatcagctacatcagcagcagcggcagcaccatctactacgccgatagcgtgaagggcagattcaccatcagccgggacaacgccaagaacagcctgtacctccagatgaactccctgagagccgaggacaccgccgtgtactactgcgccagagacagaaacagccacttcgactattggggccagggcaccctggtcacagtttctagc

SEQ ID NO: 449 - DNA, 351 bp, Artificial Sequence
  Synthetic Polynucleotide
caggtgcagctggttgaatctggcggcggacttgtgaagcctggcggatctctgagactgagctgtgccgccagcggcttcaccttcagcgatcactacatgagctggatcagacaggcccctggcaaaggactggaatggttcagctacatcagcagcagcggcggcatcatctactacgccgatagcgtgaagggcagattcaccatcagccgggacaacgccaagaacagcctgtacctccagatgaactccctgagagccgaggacaccgccgtgtactactgtgccagagatgtgggcagccacttcgactattggggccagggaacactggtcaccgtttctagc

SEQ ID NO: 450 - DNA, 372 bp, Artificial Sequence
  Synthetic Polynucleotide
caggtgcagctggttgaatctggtggcggagtggtgcagtctggcagaagcctgagactgtcttgtgccgccagcggcttcaccttcagaaactacggaatgcactgggtccgacaggcccctggcaaaggacttgaatgggtcgccgtgatttggtacgacggcagcgacaagtactacgccgattctgtgcggggcagattcaccatcagccgggacaacagcaagaacaccctgtacctccagatgaacagcctgagagccgaggacaccgccgtgtactactgtgccagagatggctacgacatcctgaccggcaatcccagagacttcgactattggggccagggcacactggtcacagtttctagc

SEQ ID NO: 451 - DNA, 366 bp, Artificial Sequence
  Synthetic Polynucleotide
gaggtgcagctggttgaatctggcggaggactggttcagcctggcggatctctgagactgtcttgtgccgccagcggcttcccattcagcagctacgatatgcactgggtccgacaggccacaggcaaaggactggaatgggtgtccgccatcggaacagccggcgctacctattatcccggctctgtgaagggcagattcaccatcagcagagagaacgccaagaacagcctgtacctccagatgaactccctgagagccggcgataccgccgtgtactattgtgccagaggcgactacgtgtggggcacctacagacccctgttcgattattggggccagggcaccctggtcacagtttctagt

SEQ ID NO: 452 - DNA, 354 bp, Artificial Sequence
  Synthetic Polynucleotide
caggttcagctgcaagagtctggccctggcctggtcaagcctagcgaaacactgagcctgacctgtaccgtgtctggggccagcatcagcagcttctactggtcctggatcagacagcctcctggcaaaggactggaatggatcggctacatctactacagcggcaccaccaactacaaccccagcctgaagtccagagtgaccatcagcgtggacaccagcaagaaccagttctccctgaagctgagcagcgtgacagccgccgatacagccgtgtactactgtgccagaattgccgtggccggcttcttcttcgactattggggccagggcaccctggtcacagtttctagc

SEQ ID NO: 453 - DNA, 369 bp, Artificial Sequence
  Synthetic Polynucleotide
caggttcagctggttcagtctggggccgaagtgaagaaacctggggcctctgtgaaggtgtcctgcaaggccagcggctacacctttaccaactactacatgcactgggtccgacaggcccctggactgggacttgagtggatgggcatcatcaaccctagcgacggcagcacaagctacgcccagaaattccagggcagagtgaccatgaccagagacaccagcaccaacaccgtgtacatggacctgagcagcctgagaagcgaggacaccgccgtgtactattgtgccagaggcggcaacagcgccttctacagctactacgacatggacgtgtggggccagggcaccacagtgacagtttctagc

SEQ ID NO: 454 - DNA, 348 bp, Artificial Sequence
  Synthetic Polynucleotide
caggttcagctccagcagtctggacctgagctggttaagcctggcgcttctgtgcggatctcttgcaaggccagcggctacaccttcaccacctactacatccactgggtcaagcagcggcctggacagggactcgaatggatcggctggatctaccccggcaacgtgaacaccaactacaacgagaagttcaagggcaaagccacactgaccgccgacaagagcagcagcacagcctacatgcagctgaccagcctgacctctgaggacagcgccgtgtacttttgtgccagaggcgtgtactacttcgactactggggccagggcaccatcctgacagtttctagc

SEQ ID NO: 455 - DNA, 357 bp, Artificial Sequence
  Synthetic Polynucleotide
caggttcagctgcaagagtctggccctggcctggtcaagcctagccaaacactgagcctgacctgtaccgtgtctggcggcagcatcaacaacaacaattactactggacctggatcagacagcaccccggcaaaggactggaatggatcggctacatctactacagcggcagcaccttctacaaccccagcctgaagtccagagtgaccatcagcgtggacaccagcaagacccagttctccctgaagctgagcagcgtgacagccgccgatacagccgtgtactactgcgccagagaagataccatgaccggcctggatgtgtggggccagggaacaacagtgacagtgtctagc

SEQ ID NO: 456 - DNA, 366 bp, Artificial Sequence
  Synthetic Polynucleotide
gaagttcagctggttcagagcggagccgaagtgaagaaacctggggcctctgtgaaggtgtcctgcaaggcttccggcgataccttcaagcggtactacgtgcactgggtccgacaggctccaggacaaggactggaatggatgggcatcatcaaccccagcggcgtgtccacaacatacgcccagaaattccagggcagagtgaccatgaccagagacaccagcacctccaccgtgtacatggaactgagcagcctgagaagcgaggacaccgccgtgtactactgtgctgaagtgcgcggcagcggcttcaactacttcggcatggatgtgtggggccagggcacactggttaccgtttcttct

SEQ ID NO: 457 - DNA, 366 bp, Artificial Sequence
  Synthetic Polynucleotide
gaggttcagctgcttgagtctggcggaggactggttcaacctggcggaagcctgagactgtcttgtgccgccagcggcttcacctttagcagctacgccatgagctgggtccgacaggctcctggcaaaggactggaagtggtggtgtctgccatttctggcggcggaggcagaacctactacgccgattctgtgaagggcagattcaccatcagccgggacaacagcaagaacaccctgtacctgcagatgaacagcctgagagccgaggacaccgccgtgtactactgtgccagagaagagatggccttccgggcctacagattcgacatctggggccagggaaccctggtcacagtttctagc

SEQ ID NO: 458 - DNA, 372 bp, Artificial Sequence
  Synthetic Polynucleotide
gaagtgcagctggtggaatctggcggcgaccttgtgaaacctggcggctctctgaagctgagctgtgccgtgtccggcttcacctttagcagctacggcatgagctgggtccgacagacccctgacaagagactggaatgggtcgccacagtgtctagcggcggcacctacacatattaccccgacagcgtgaagggcagattcaccatcagccgggacaacgccaagaacaccctgtacctccagatgagcagcctgaagtccgaggacagcgccatgtactactgcgccagacaccggggcaattactacgccacctattattacgctatggactactggggccagggcaccagcgtgacagtttcttct

SEQ ID NO: 459 - DNA, 357 bp, Artificial Sequence
  Synthetic Polynucleotide
gaagttcagctggttgaatcaggcggcggactggttcaacctggcggatctctgagactgagctgtgccgccagcggcttcacattttccgacgcctggatggactgggtccgacaggctcctggaaaaggactggaatgggtcggagagatccggtccaaagtgaacaaccacgaaacctactatgccgagagcgtgaagggcagattcaccatcagccgggacgacagcaagaacagcctgtacctccagatgaactccctgaaaaccgaggacaccgccgtgtactactgcgccagaaacgactacttcgactactggggccagggaaccaccgtgacagtgtctagtgcttcc

SEQ ID NO: 460 - DNA, 369 bp, Artificial Sequence
  Synthetic Polynucleotide
gaggttcagctgcaagagtctggggccgaagtgaagaaacctggcagcagcgtgaaggtgtcctgcaaggccagcggcttcaacatcaaggacacctacatgcactgggtccgacaggcccctggacaaggacttgagtggatgggcagaatcgaccccgccaacggcaacagcaaatacgtgcccaagttccagggcagagtgaccatcacagccgacgagagcacaagcaccgcctacatggaactgagcagcctgagaagcgaggacaccgccgtgtactactgtgcccctttcggctactacgtgtccgactacgccatggcctattggggccagggaaccaccgtgacagtgtctagtgcatct

SEQ ID NO: 461 - DNA, 360 bp, Artificial Sequence
  Synthetic Polynucleotide
caagttcagctggttcagtctggggccgaagtgaagaaacctggcagcagcgtgaaggtgtcctgcaaagcaagcggcggcacctttagcagctacgccatctcttgggtccgacaggcaccaggacaaggactggaatggatgggcctgattatccccagatacggcaaggccagatacgcccagaaattccagggcagagtgaccatcaccgccgacgagtctacaagcaccgcctacatggaactgagcagcctgagaagcgaggacacagccgtgtattattgcgcccggaactggccctactactacatggatttttggggccagggaaccctggtcaccgtgtctagtgcatct

SEQ ID NO: 462 - DNA, 366 bp, Artificial Sequence
  Synthetic Polynucleotide
gaggtgcagctggttgaatctggcggcggacttgtgaagcctggcggatctctgagactgagctgtgccgccagcggcttcacctttagcaatgcctggatgagctgggtccgacaggcccctggaaaaggactggaatgggtcggacggatcaagagcaagaccgaaggcggcaccaccgattatgctgcccctgtgaagggcagattcaccatcagcagggacgacagcaagaacaccctgtacctccagatgaacagcctgaaaaccgaggacaccgccgtgtactactgcaccacaccttacgagtggtcttggtacgactactggggccagggcacactggtcacagtgtcatctgcatct

SEQ ID NO: 463 - DNA, 363 bp, Artificial Sequence
  Synthetic Polynucleotide
caggttcagctggttcagtctggggccgaagtgaagaaacctggggcctctgtgaaggtgtcctgcaaggcttccggctacacctttaccagctactacatgcactgggtccgacaggcccctggacaaggacttgagtggatgggcatcatcaaccctagcggcggcagcacaagctacgcccagaaattccagggcagagtgaccatgacacacgacaccagcacctccaccgtgtacatggaactgagcagcctgagaagcgaggacaccgccgtgtactactgcgccagatccttcttcaccggcttccacctggattactggggccagggaacactggtcacagtgtcatctgcatct

SEQ ID NO: 464 - DNA, 384 bp, Artificial Sequence
  Synthetic Polynucleotide
caggttcagctggttcagagcggagccgaagtgaagaaacctggggcctctgtgaaggtgtcctgcaaggcttccggctacacctttaccaactacctgatcgagtgggtccgacaggctccaggacaaggactggaatggatgggcctgattaaccctggcagcggcggcaccaactacaacgagaagttcaagggcagagtgaccatgaccaccgacaccagcacaagcaccgcctacatggaactgcggagcctgagaagcgacgacaccgccgtgtattattgcgccagaagaagccctctcggctcttggatctactacgcctatgacggcgtggcctattggggccagggaacactggttacagtgtcctctgccagc

SEQ ID NO: 465 - DNA, 342 bp, Artificial Sequence
  Synthetic Polynucleotide
gaagttcagctggttgaatcaggcggcggactggttcaacctggcggatctctgagactgagctgtgccgccagcggcttcaccttcagcagatactggatgagctgggtccgacaggcccctggcaaaggacttgaatgggtcgccgagatcaaccccgacagcagcaccatccagtacaccccatctctgaaggcccggttcaccctgtccgtggacagaagcaagaacaccctgtacctccagatgaactccctgagagccgaggacaccgccgtgtactattgtgccagacctgcctattggggccagggaacactggtcacagtgtctagcgcttcc

SEQ ID NO: 466 - DNA, 363 bp, Artificial Sequence
  Synthetic Polynucleotide
caagttcagctggttcagtctggggccgaagtgaagaaacctggggcctctgtgaaggtgtcctgcaaggcttccggctacacctttaccggctacaacatccactgggtccgacaggctcccggccaaagacttgaatggatgggcgctatctaccccggcaacggcgataccagctacaagcagaaattccggggcagagtgacaattaccagagacaccagcgccagcaccgcctacatggaactgtctagcctgagaagcgaggacaccgccgtgtactattgcgccagaggcgaaacagccagagccacctttgcctattggggccagggaaccctggtcacagtgtctagtgcttcc

SEQ ID NO: 467 - DNA, 363 bp, Artificial Sequence
  Synthetic Polynucleotide
gaagtgcagctggttcagtctggggccgaagtgaagaaacctggggcctctgtgaaggtgtcctgcaaggccagcggctacagattcaccaactactggattcactgggtccgacaggctccaggccaaggactggaatggatcggcggcatcaaccccggcaacaactacgccacctaccggcggaagtttcagggcagagtgaccatgaccgccgacaccagcacaagcaccgtgtacatggaactgagcagcctgagaagcgaggacaccgccgtgtactactgcaccagagaaggctacggcaactacggcgcttggtttgcctattggggccagggcacactggtcacagtttctagc

SEQ ID NO: 468 - DNA, 375 bp, Artificial Sequence
  Synthetic Polynucleotide
gaagtgcagctggttgagtctggcggcggacttgtgaaacctggcggaagcctgaagctgagctgtgccgcttctggcttcgccttcagcatctacgacatgagctgggtccgacaggcccctggcaaaggacttgagtgggtcgcctacatcagctctggcggagggacaacctactatcccgacaccgtgaagggcagattcaccatcagccgggacaacgccaagaacaccctgtacctccagatgagcagcctgagagccgaggacaccgccatgtactactgtgccagacacagcggctacggcagctcttacggcgtgctgtttgcctattggggccagggcacactggtcaccgttagctctacgcgt

SEQ ID NO: 469 - DNA, 360 bp, Artificial Sequence
  Synthetic Polynucleotide
caggtgcagcttcagcagtctggcggaggacttgttcagcctggcggaagcctgaagctgagctgtgccgcctctggcatcgacttcagcagatactggatgagctgggttcgcagagcccctggcaaaggactggaatggatcggcgagatcaaccccgacagcagcaccatcaattacgcccctagcctgaaggacaagttcatcatcagccgggacaacgccaagaacaccctgtacctccagatgagcaaagtgcgcagcgaggacacagccctgtactactgtgccagcctgtactatgactacggcgacgctatggactactggggccagggaacaagcgtgaccgttagctct

SEQ ID NO: 470 - DNA, 366 bp, Artificial Sequence
  Synthetic Polynucleotide
gaagtgcagctggttgaatcaggtggcggcctggttcaacctggcggatctctgagactgagctgtgccgcctctggcttcgccttcagcatctacgatatgagctgggtccgacaggcccctggcaaaggacttgagtgggtcgcctacatctcttccggcggaggcacatattaccccgacaccgtgaagggcagattcaccatcagcagagacaacagcaagaacaccctgtacctccagatgaactccctgagagccgaggacaccgccgtgtactattgtgccagacacagcggctacggcacacactggggagtgctgtttgcctattggggccagggcacactggtcaccgtgtctagc

SEQ ID NO: 471 - DNA, 363 bp, Artificial Sequence
  Synthetic Polynucleotide
gaagttcagctggttgaatctggcggcggactggttcaacctggcggatctctgagactgagctgtgccgcctctggctacgcctttagcagctactgggtcaactgggttcgacaggcccctggcaaaggactggaatgggtcgcccaaatctatcccggcgacggcgacaccaactacaacggcaagttcaagggcagattcaccatcagccgggacaacagcaagaacaccctgtacctccagatgaactccctgagagccgaggacaccgccgtgtactattgtgccagatccatcaccaccgtcgtgggctgcgctatggattattggggccagggaaccctggtcaccgtgtcctct

SEQ ID NO: 472 - DNA, 366 bp, Artificial Sequence
  Synthetic Polynucleotide
caactccagctgcaagagtctggccctggcctggtcaagcctagcgaaacactgagcctgacctgtaccgtgtctggcggctctatcagctccggcagctatttctggggctggatcagacaacctcctggcaaaggactggaatggatcggctccatctactacagcggcatcacctactacaaccccagcctgaagtccagagtgaccatctccgtggacaccagcaagaaccagttctccctgaagctgagcagcgtgacagccgccgataccgccgtgtattattgtgccagacatgacggcgctgtggccggcctgtttgattattggggacagggcaccctggtcaccgtgtcatctgct

SEQ ID NO: 473 - DNA, 354 bp, Artificial Sequence
  Synthetic Polynucleotide
caagttcagctgcaagagtctggccccggactggtcaagcctagccaaacactgagcctgacctgtaccgtgtccggctacagcatcaccagcgactacacctggaactggatcagacagcctcctggcaacggactggaatggatcggctacatcacctacagcggcagcaccagctacaaccccagcctgaaaagccgggtgctgatctccgtggacaccagcaagaatcaggtgtccctgaagctgagcagcgtgacagccgctgataccgccgtgtactactgtgccagactggggagaagatacacaatggactactggggccagggcacaaccgtgacagtctcttct

SEQ ID NO: 474 - DNA, 354 bp, Artificial Sequence
  Synthetic Polynucleotide
caagtgcagctggttgaatctggcggcggactggttaagcctggcggttctctgagactgagctgtgccgcttctggcgacagcatcacaagcggctactggaactggatcagacaggcccctggcaaaggactggaatggttcagctacatcagctactccggcagcacctactacaaccccagcctgaagtcccggttcaccatcagcagagacaacgccaagaacagcctgtacctccagatgaactccctgagagccgaggacaccgccgtgtactattgcgccagacctaactaccccttctacgctatggactactggggccagggcacactggtcacagtctcttct

SEQ ID NO: 475 - DNA, 354 bp, Artificial Sequence
  Synthetic Polynucleotide
gaagtgcagctggttgaatcaggtggcggcgttgtgcagcctggcagaagtctgagactgagctgtgccgcctctggctttagcctgagcacatctggcatgggcgtcggctgggttcgacaagctcctggcaaaggactggaatgggtcgcccacatttggtgggacgacgacaagtactacgccgacagcgtgaagggcagattcaccatcagccgggacaacagcaagaacaccctgtacctccagatgaacagcctgagagccgaggacaccgccgtgtactattgtgcccggtcttttggctacggcctggactattggggccagggcacactggttaccgtgtctagt

SEQ ID NO: 476 - DNA, 372 bp, Artificial Sequence
  Synthetic Polynucleotide
caagttcagctggttgaatctggcggcggactggttaagcctggcggttctctgagactgagctgtgccgcttctggcgatagcgtgtcctctaattctgccgcctggggctggattagacaggcccctggaaaaggactggaatggttcagccggatctactaccgcagcaagtggtacaacagctacgccgtgtccgtgaagtcccggttcaccatcagcagagacaacgccaagaacagcctgtacctccagatgaactccctgagagccgaggacaccgccgtgtactactgcgccagatacgattgggtgcccaagatcggcgtgttcgattcttggggccagggaaccctggtcaccgtttcttct

SEQ ID NO: 477 - DNA, 366 bp, Artificial Sequence
  Synthetic Polynucleotide
caactccagctgcaagagtctggccctggcctggtcaagcctagcgaaacactgagcctgacctgtaccgtgtctggcggctctatcagctccagcagctatttctggggctggatcagacaacctcctggcaaaggactggaatggatcggctccatctactacagcggcatcacctactacaaccccagcctgaagtccagagtgaccatctccgtggacaccagcaagaaccagttctccctgaagctgagcagcgtgacagccgccgataccgccgtgtattattgtgccagacatgacggcgctgtggccggcctgtttgattattggggacagggcaccctggtcaccgtgtcatctgct

SEQ ID NO: 478 - DNA, 366 bp, Artificial Sequence
  Synthetic Polynucleotide
caactccagctgcaagagtctggccctggcctggtcaagcctagcgaaacactgagcctgacctgtaccgtgtctggcggctctatcagctccggcagctatatctggggctggatcagacaacctcctggcaaaggactggaatggatcggctccatctactacagcggcatcacctactacaaccccagcctgaagtccagagtgaccatctccgtggacaccagcaagaaccagttctccctgaagctgagcagcgtgacagccgccgataccgccgtgtattattgtgccagacatgacggcgctgtggccggcctgtttgattattggggacagggcaccctggtcaccgtgtcatctgct

SEQ ID NO: 479 - DNA, 366 bp, Artificial Sequence
  Synthetic Polynucleotide
caactccagctgcaagagtctggccctggcctggtcaagcctagcgaaacactgagcctgacctgtaccgtgtctggcggctctatcagctccggcagctatttctggggctggatcagacaacctcctggcaaaggactggaatggatcggctccatctactacagcggcatcacctactacaaccccagcctgaagtccagagtgaccatctccgtggacaccagcaagaaccagttctccctgaagctgagcagcgtgacagccgccgataccgccgtgtattattgtgccagacatgacggcgctatggccggcctgtttgattattggggacagggcaccctggtcaccgtgtcatctgct

SEQ ID NO: 480 - DNA, 366 bp, Artificial Sequence
  Synthetic Polynucleotide
caactccagctgcaagagtctggccctggcctggtcaagcctagcgaaacactgagcctgacctgtaccgtgtctggcggctctatcagctccggcagctatttctggggctggatcagacaacctcctggcaaaggactggaatggatcggctccatctactacagcggcagcacctactacaaccccagcctgaagtccagagtgaccatctccgtggacaccagcaagaaccagttctccctgaagctgagcagcgtgacagccgccgataccgccgtgtattattgtgccagacatgacggcgctgtggccggcctgtttgattattggggacagggcaccctggtcaccgtgtcatctgct

SEQ ID NO: 481 - DNA, 366 bp, Artificial Sequence
  Synthetic Polynucleotide
caactccagctgcaagagtctggccctggcctggtcaagcctagcgaaacactgagcctgacctgtaccgtgtctggcggctctatcagctccggcagctatttctggggctggatcagacaacctcctggcaaaggactggaatggatcggctccatctactacagcggcatcagctactacaaccccagcctgaagtccagagtgaccatctccgtggacaccagcaagaaccagttctccctgaagctgagcagcgtgacagccgccgataccgccgtgtattattgtgccagacatgacggcgctgtggccggcctgtttgattattggggacagggcaccctggtcaccgtgtcatctgct

SEQ ID NO: 482 - DNA, 366 bp, Artificial Sequence
  Synthetic Polynucleotide
caactccagctgcaagagtctggccctggcctggtcaagcctagcgaaacactgagcctgacctgtaccgtgtctggcggctctatcagctccggcagctatttctggggctggatcagacaacctcctggcaaaggactggaatggatcggctccatctactacagcggcatcacctactacaaccccggcctgaagtccagagtgaccatctccgtggacaccagcaagaaccagttctccctgaagctgagcagcgtgacagccgccgataccgccgtgtattattgtgccagacatgacggcgctgtggccggcctgtttgattattggggacagggcaccctggtcaccgtgtcatctgct

SEQ ID NO: 483 - DNA, 366 bp, Artificial Sequence
  Synthetic Polynucleotide
caactccagctgcaagagtctggccctggcctggtcaagcctagcgaaacactgagcctgacctgtaccgtgtctggcggctctatcagctccggcagctatttctggggctggatcagacaacctcctggcaaaggactggaatggatcggctccatctactacagcggcatcacctactacaaccccaccctgaagtccagagtgaccatctccgtggacaccagcaagaaccagttctccctgaagctgagcagcgtgacagccgccgataccgccgtgtattattgtgccagacatgacggcgctgtggccggcctgtttgattattggggacagggcaccctggtcaccgtgtcatctgct

SEQ ID NO: 484 - DNA, 366 bp, Artificial Sequence; identical to SEQ ID NO: 472
  Synthetic Polynucleotide

SEQ ID NO: 485 - DNA, 366 bp, Artificial Sequence; identical to SEQ ID NO: 472
  Synthetic Polynucleotide

SEQ ID NO: 486 - DNA, 366 bp, Artificial Sequence; identical to SEQ ID NO: 472
  Synthetic Polynucleotide

SEQ ID NO: 487 - DNA, 366 bp, Artificial Sequence; identical to SEQ ID NO: 472
  Synthetic Polynucleotide

SEQ ID NO: 488 - DNA, 366 bp, Artificial Sequence; identical to SEQ ID NO: 477
  Synthetic Polynucleotide

SEQ ID NO: 489 - DNA, 366 bp, Artificial Sequence; identical to SEQ ID NO: 477
  Synthetic Polynucleotide

SEQ ID NO: 490 - DNA, 366 bp, Artificial Sequence; identical to SEQ ID NO: 477
  Synthetic Polynucleotide

SEQ ID NO: 491 - DNA, 360 bp, Artificial Sequence
  Synthetic Polynucleotide
caagttcagctggttcagagcggagccgaagtgaagaaacctggcagcagcgtgaaggtgtcctgcaaagcaagcggcggcacctttagcacctacgccatccactgggttcgacaggcaccaggacaaggactggaatggatgggcagaatcatccccatcgagggcagagcctactacgcccagaaattccagggcagagtgaccatcaccgccgacgagtctacaagcaccgcctacatggaactgagcagcctgagaagcgaggataccgctgtgtactattgcgccagaggccggtacagctacagatattggttcgactactggggccagggcaccctggttacagtctcttct

SEQ ID NO: 492 - DNA, 366 bp, Artificial Sequence
  Synthetic Polynucleotide
gaagttcagctggttcagagcggagccgaagtgaagaagccaggcgagagcctgaagattagctgcaaaggctccggctacagcttcaccagctactggatcggctgggtccgacagatgcctggcaaaggactggaatggatgggcatcatctaccccggcgacagcgacaccagatacagccctagctttcagggccaagtgaccatcagcgccgacaagagcatcagcacagcctacctccagtggtcctctctgaaggccagcgataccgccatgtactattgcgccagagatgtcggcagatgggctcctggcggcttcctggattattggggacagggcacactggtcaccgtgtctagt

SEQ ID NO: 493 - DNA, 354 bp, Artificial Sequence
  Synthetic Polynucleotide
caagttcagctggttcagagcggcgctgaagtgaagaaacctggcagcagcgtgaaggtgtcctgcaaagcaagcggcggcacctttagcagctacggcatctcttgggtccgacaggctcctggacaaggactggaatggatgggctggatcagcgccatcttcggcacagccaattacgcccagaaattccagggccgcgtgacaatcacagccgacgagtctacaagcaccgcctacatggaactgagcagcctgagaagcgaggacaccgccgtgtactattgtgccagaggcgtggcctcctggtatctggattattggggccagggaaccctggtcaccgtgtcatct

SEQ ID NO: 494 - DNA, 360 bp, Artificial Sequence
  Synthetic Polynucleotide
caggttcagctgcaacagcctggcgctgagcttgtgaaacctggcgcttccgtgaagatgagctgcaaggccagcggctacaccttcaccagctataacatgcactgggtcaagcagaccccaggcagaggactggaatggatcggagccatctatcccggcaacggcgacacctcctacaaccagaagttcaagggcaaagccacactgaccgccgacaagagcagcagcacagcctacatgcagctgagcagcctgaccagcgaagatagcgccgtgtactactgcgcccggtctacctattatggcggcgactggtacttcaacgtgtggggagctggcaccaccgtgacagtttct

SEQ ID NO: 495 - DNA, 357 bp, Artificial Sequence
  Synthetic Polynucleotide
caggttcagctccagcagtctggacccgagctgaagaaacctggcgagacagtgaagatcagctgcaaggccagcggctaccccttcaccaactacggcatgaactgggtcaagcaggcccctggacagggcctgaaatggatgggctggatcaataccagcaccggcgagagcaccttcgccgacgatttcaagggcagattcgacttcagcctggaaaccagcgccaacaccgcctacctccagatcaacaacctgaagtccgaggatatggctacctacttctgcgccagatgggaagtgtaccacggctacgtgccatattggggccagggcacaaccgtgacagtctcttct

SEQ ID NO: 496 - DNA, 357 bp, Artificial Sequence
  Synthetic Polynucleotide
gaagtgcagctggttgaatcaggtggcggcgttgtgcagcctggcagaagtctgagactgagctgtagcgccagcggcttcgatttcaccacctactggatgagctgggtccgacaggcccctggcaaaggactggaatggatcggcgagattcaccccgacagcagcaccatcaattacgcccctagcctgaaggacagattcaccatcagccgggacaacgccaagaacaccctgttcctccagatggactccctgaggccagaggataccggcgtgtacttttgcgccagcctgtatttcggcttcccttggtttgcctactggggccagggaacccctgtgacagttagctct

SEQ ID NO: 497 - DNA, 372 bp, Artificial Sequence
  Synthetic Polynucleotide
ggagtgcattctcaggttcagctgcaagagtctggccctggacttgtgcggcctagccaaacactgagcctgacctgtaccgtgtccggcttcacaatcagctccggctacagctggcactgggtccgacaaccacctggcagaggactggaatggatcggctacatccagtacagcggcatcaccaactacaaccccagcctgaagtcccgcgtgaccatgctggtggacacctccaagaaccagttcagcctgagactgagcagcgtgacagccgccgatacagccgtgtactactgcgccagagaggactacgactaccactggtacttcgacgtgtggggccagggaaccaccgtgacagtttcttct

SEQ ID NO: 498 - DNA, 360 bp, Artificial Sequence
  Synthetic Polynucleotide
gaagtgcagctggttgaatcaggtggcggcctggttcaacctggcggatctctgagactgagctgtgccgccagcggcttcaacatcaaggacacctacatccactgggtccgacaggcccctggcaaaggacttgaatgggtcgccagaatctaccccaccaacggctacaccagatacgccgactctgtgaagggcagattcaccatcagcgccgacaccagcaagaacaccgcctacctccagatgaactccctgagagccgaggacaccgccgtgtactactgtagcagatggggcggagccggagcctacgctatggatgtttggggccagggaaccctggtcaccgtgtcatct

SEQ ID NO: 499 - DNA, 363 bp, Artificial Sequence
  Synthetic Polynucleotide
caggtgcagctggttgaatctggtggcggagttgtgcagcctggcagaagcctgagactgtcttgtgccgccagcggcttcacctttagcagctatgccatgcactgggtccgacaggcccctggcaaaggacttgaatgggtcgccgtgatctcctacgacggcagcaacaagtattacgccgacagcgtgaagggcagattcaccatcagccgggacaacagcaagaacaccctgtacctccagatgaacagcctgagagccgaggacaccgccgtgtactactgtgccaaagaggccccttactacgccaaggactacatggacgtgtggggcaagggcaccaccgtgacagtttcttct

SEQ ID NO: 500 - DNA, 366 bp, Artificial Sequence
  Synthetic Polynucleotide
gaagttcagctggttgaaacaggtggcggcctggtgcagcctggcaaatctctggaactgacctgcgccaccagcggcttcacctttaataccgcctggatgcactgggtccgacagagccccgataagcggctggaatggatcgccagaatcaaggacaccagcaacaactacgccaccgactacgtggaatccatgaagggcagattcaccatcagccgggacgacagcaagggctccgtgaacctccagatgaacagcctgaaagaagaggacaccgccacctactactgcaccaccgacttctacgacggcacctactattggaactactggggccagggcgtgatggtcacagtgtcatct

SEQ ID NO: 501 - DNA, 378 bp, Artificial Sequence
  Synthetic Polynucleotide
agaatggctcaggttcagctgcaacagagcggagccgaacttgctagacctggcgcttccgtgaagatgagctgtaaagccagcggctacaccttcaccacctacaccatccactgggtccgaagaaggccaggccacgaccttgagtggatcggctacatcaaccccagcagcggctgctccgactacaaccagaacttcaagggcaagaccacactgaccgccgacaagagcagcaacaccgcctacatgcagctcaacagcctgaccagcgaggacagcgccgtgtactattgtgccagaagggccgactacggcaactacgagtacacttggtttgcctactggggccagggcaccaccgtgacagtttcttct

SEQ ID NO: 502 - DNA, 354 bp, Artificial Sequence
  Synthetic Polynucleotide
gaagtgcagctggttgaatcaggtggcggcctggttcagcctggcagaagtctgagactgagctgtgccgccagcggcttcaccttcgacgattacggaatgcactgggtccgacaggcccctggcaaaggacttgaatgggtgtccggcatcagctggaacagcggcagcatcggctatgccgatagcgccaagggcagattcaccatcagccgggacaacagcaagaacaccctgtacctgcagatgaacagcctgagagccgaggacaccgccgtgtactactgtgccaagaggggcaacagcaacagcttcgactattggggccagggcaccctggtcacagtctcttct

SEQ ID NO: 503 - DNA, 366 bp, Artificial Sequence
  Synthetic Polynucleotide
cagatgcagctggtgcagtctggggccgaagtgaagaaacctggcagcagcgtgaaggtgtcctgcaaagcaagcggcggcacctttagctcctacgccatctcttgggtccgacaggctccaggacaaggactggaatggatgggcggcatcatccccatcttcggcacagccaattacgcccagaaattccagggcagagtgacaatcaccgccgacaagagcaccagcaccgcctacatggaactgagcagcctgagaagcgacgacaccgccgtgtactactgcgccagagatgaactgtgggccaccaactactactacatggacgtgtggggcaagggcaccctggtcacagtttcttct

SEQ ID NO: 504 - DNA, 354 bp, Artificial Sequence
  Synthetic Polynucleotide
gaagttcagctggttgaatctggcggcggactcgttagacctggcggatctctgagactgagctgtgccgccagcggcttcaccttcgatgattacggcatgagctgggtccgacaggcccctggaaaaggactggaatgggtgtccggcatcagctggaatagcggctctatcggctacgccgacagcgtgaagggcagattcaccatcagccgggacaacgccaagaacagcctgtacctccagatgaactccctgagagccgaggacacagccctgtactactgtgccaagcggggcaacagcaacagcttcgattattggggccagggaaccaccgtgaccgtgtcatct

SEQ ID NO: 505 - DNA, 354 bp, Artificial Sequence
  Synthetic Polynucleotide
gaagtgcagctggttgaatcaggtggcggcctggttcagcctggcagaagtctgagactgagctgtgccgcctccggcttcaccttcgatgattacgccatgcactgggtccgacaggcccctggaaaaggactggaatgggtgtccggcatcagctggaatagcggctctatcggctacgccgattccgccaagggcagattcaccatcagccgggacaacagcaagaacaccctgtacctccagatgaactccctgagagccgaggacaccgccgtgtactactgtgccaagaggggcaacagcaacagcttcgactattggggccagggcaccctggtcacagtctcttct

SEQ ID NO: 506 - DNA, 357 bp, Artificial Sequence
  Synthetic Polynucleotide
caggtgcagctgaaagagtctggccctggactggtgcagcctagccaaacactgagcctgacctgtaccgtgtctggcctgtctctgaccagcaatggcgtgtcctggatcagacagcctcctggcaaaggactggaatggctgggcgtgatctggtccaatggcggcacagactacaacagcgccatcaagagccggctgagcttcagcagagacaccagcaagagccaggtgttcctgaagatgaacagcctccagaccgaggataccgccatgtacttttgcgccagacctcggtacaactccggctacttcttcgactattggggccagggcgtgatggtcaccgttagctct

SEQ ID NO: 507 - DNA, 372 bp, Artificial Sequence
  Synthetic Polynucleotide
caagtgcagctgaaagagtctggccccggactggttcagcctagccaaacactgagcctgacctgtaccgtgtccggctttagcctgaccagctaccacgtgcactgggtccgacaacctccaggcaaaggactggaatggatgggcgtgatgtggagcgacggcgacaccctgtataacagcgccctgaagtcccggctgagcatcagcagagataccagcaagagccaggtgctgctccagatggatagcctccagagcgaggataccgccacctactactgtgccagactccaggtgttcggctaccccggcatcagagactacgtgatggatgcctggggacagggcgcttctgtgacagtctcttct

SEQ ID NO: 508 - DNA, 390 bp, Artificial Sequence
  Synthetic Polynucleotide
gaagttcagctggttgagtctggcggcagagtcgttagacctggcggaagcctgagactgtcttgtgccgccagcggcttcacctttgacgactacggcatgagctgggtccgacagcctcctggaaagggcctcgaatttgtgtccggcctgaactggaacggcgacatcaccgcctttaccgacagcgtgaagggcagattcaccatcagccgggacaacgtgaagtccagcctgtacctccagatgaacagcctgagagccgacgacaccgccttctactactgtgccagagtgcggacctggggcgattacacaacaggcgaggaaatcatcaacagctggtacttcgacctgtggggcagaggcacactggtcacagtctcttct

SEQ ID NO: 509 - DNA, 360 bp, Artificial Sequence
  Synthetic Polynucleotide
gaagtgcagctggttgaatcaggtggcggcctggttcaacctggcggatctctgagactgagctgtgccgcctccggcttcacctttagcagctactggatgagctgggtccgacaggcccctggcaaaggacttgagtgggtcgccaacatcaagcaggacggcagcgagaagtattacgtggacagcgtgaagggcagattcaccatcagccgggacaacgccaagaacagcctgtacctgcggatgaactccctgagagccgaggataccgccgtgtactattgtgccagagcctggggctacagctcctactacttcgactattggggccagggaaccctggtcaccgtttctcca

SEQ ID NO: 510 - DNA, 345 bp, Artificial Sequence
  Synthetic Polynucleotide
gaagttcagctgcaacagtctggccccgagctggttaagcctggaacaagcgtgcggatctcctgcaagaccagcggctacaccttcaccgagtacaccatccactgggtcaagcagagccacggcaagagcctggaatggatcggcaacatcaaccccaacaacggcggcaccacctacaaccagaagttcgaggacaaggccacactgaccgtggacaagagcagcagcaccgcctacatggaactgagaagcctgaccagcgaggacagcgccgtgtactattgtgccgccggatggaacttcgactactggggccagggaacaaccctgaccgttagctct

SEQ ID NO: 511 - DNA, 345 bp, Artificial Sequence
  Synthetic Polynucleotide
gaagtgcagctggttgaatcaggtggcggcctggttcaacctggcggatctctgagactgagctgtgccgccagcggctacacctttaccgagtacacaatccactgggtccgacaggcccctggcaaaggacttgagtgggtcgccaacatcaaccccaacaatggcggcaccacctacaaccagaagttcgaggacagattcaccatcagccgggacaacagcaagaacaccctgtacctccagatgaactccctgagagccgaggacaccgccgtgtactattgtgccagaggctggaacttcgactactggggccagggaacactggtcaccgttagctct

SEQ ID NO: 512 - DNA, 345 bp, Artificial Sequence
  Synthetic Polynucleotide
caagttcagctggttcagagcggagccgaagtgaagaaacctggcgagagcgtgaaggtgtcctgcaaagccagcggctacacctttaccgagtacaccatccactgggtccgacaggctccaggacaaggactggaatggatgggcaacatcaaccccaacaacggcggcaccacctacaaccagaaattcgaggatcgcgtgacaatcaccgccgacaagagcaccagcaccgcctacatggaactgagcagcctgagaagcgaggacaccgccgtgtactattgtgccagaggctggaacttcgactactggggccagggaaccaccgtgacagtctcttct

SEQ ID NO: 513 - DNA, 345 bp, Artificial Sequence; identical to SEQ ID NO: 510
  Synthetic Polynucleotide

SEQ ID NO: 514 - DNA, 345 bp, Artificial Sequence; identical to SEQ ID NO: 511
  Synthetic Polynucleotide

SEQ ID NO: 515 - DNA, 366 bp, Artificial Sequence
  Synthetic Polynucleotide
gaagtgcagctggttgagtctggcggcggactggttaagcctgagggaagcctgagactgtcttgtgccgccagcggcttcaccttcagcagatacggcatgagctgggtccgacaggctcctggcaaaggactggaatgggtgtccacaatttccggcggaggcacctacatctactaccccgatagcgtgaagggcagattcaccatctccagagacaacgccaagaacagcctgttcctccagatgaactccctgagagccgaggacacagccgtgtattattgcgctcgggacaactacggcagaaactacgactacggcatggactactggggccagggcacactggttaccgttagctct

SEQ ID NO: 516 - DNA, 366 bp, Artificial Sequence
  Synthetic Polynucleotide
gaagtgaaggtggtggaatctggcggcgacctggttaagcctggcggatctctgaagctgagctgtgtggtgtccggcttcaccttcagcagatacggcatgagctgggtccgacagacccctggcaaaagactggaatgggtcgccacaatttccggcggaggcacctacatctactaccccgatagcgtgaagggcagattcaccatctccagagacaacgccaagaacaccctgtacctccagatgagcagcctgaagtctgaggacaccgccatgtaccactgcaccagggacaactacggcagaaactacgactacggcatggactactggggccagggcacaagcgtgacagtctcttct

SEQ ID NO: 517 - DNA, 363 bp, Artificial Sequence
  Synthetic Polynucleotide
gaagtgcagctggttgagtctggcggcggacttgtgaaacctggcggaagcctgagactgagctgtgccgcttccggctttacctttagcggctacgccatgagctgggtccgacaggctcctggcaaaggactggaatgggtgtccacaatcagcagcggcggcacctacatctactaccccgatagcgtgaaaggccggttcaccatcagccgggacaacgccaagaacagcctgtacctccagatgaactccctgagagccgaggacaccgccgtgtactattgtgccagactcggcggcgacaattactacgagtatttcgacgtgtggggcaagggcaccaccgtgacagtttcttct

SEQ ID NO: 518 - DNA, 351 bp, Artificial Sequence
  Synthetic Polynucleotide
gaagttcagctgcttgaatctggcggcggactggttcaacctggcggatctctgagactgagctgtgccgcctctggcttcgccttcagcacctacgatatgagctgggtccgacaggcccctggcaaaggacttgaatgggtcgccacaatcagcagcggcggcagctacacctactacctggatagcgtgaagggcagattcaccatcagccgggacagcagcaagaacaccctgtacctccagatgaactccctccaggccgaggactccgccatctactattgtgcccctaccaccgtggtgcctttcgcctattggggacagggaaccctggtcaccgttagctct

SEQ ID NO: 519 - DNA, 348 bp, Artificial Sequence
  Synthetic Polynucleotide
gaggtgcagctggttgaatctggcggaggactggttcagcctggcggatctctgagactgtcttgtgccgccagcggctacaccttcaccagctattggctgcactgggtccgacaggcccctggcaaaggacttgagtgggtcggatatatcaggcccagcaccggctacacagagtacaaccagaagttcaaggaccgcttcaccatcagcgccgacaccagcaagaataccgcctacctccagatgaacagcctgagagccgaggacaccgccgtgtactactgtgccagatccagatggctgctggactattggggccagggcacactggttacagttagctct

SEQ ID NO: 520 - DNA, 345 bp, Artificial Sequence
  Synthetic Polynucleotide
gaggtgcagctggttgaatctggcggaggactggttcagcctggcggatctctgagactgtcttgtgccgccagcggcttcaccttcaccacctattggatgcactgggtccgacaggcccctggcaaaggacttgagtgggtcggatatatcaggcccagcaccggctacacagagtacaaccagaagttcaaggaccgcttcaccatcagcgccgacaccagcaagaataccgcctacctccagatgaacagcctgagagccgaggacaccgccgtgtactactgtgccagatccagatggctgctggactattggggccagggcacactggttacagtttct

SEQ ID NO: 521 - DNA, 339 bp, Artificial Sequence; identical to SEQ ID NO: 277
  Synthetic Polynucleotide

SEQ ID NO: 522 - DNA, 351 bp, Artificial Sequence
  Synthetic Polynucleotide
gaagtgcagctggttgaatcaggtggcggcctggttcaacctggcggatctctgagactgagctgtgccgccagcggctacaccttcagcgactactttatgagctgggtccgacaggcccctggcaaaggacttgaatgggtcgccaccatcagcaatggcggcacctacacttactaccccgacagcgtgaagggcagattcaccatctccagagacaacagcaagaacaccctgtacctccagatgaactccctgagagccgaggacaccgccgtgtactactgcgccagattcgacggctacatcttcgactattggggccagggcaccctggtcacagtctcttct

SEQ ID NO: 523 - DNA, 351 bp, Artificial Sequence; identical to SEQ ID NO: 436
  Synthetic Polynucleotide

SEQ ID NO: 524 - DNA, 351 bp, Artificial Sequence; identical to SEQ ID NO: 436
  Synthetic Polynucleotide

SEQ ID NO: 525 - DNA, 32 bp, Artificial Sequence; identical to SEQ ID NO: 283
  Synthetic Polynucleotide
  misc_feature (30)..(32): n is a, c, g, or t

SEQ ID NO: 526 - DNA, 32 bp, Artificial Sequence; identical to SEQ ID NO: 283
  Synthetic Polynucleotide
  misc_feature (30)..(32): n is a, c, g, or t

SEQ ID NO: 527 - DNA, 32 bp, Artificial Sequence; identical to SEQ ID NO: 283
  Synthetic Polynucleotide
  misc_feature (30)..(32): n is a, c, g, or t

SEQ ID NO: 528 - DNA, 32 bp, Artificial Sequence; identical to SEQ ID NO: 283
  Synthetic Polynucleotide
  misc_feature (30)..(32): n is a, c, g, or t

SEQ ID NO: 529 - DNA, 32 bp, Artificial Sequence; identical to SEQ ID NO: 283
  Synthetic Polynucleotide
  misc_feature (30)..(32): n is a, c, g, or t

SEQ ID NO: 530 - DNA, 753 bp, Artificial Sequence
  Synthetic Polynucleotide
gacgtgcagatgatccagacccccgatagcctggccgtgtccctgggacagagagccaccatctcttgcagagccagcgagagcgtggacaactacggcatcagcttcatgcactggtatcagcagaagcccggccagagccccaagctgctgatctacagagcctccaacctggaaagcggcatccccgccagattttccggcagcggcagcagaaccgacttcaccctgaccatcaaccccgtggaaaccgacgacgtggcaacctactactgccagcagaacaacaaggacccccccacctttggcggaggcaccaagctggaaatcaagggcggaggcggaagtggaggcggaggatctggcggcggaggctctgggggaggcggctctcaggtgcaactccagcagtctggcgctgagcttgtgaagcctggggccagcgtgaagattagctgcaaggccagcggctacgccttcagcagctactggatgaactgggtcaagcagcggcctggcaagggcctggaatggatcggccaaatctaccccggcgacggcgacaccacctacaacggcaagttcaagggcaaggccaccctgacagccgacaagagcagcagcaccgtgtacatgcaactgaacagcctgaccagcgaggacagcgccgtgtacttctgcgtgcggtactactacggcagctccggctacttcgactattggggccagggcaccacactgaccgtgtcctct

SEQ ID NO: 531 - DNA, 726 bp, Artificial Sequence
  Synthetic Polynucleotide
gacgtgcagatgatccagacccccagcagcctgtctgccagcctgggcgatagagtgaccatcagctgtcgggccagccaggacatcggcaactacctgaactggtatcagcagaaacccgacggcaccgtgaagctgctgatctactacaccagcagactgcacagcggcgtgcccagcagattttctggcagcggctctggcaccgagtacagcctgaccatctccaacctggaacaggaagatattgctacctacttctgtcagcaaggcagcgccctgccccctacatttggcggcggaacaaagctggaaatcaacggcggaggcggaagtggaggcggaggatctggcggcggaggctctgctctccagctccagcagtctggcgcagaactcgtgcggcctggcgcttctgtgaccctgagctgtaaagccagcggctacaccttcaccgactacgagatgcactgggtcaagcagacccctgtgcacggcctggaatggatcggagccatcgaccctgagacaggcggcaccgcctacaaccagaagttcgagggcaaggccatcctgaccgccgacaagagcagcagcacagcctacatggaactgcggagcctgacctccgaggacagccccgtgtactactgtgccagacggcggtactacggcagcagctccttcgactattggggccagggcaccaccctgaccgtgtctagt

SEQ ID NO: 532 - DNA, 732 bp, Artificial Sequence
  Synthetic Polynucleotide
gacatcgtgctgacacagagccctgccaccctgtctctgagccctggcgatagagccaccatcagctgtagagccagcgagagcgtgaccatcctgggcagccacctgatctactggtatcagcagaagcccggccagccccccagactgctgattcagctggcctccaatgtgcagaccggcgtgccagccagattttccggcagcggcagcagaaccgacttcaccctgaccatcagcagcgtggaacccgaggacttcgccgtgtactactgcctccagagccggaccatccccagaacattcggccagggcaccaagctggaaatcaagagaggcggaggcggaagtggaggcggaggatctggcggcggaggctctcaggtgcagctggtgcagtctggccccgaagtgaagaaacccggcgagtccgtgaagatcagctgcaaggccagcggctacaccttccggcactacagcatgaactgggtcaagcaggccccaggccagggcctgaagtggatgggcagaatcaacaccgagagcggcgtgcccatctacgccgacgacttcaagggccggttcagcttcaccgtggacaccagcgccagcaccgcctacctggaaatctccagcctgaccagcgaggataccgccgtgtatttctgctccaacgactacctgtacagcctggatttctggggccagggaaccaccctgacagtgtcctct

SEQ ID NO: 533 - DNA, 732 bp, Artificial Sequence
  Synthetic Polynucleotide
gacatccagatgacccagagccctagctcactgagcgccagcgtgggcgacagggtgaccattacctgctccgccagccaggacatcagcaactacctgaactggtaccagcagaagcccggcaaggcccccaagctgctgatctactacacctccaacctgcactccggcgtgcccagcaggttcagcggaagcggcagcggcaccgatttcaccctgaccatctccagcctgcagcccgaggacttcgccacctactactgccagcagtacaggaagctcccctggactttcggccagggcaccaaactggagatcaagcgtggcggaggcggaagtggaggcggaggatctggcggcggaggctctcaggtgcagctggtccagagcggcgccgaagtgaagaagcccggcagctccgtgaaagtgagctgcaaggccagcggcggcaccttcagcaactactggatgcactgggtgaggcaggcccccggacagggcctggagtggatgggcgccacctacaggggccacagcgacacctactacaaccagaagttcaagggccgggtgaccatcaccgccgacaagagcaccagcaccgcctacatggaactgagcagcctcaggagcgaggacaccgctgtgtattactgcgccaggggcgccatctacgacggctacgacgtgctggacaactggggccagggcacactggtgaccgtgtccagc

SEQ ID NO: 534 - DNA, 747 bp, Artificial Sequence
  Synthetic Polynucleotide
gacatcgtgatgacccagagccccgatagcctggccgtgtctctgggagagagagccaccatcaactgcgagagcagccagagcctgctgaacagcggcaaccagaagaactacctgacctggtatcagcagaagcccggccagccccccaagcccctgatctattgggccagcaccagagaaagcggcgtgcccgatagattcagcggcagcggaagcggcaccgacttcaccctgaccatcagttctcttcaggccgaggacgtggccgtgtactactgccagaacgactacagctacccctacaccttcggccagggcaccaagctggaaatcaagagaggcggaggcggaagtggaggcggaggatctggcggcggaggctctgaagtgcagctggtgcagtctggggccgaagtgaagaagcctggcgagagcctgaagatcagctgcaagggcagcggctacagcttcaccgactactacatgaagtgggccagacagatgcccggcaagggcctggaatggatgggcgacatcatccccagcaacggggccaccttctacaaccagaaattcaagggccaagtgaccatctccgccgacaagagcatcagcaccacctacctccagtggtccagcctgaaggccagcgacaccgccatgtactattgcgccagaagccatctgctgcgggccagttggttcgcctattggggccagggaacaatggtcacagtgtccagc

SEQ ID NO: 535 - DNA, 732 bp, Artificial Sequence
  Synthetic Polynucleotide
gacatccagatgacccagtctaccagttccctgagtgcatccctcggagacagggtgacgatcagttgcagcgcaagccaagggatcaataactatctgaactggtatcagcagaaaccggacggaacagtcgaactcctgatttattacaccagcacccttcagagtggcgtcccttcccggttcagtggctccggaagcgggaccgattactccctgaccatttctaatctggagccagaggacataggaacgtattattgccagcagtatagtaaactgccacgaacttttggaggggggacgaaactggagatcaaaggcggaggcggaagtggaggcggaggatctggcggcggaggctctcaggtgcaactccagcagtccggaagcgagcttatgatgccaggggcatcagtgaagatcagctgcaaggctactggctacaccttctctaattactggatagagtgggttaaacaaaggccagggcacggcctggaatggatcggcgagatcctgcctgggacaggccgaaccatttataacgagaagttcaaaggcaaggctactttcaccgcagatataagctctaatacagtgcaaatgcagctctcttccctgacaagtgaggatagtgccgtgtattattgcgcacgaagagattactatggaaatttttattacgctatggattattggggtcaaggaacaagtgtgaccgttagcagc

SEQ ID NO: 536 - DNA, 717 bp, Artificial Sequence
  Synthetic Polynucleotide
gacatccagatgacccagagccctgccagcctgtccgtgtctgtgggcgagacagtgaccatcacctgtcgggccagcgagaacatctacagcaacctggcctggtatcagcagaagcagggcaagagcccccaactgctggtgtacgccgccaccaatctggccgatggcgtgcccagcagattttccggctctggcagcggcacccagtacagcctgaagatcaacagcctccagagcgaggacttcggcagctactactgccagcacttctggggcacctggacctttggaggaggcaccaccctggaaatcaagggcggaggcggaagtggaggcggaggatctggcggcggaggctctgaagtgcaactccagcagagcggccctgagcttgtgaagcctggcgcttccgtgaagatgagctgcaaggccagcggctacaccttcaccgactactacatgaagtggatgaagcagagccacggcaagtccctggaatggatcggcgacatcaaccccaacaacggcggcaccacctacaaccagaagttcaagggcaaggccaccctgaccgtggacaagagcagcagcaccgcctacatgcaactgaacagcctgaccagcgaggacagcgccgtgtactactgcgccagagactacggctacggctatttcgactactggggccagggcacaaccctgacagtgtcctct

SEQ ID NO: 537 - DNA, 729 bp, Artificial Sequence
  Synthetic Polynucleotide
gacgagatcgtgctgacacagagccccgccaccctgtcactgtctccaggcgaaagagccaccctgagctgtagcgccagcagcagcgtgtcctacatgcactggtatcagcagaagcccggccaggcccccagactgctgatctacgataccagcaagctggcctccggcatccccgccagattttctggcagcggctccggcaccgacttcaccctgacaatcagcagcctggaacccgaggacgtggccgtgtactactgttttcaaggcagcgtgtaccccttcaccttcggccagggcaccaagctggaaatcaagagaggtggcggtggctcgggcggtggtgggtcgggtggcggcggatctcaggtgcagctccaggaatctggccctggcctcgtgaagcctagccagaccctgagcctgacctgtaccgtgtctggcggcagcatcagcacaagcggcatgggcgtgggctggatcagacagcaccctggcaagggcctggaatggatcggccacatttggtgggacgacgacaagcggtacaaccccgccctgaagtccagagtgaccatcagcgtggacaccagcaagaaccagttcagcctgaagctgagcagcgtgacagccgccgataccgccgtgtattattgcgcccggatggaactgtggtcctactacttcgactactggggccagggaaccctcgtgaccgtgtctagt

SEQ ID NO: 538 - DNA, 726 bp, Artificial Sequence
  Synthetic Polynucleotide
gacatccagatgacacagactacatcctccctgtctgcctctctgggagacagagtcaccatcagttgcagggcaagtcaggacattagtaaatatttaaattggtatcagcagaaaccagatggaactgttaaactcctgatctaccatacatcaagattacactcaggagtcccatcaaggttcagtggcagtgggtctggaacagattattctctcaccattagcaacctggagcaagaagatattgccacttacttttgccaacagggtaatacgcttccgtacacgttcggaggggggaccaagctggagatcacaggtggcggtggctcgggcggtggtgggtcgggtggcggcggatctgaggtgaaactgcaggagtcaggacctggcctggtggcgccctcacagagcctgtccgtcacatgcactgtctcaggggtctcattacccgactatggtgtaagctggattcgccagcctccacgaaagggtctggagtggctgggagtaatatggggtagtgaaaccacatactataattcagctctcaaatccagactgaccatcatcaaggacaactccaagagccaagttttcttaaaaatgaacagtctgcaaactgatgacacagccatttactactgtgccaaacattattactacggtggtagctatgctatggactactggggtcaaggaacctcagtcaccgtctcctca

SEQ ID NO: 539 - DNA, 726 bp, Artificial Sequence
  Synthetic Polynucleotide
gagatcgtgatgacccagagccctgccaccctgtctctgagccctggcgaaagagccaccctgagctgtagagccagccaggacatcagcaagtacctgaactggtatcagcagaagcccggccaggcccccagactgctgatctaccacaccagcagactgcacagcggcatccccgccagattttctggctctggcagcggcaccgactacaccctgacaatcagcagcctccagcccgaggacttcgccgtgtacttctgtcagcaaggcaacaccctgccctacaccttcggccagggcaccaagctggaaatcaagggcggaggcggaagtggaggcggaggatctggcggcggaggctctcaggtgcaactccaggaatctggccctggcctcgtgaagcccagcgagacactgagcctgacctgtaccgtgtccggcgtgtccctgcctgactatggcgtgtcctggatcagacagccccctggcaagggcctggaatggatcggagtgatttggggcagcgaaaccacctactacaacagctccctgaagtccagagtgaccatctccaaggacaactccaagaaccaggtgtccctgaagctgagcagcgtgacagccgccgacaccgccgtgtattactgcgccaagcactactactacggcggcagctacgctatggactactggggccagggaaccctcgtgaccgtgtctagt

SEQ ID NO: 540 - DNA, 732 bp, Artificial Sequence
  Synthetic Polynucleotide
gagatcgtgctgacacagagccctgccaccctgtctctgagccctggcgaaagagccaccctgagctgtagagccagccagagcgtgtccagctacctggcctggtatcagcagaagcccggccaggctccccggctgctgatctacgatgccagcaatagagccaccggcatccccgccagattttccggctctggcagcggcaccgacttcaccctgaccatcagctccctggaacccgaggacttcgccgtgtactactgccagcagcggagcaactggcccatcacattcggccagggcacccggctggaaatcaaaggcggaggcggaagtggaggcggaggatctggcggcggaggctctgaagtgcagctggtggaatcaggcggcggactggtgcagcctggcagaagcctgagactgagctgtgccgccagcggcttcaccttcaacgactacgccatgcactgggtgcgccaggcccctggaaaaggactggaatgggtgtccacaatcagctggaacagcggcagcatcggctacgccgatagcgtgaagggccggttcaccatcagccgggacaacgccaagaagtccctgtacctccagatgaacagcctgcgggccgaggacacagccctgtactattgcgccaaggacatccagtacggcaactactactacggcatggacgtgtggggccagggaaccaccgtgaccgtgtcatct

SEQ ID NO: 541 - DNA, 741 bp, Artificial Sequence
  Synthetic Polynucleotide
gacatcgtgatgacccagacccccctgagcctgcctgtgacacctggcgagcctgccagcatctcctgcagaagcagcaagagcctgctgcacagcaacggcatcacctacctgtactggtatctgcagaaacccggccagagcccccaactgctgatctaccagatgagcaacctggtgtccggcgtgcccgacagattttctggcagcggctccggcaccgacttcaccctgaagatcagccgggtggaagccgaggacgtgggcgtgtactactgcgcccagaacctggaactgccctacacctttggcggcggaacaaaggtggaaatcaagcggggcggaggcggaagtggaggcggaggatctggcggcggaggctctcaggtgcaactggtgcagagcggagccgaagtgaaaaagcccggcagcagcgtgaaggtgtcctgcaaggccagcggctacgccttcagctactcctggatcaactgggtgcgccaggcccctggacagggcctggaatggatgggcagaatcttccccggcgacggcgacaccgactacaacggcaagttcaagggcagagtgaccatcaccgccgacaagagcaccagcaccgcctacatggaactgagcagcctgcggagcgaggataccgccgtgtactattgtgccagaaacgtgttcgacggctactggctggtgtactggggccagggaacacttgtgaccgtgtccagc

SEQ ID NO: 542 - DNA, 744 bp, Artificial Sequence
  Synthetic Polynucleotide
gacatccagatgacccagagccccagcagcctgtctgccagcgtgggcgacagagtgaccatcacctgtcggagcagccagagcatcgtgcactccgtgggcaacaccttcctggaatggtatcagcagaagcccggcaaggcccccaagctgctgatctacaaggtgtccaacagattcagcggcgtgcccagcaggtttagcggctctggcagcggcaccgacttcaccctgaccatctctagcctccagcccgaggacttcgccacctactactgttttcaaggcagccagttcccctacaccttcggccagggaacaaaggtggaaatcaagcggggcggaggcggaagtggaggcggaggatctggcggcggaggctctgaagtgcaactggtggaaagcggaggcggcctggtgcagcctggcggatctctgagactgagctgtgccgccagcggctacgagttcagccggtcctggatgaactgggtgcgccaggcccctggcaagggactggaatgggtgggaagaatctaccccggcgacggcgacaccaactacagcggcaagttcaagggccggttcaccatcagcgccgacaccagcaagaacaccgcctacctccagatgaacagcctgcgggccgaggataccgccgtgtactactgtgccagagatggcagctcctgggactggtacttcgacgtgtggggacagggaacccttgtgaccgtgtccagc

SEQ ID NO: 543 - DNA, 726 bp, Artificial Sequence
  Synthetic Polynucleotide
gagatcgtgctgacacagagccctggcaccctgagcctgtctccaggcgaaagagccacactgagctgtcgggcctctcagagcgtgggaggctacctggcttggtatcagcagaagccaggccaggcccccagactgctgatctacgacgccagcaatcgggccacaggcatccccgccagattttctggcagcggctccggcaccgacttcaccctgacaatcagcagcctggaacccgaggacttcgccgtgtactactgccagcagcggaacaactggccccccatgtacacattcggccagggcaccaagctggaaatcaagagaggcggaggcggaagtggaggcggaggatctggcggcggaggctctcaggtgcaactggtgcagagcggagccgaagtgaagaaacccggcagcagcgtgaaggtgtcctgcaaggcttccggcggcaccttcagcagctacgccatttcttgggtgcgccaggctcctggacagggcctggaatggatgggcggcatcatccctatcctgggcaccgccaactacgcccagaaattccagggcagagtgaccatcaccgccgacgagagcaccagcaccgcctacatggaactgagcagcctgcggagcgaggacacagccgtgtattattgcgccagatggggcggaggggccttcgacatttggggccagggaacaatggtcaccgtgtccagc

SEQ ID NO: 544 - DNA, 717 bp, Artificial Sequence
  Synthetic Polynucleotide
gacatccagatgacccagagccccgccaccatcgagaacacaagcctgtctgccagcgtgggcgacagagtgaccatcacctgtagagccagccagggcatcagctcttggctgacctggtatcagcagaagcccgagaaggcccccaagagcctgatctacgccgccagctctctgcagtctggcgtgcccagcagattttccggcagcggctctggcaccgacttcaccctgacaatcagcagcctgcagcccgaggacttcgccacctactactgccagcagtacgacagctaccccatcaccttcggccagggcacccggctggaaatcaagggcggaggcggaagtggaggcggaggatctggcggcggaggctctcaggtgcaactgcagcagtggggagccggactgctgaagcctagcgagacactgagcctgacctgcgccgtgtacggcggcagcttcagcgcctactattggagctggatcagacagccccctggcaagggcctggaatggatcggcgacatcaatcacggcggaggcaccaactacaaccccagcctgaagtcccgcgtgaccatctccgtggacaccagcaagaaccagttctccctgaagctgaacagcgtgacagccgccgacacagccgtgtactactgtgccagcctgaccgcctattggggccagggatctcttgtgaccgtgtccagc

SEQ ID NO: 545 - DNA, 729 bp, Artificial Sequence
  Synthetic Polynucleotide
gagatcgtgctgacccagagccctgatagcctggccgtgtctctgggcgagagagccaccatcaactgcaaggccagccagagcgtggacttcgacggcgacagctacctgaactggtatcagcagaagcccggccagccccccaaggtgctgatctatgccgccagcacactgcagagcggcgtgcccagcagattttctggcagcggctccggcaccgacttcaccctgaccatcaacagcctggaagccgaggacgccgccacctactactgccagcagagcaacgaggacccctggacctttggcggcggaacaaaggtggaaatcaagggcggaggcggaagtggaggcggaggatctggcggcggaggctctcaggtgcaactggtgcagtccggcgctgaagtgaagaaacctggggccagcgtgaaggtgtcctgcaaggtgtccggctacacctttaccgactactacattacctgggtgcgccaggcccctggacaggccctggaatggatgggctggatctaccccggcagcggcaacaccaagtacagccagaagttccagggcagattcgtgttcagcgtggacaccagcgccagcaccgcctacctgcaactgtctagcctgaaggccgaagataccgccgtgtactactgcgccaactacggcaactattggttcgcctattggggccagggaacccttgtgaccgtgtcctct

SEQ ID NO: 546 - DNA, 723 bp, Artificial Sequence
  Synthetic Polynucleotide
gacatccagatgacccagagccccagcagcctgtctgccagcgtgggcgacagagtgaccatcacctgtagagccagccagggcatcagctcttggctggcctggtatcagcagaagcccgagaaggcccccaagagcctgatctacgccgcctctagtctccagagcggcgtgcccagcagattttctggcagcggctccggcaccgacttcaccctgacaatcagctccctccagcccgaggacttcgccacctactactgccagcagtacaacagctaccctcccacctttggcggaggcaccaaggtggaaatcaagggcggaggcggaagtggaggcggaggatctggcggcggaggctctgaagtgcaactggtgcagtctggcggagggctggtgcatcctgggggaagcctgagactgagctgtgccggctctggcttcgccttcagcagcagcaccatgcactggatcagacaggcccctggcaagggcctggaatggatcagcctgatcggaagcggagggggcatctactacggcgacagcgtgaagggccggttcaccatcagccgggacaacgccaagaacagcctgtacctccagatgaactccctgcgggccgaggacatggccgtgtactattgtgtgcggggctacttcgactgggtggactacttcgattactggggccagggcaccctcgtgaccgtgtcatct

SEQ ID NO: 547 - DNA, 741 bp, Artificial Sequence
  Synthetic Polynucleotide
gacgtcgtgatgacccagagccctctgagcctgcctgtgacactgggacagcctgccagcatctcctgtcggagcagccagagcatcgtgcacagcgacggcaacacctacctggaatggtatcagcagcggccaggccagagccccagacggctgatctacaaggtgtccaacagattcagcggcgtgcccgacagattctccggcagcggctctggcaccgacttcaccctgaagatcagcagagtggaagccgaggacgtgggcgtgtactactgttttcaaggcagccacgccccctggacctttggcggaggaacaaaggtggaaatcaagggcggaggcggaagtggaggcggaggatctggcggcggaggctctgaagtgcaactggtggaatcaggcggcggactggtgcagcctggcggatctctgagactgagctgtgccgccagcggcttcaccttcagcagctacggaatgcactgggtgcgccaggcccctggcaaaggactggaatgggtggcctacatcaccaccagaagcagcaccatctactacgccgacagcgtgaagggccggttcaccatctccagagacaacgccaagaacagcctgtacctccagatgaactccctgcgggccgaggacaccgccgtgtactattgcaccagagagcccctgaccggctactacgctatggactattggggccagggcaccagcgtgaccgtgtctagt

SEQ ID NO: 548 - DNA, 711 bp, Artificial Sequence
  Synthetic Polynucleotide
cagatcgtgctgacacagagccctgccctgatgagcgccagccctggcgagaaagtgaccatgacctgtagcgccagcagcagcgtgcgctacatgtactggtatcagcagaagcccagaagcagccccaagccctggattcacctgaccagcaatctggcctctggcgtgcccgctagattttccggctctggcagcggcaccagctacagcctgaccatcagcagcatggaagccgaggacgccgccacctactactgccagcagtggtccagccaccccttcacatttggctccggcaccaagctggaaatcaagggcggaggcggaagtggaggcggaggatctggcggcggaggctctgatgtgcaactccaggaaagcggccctggccttgtgaagcctagccagagcctgtccctgacctgtaccgtgaccggcttcagcatcaccagcgactactcttggaactggatcagacagttccctggcaacaaactggaatggatgggctacatcagctactccggccacacctcctacaaccccagcctggaaagccggatctccatcaccagagacaccagcaagaaccagttcttcttgcaactgaacagcgtgaccaccgaggataccgccacatattactgtaccagaggcaactgggacgtggtgtactggggccagggcacacttgtgaccgtgtctgct

SEQ ID NO: 549 - DNA, 738 bp, Artificial Sequence
  Synthetic Polynucleotide
gagatcgtgctgacacagagccctggaagcctggccgtgtctcctggcgagcgcgtgacaatgagctgcaagagcagccagagcgtgttcttcagcagctcccagaagaactacctggcctggtatcagcagatccccggccagagccccagactgctgatctactgggccagcaccagagaaagcggcgtgcccgatagattcaccggcagcggctctggcaccgacttcaccctgacaatcagcagcgtgcagcccgaggacctggctatctactactgccaccagtacctgagcagccggaccttcggccagggcaccaagctggaaatcaagagaggcggaggcggaagtggaggcggaggatctggcggcggaggctctcaggtgcaactgcagcagcctggcgctgaggtcgtgaagccaggcgcttccgtgaagatgtcctgcaaggccagcggctacaccttcaccagctactacatccactggatcaagcagacccctggacagggcctggaatgggtgggagtgatctaccccggcaacgacgacatcagctacaaccagaagttccagggcaaggccaccctgaccgccgacaagtctagcaccaccgcctacatgcaactgtccagcctgaccagcgaggacagcgccgtgtactactgcgccagagaagtgcggctgcggtacttcgatgtgtggggccagggaaccaccgtgaccgtgtcatct

SEQ ID NO: 550 - DNA, 750 bp, Artificial Sequence
  Synthetic Polynucleotide
gacatcgtgatgacacagtcaccagatagcctcaccgtctccctgggggagcggaccaccattaattgtaaatccagccaaagcgtgctggactcaagcaagaacaagaatagcctcgcctggtatcagcagaagcccggtcagcctccaaagctgctgctttcttgggcctccaccagagagtccgggattcctgataggtttagtggttcaggctccggcacagattttactctgaccattgattctctccagccagaggattctgcaacttattactgccagcaaagcgcccactttcctataacttttggccagggaacccgacttgaaatcaagggcggaggcggaagtggaggcggaggatctggcggcggaggctctcaggtgcagctggtgcagagcggtgccgaagtgaagaaaccaggtgcatccgttaaagtttcatgtaaggctagtggatataccttcaccaattacggaatgaactgggtgaaacaggcccctggccagggactgaagtggatggggtggattaacacctacaccggggagccgacttatgcagacgactttaaggggcgggtcacgatgacctccgacacctccaccagtaccgcctacctggagctgcacaaccttaggtcagacgataccgccgtgtattactgtgcccgatggtcttggtccgacggatactatgtctacttcgactattggggccaggggaccacagttaccgtgtcctct

SEQ ID NO: 551 - DNA, 750 bp, Artificial Sequence
  Synthetic Polynucleotide
gatgtgctgctgacccagagccctctgagcctgcctgtgacactgggacagcctgccagcatctcctgtcggagcagccagaccatcgtgcacagcaacggcaacacctacctggaatggttccagcagcggccaggccagagccccagactgctgatctaccaggtgtccaacagattcagcggcgtgcccgacagattctccggcagcggctctggcaccgacttcaccctgaagatcagccgggtggaagccgaggacgtgggcgtgtactactgttttcaaggcagccacgtgccccggacctttggcggaggaacaaaggtggaaatcaagagaggcggaggcggaagtggaggcggaggatctggcggcggaggctctcagatccaactggtgcagagcggcagcgagctgaagaaacctggggccagcgtgaaggtgtcctgcaaggccagcggctacacctttaccaactacggcatgaactgggtgcgccaggcccctggacagggcctgaaatggatgggctggatcaacaccaacaccggcgagcctaagtacgccgaagagttcaagggcagattcgccctgagcctggacaccagcgtgtccacagcctacctccagatcaacagcctgaaggccgaggataccgccgtgtacttctgcgccagaggctacggcaactacgccagaggggcttggctggcctattggggccagggaacactcgtgaccgtgtcctct

SEQ ID NO: 552 - DNA, 735 bp, Artificial Sequence
  Synthetic Polynucleotide
gaccacatcgtgctgacccagagccctagcagcctgtctgccagcctgggcgacagagtgaccatcagctgtagagccagccaggacatcagcacctacctgaactggtatcagcagaaacccgacggcaccgtgaagctgctgatcttctacaccagcagactgcacgccggggtgcccagcagattttctggcagcggctctggcacccaccacagcctgaccatctccaacctggaacaggaagatattgctacctacttctgtcagcaaggcaacagcctgcccttcaccttcggcagcggcaccaagctggaaatcaagagaggcggaggcggaagtggaggcggaggatctggcggcggaggctctcaggtgcagctgaaagagagcggccctgagctggaaaagcctggggccagcgtgaagattagctgcaaggccagcggctacagcttcaccgcctacagcatgaactgggtcaagcagaacaacggcatgagcctggaatggatcggcagcatcgacccctactacggcgacaccaaatacgcccagaagttcaagggcaaggccaccctgaccgtggataaggccagcagcaccgcctacctccagctgaagtctctgaccagcgaggacagcgccgtgtactactgcgccagacggatgattaccaccggcgactggtacttcgacgtgtggggagccggaaccaccgtgacagtgtctagc

SEQ ID NO: 553 - DNA, 735 bp, Artificial Sequence; identical to SEQ ID NO: 552
  Synthetic Polynucleotide

SEQ ID NO: 554 - DNA, 735 bp, Artificial Sequence
  Synthetic Polynucleotide
gacatcgtgatgacccagagccccgatagcctggccgtgtctctgggagagagagccaccatcaactgccgggccagcaagagcgtgtccaccagcggctacagcttcatgcactggtatcagcagaagcccggccagccccccaagctgctgatctacctggcctccaacctggaaagcggcgtgcccgatagattcagcggcagcggctctggcaccgacttcaccctgaccatcagttctcttcaggccgaggacgtggccgtgtactactgccagcacagcagagaggtgccctggacattcggccagggcacaaaggtggaaatcaagcggggcggaggcggaagtggaggcggaggatctggcggcggaggctctcaggtgcagctggtgcagtctggggccgaagtgaagaaacctggggccagcgtgaaggtgtcctgcaaggccagcggatacacctttaccaactacggcatgaactgggtgcgccaggcccctggacagggcctggaatggatgggctggatcaacacctacaccggcgagcccacatacgccgacgccttcaagggcagattcgccttcagcctggacaccagcacctccaccgcctacctccagatcaacagcctgcggagcgacgacaccgccgtgtattattgcgccagagattacggcgactacgggatggactattggggccagggaaccaccgtgaccgtgtcctct

SEQ ID NO: 555 - DNA, 723 bp, Artificial Sequence
  Synthetic Polynucleotide
gacatcgtgatgacccagacccccctgaccctgagcgtgacaatcggacagcctgccagcatctcctgcaagagcagccagagcctgctggacagcgacggcaagacctacctgaactggctgctgcagaggccaggccagagccccgagagactgatctacctggtgtccaagctggactccggcgtgcccgatagattcacaggcagcggctccggcaccgacttcaccctgaagatcagccgggtggaagccgaggacctgggcgtgtactgttgttggcagggcacccacttcccttacaccttcggcggagggaccaaggtggaaatcaagggcggcggaggcggaagtggaggcggaggatctggcggcggaggctctcaggtgcaactgcagcagcctggcgctgaacttgtgcggccaggcgcctctgtgaagctgagctgtaaagccagcggctacaccttcaccagctactggatgaactgggtcaagcagcgcccaggccagggcctggaatggatcggaatgatcgaccccagcgacagcgagacacactacaaccacatcttcaaggacaaggccaccctgaccgtggacaagtccagcagcacagcctacctgcaactgtccagcctgaccagcgaggacagcgccgtgtactactgcgcccggaacctgtatctgtggggccagggaacaagcgtgaccgtgtctagc

SEQ ID NO: 556 - DNA, 732 bp, Artificial Sequence
  Synthetic Polynucleotide
gacatccagttgacccagtcccccagctcactcagcgccagtgtgggggaccgggtgaccattacctgtaaagccagtcagagtgtggactatgagggggatagcttcctgaattggtatcagcagaagcctggcaaagccccaaagctgctgatctacgctgcatctaatctggagtcaggcgtgccttctaggttctccggtagtgggtctgggaccgatttcacattgaccatttcatccctccaacccgaggatttcgctacatattactgtcagcagtccaatgaggaccctctcacctttggccagggcaccaaagttgaaattaagagaggcggaggcggaagtggaggcggaggatctggcggcggaggctctgaagtccaacttgtggagtctggagggggcctggtgcagcccggcggctctctcagactgtcttgtgcggcaagcggctacaccttcagctcttactggatagaatgggtgaggcaggcacctggaaagggactggagtggattggagagattctgccaggagggggagatacaaattacaatgaaatcttcaaggggcgggccaccttttcagcggataccagcaagaatacagcttacctgcagatgaatagcctccgggcagaagataccgctgtttattattgcacgagacgggtgccaataagactggactattgggggcaagggactcttgtcaccgtcagttca

SEQ ID NO: 557 - DNA, 756 bp, Artificial Sequence
  Synthetic Polynucleotide
gacatcgtgatgagccagagccctagcagcctggccgtgtccgtgggcgagaaagtgaccatgagctgcaagagcagccagtccctgctgcacagcagcaaccagaagaactacctggcctggtatcagcagaagcccggccagtcccccaaggtgctgatctactgggccagcaccagagaaagcggcgtgcccgatagattcaccggcagcggctctggcaccgacttcaccctgaccatcaccagcgtgaagtccgaggacctggctgtgtactactgccagcagtattacagctacccctggaccttcggcggaggcacccggctggaaatcaaaagaggcggaggcggaagtggaggcggaggatctggcggcggaggctctgaagtgcaactccagcagagcgtggccgagcttgtgaagcctggcgcttccgtgaagatgtcctgcaaggtgtccggctacaccctgacagaccacaccatccactggatgaagcagcggcctgagcagggcctggaatggatcggctacatctaccccagggacggcatcaccggctacaacgagaagttcaagggcaaggccacactgaccgccgacaccagcagcagcacagcctacatgcaactgaacagcctgaccagcgaggacagcgccgtgtacttctgtgccagatggggctacagctacagaaactacgcctactactacgactactggggccagggcacaaccctgaccgtgtctagt

SEQ ID NO: 558 - DNA, 747 bp, Artificial Sequence
  Synthetic Polynucleotide
gagatcgtgctgacacagagccctggcaccctgagcctgtctccaggcgaaagagccacactgagctgtcgggccagccagagcgtgtccagctcttacctggcctggtatcagcagaagcccggccaggctccccggctgctgatctacggaacaagcagcagagccaccggcatccccgacagattttctggcagcggctccggcaccgacttcaccctgacaatcagcagactggaacccgaggacttcgccgtgtactactgccagcagtacggcagcagccccttcacctttggcggaggcaccaaggtggaaatcaagagaggcggaggcggaagtggaggcggaggatctggcggcggaggctctcaggtgcaactccaggaatctggccccggactggctaagcccagcgagacactgagcctgacctgtaccgtgtccggcgacagcatcaccagctactactggtcctggatcagacagccccctggcaagggcctggaatggatcggctacatctactacagcggcagcaccaactacaaccccagcctgaagtccagagtgaccatcagcgtggacaccagcaagaaccagttctccctgaagctgagcagcgtgacagccgccgacaccgccgtgtattattgcgccagagatcagcggagaatcgccgctgccggcacccacttttacggcatggatgtgtggggccagggcaccaccgtgaccgtgtcatct

SEQ ID NO: 559 - DNA, 717 bp, Artificial Sequence
  Synthetic Polynucleotide
gacatccagatgacccagagccccagcagcctgtctgccagcgtgggcgacagagtgaccatcacctgtagagccagccagagcatcagcctgtggctgaactggtatcagcagaagcccggcaaggcccccaagctgctgatctacgccgccagcacactccagagcggcgtgccaagcagattttccggcagcggctccggcaccgacttcaccctgacaatcagctccctccagcccgaggacttcgccacctactactgccagcagtactacaccagcccctacaccttcggccagggcaccaaggtggaaatcaagagaggcggaggcggaagtggaggcggaggatctggcggcggaggctctcaggtgcaactgctggaatctggcggcggactggtgcagcctggcggatctctgagactgagctgtgccgccagcggcttcaccttcagcagctacgccatgagctgggtgcgccaggcccctggaaaaggactggaatgggtgtccgtgatccggtccagcggcagcagcacctattacgccgatagcgtgaagggccggttcaccatcagccgggacaacagcaagaacaccctgtacctccagatgaacagcctgcgggccgaggacaccgccgtgtactattgtgctaggggaggcggctacttcgactactggggccagggaacactcgtgaccgtgtcctct

SEQ ID NO: 560 - DNA, 726 bp, Artificial Sequence
  Synthetic Polynucleotide
gacatccagatgacccagagccccagcagcctgtctgccagcgtgggcgacagagtgaccatcacctgtagagccagccagagcatcagcagctacctgaactggtatcagcagaagcccggcaaggcccccaaactgctgatctacgccgtgtccacactccagagcggcgtgcccagcagattttctggcagcggctccggcaccgacttcaccctgacaatcagctccctccagcccgaggacttcgccacctactactgtcagcagagcggcaccttccctcccaccacatttggacagggcaccaaggtggaaatcaagagaggcggaggcggaagtggaggcggaggatctggcggcggaggctctcaggtgcaactgctggaatctggcggcggactggtgcagcctggcggatctctgagactgagctgtgccgccagcggcttcaccttcagcagccacggaatgcactgggtgcgccaggcccctggaaagggactggaatgggtgtccgtgatctccggcagcggcagcaataccggctacgccgatagcgtgaagggccggttcaccatcagccgggacaacagcaagaacaccctgtacctccagatgaacagcctgcgggccgaggacaccgccgtgtactattgtgccagacagtggggcagctacgccttcgattcttggggccagggcaccctcgtgaccgtgtcatct

SEQ ID NO: 561 - DNA, 702 bp, Artificial Sequence
  Synthetic Polynucleotide
atgacccagagccccaagttcctgctggtgtctgccggcgacagagtgaccctgacatgcaaggccagccagagcgtgaacaacgacgtgtactggtatcagcaggaacccggccagtcccccaagctgctgatctactgggccagcaccagagaaagcggcgtgcccgatagattcaccggcagcggctctggcaccgacttcaccctgacaatcagcagcgtgcaggccgaggacctggccgtgtactactgcaagcagagctacaacctgtacaccttcggcggaggcaccaagctggaaatcaagagaggcggcggaggatctggcggaggcggatctgggggcggaggctctgaatctggaagaggactggtgcagcctggcggcagcagaaagctgtcttgtgccgccagcggcttcaccttcagcaccagcggaatgcactgggtgcgccaggcccctgagaagggactggaatgggtggcctacatcagctccggcagcaccaccatctaccacgccgataccgtgaagggccggttcaccatcagccgggacaaccccaagaataccctgttcctccagatgaccagcctgcggagcgaggacaccgccatgtactattgctgcgccagaagcggccagttcggcaactacttcgactactggggccagggcaccaccctgaccgtgtcatct

SEQ ID NO: 562 - DNA, 717 bp, Artificial Sequence
  Synthetic Polynucleotide
cagagcccatctagcctggctgtgtctgccggcgagaaagtgaccatgagctgcaagagcagccagagcctgctgaacagccggacccggaagaactacctggcctggtatcagcagaagcccggccagagccccaagctgctgatctactgggccagcaccagagaaagcggcgtgcccgatagattcaccggctctggcagcggcaccgacttcaccctgacaatcagcagcgtgcaggccgaggacctggccgtgtactactgcaagcagagcaacctgtacaccttcggcggaggcaccaagctggaaatcaagggcggaggcggaagtggaggcggaggatctggcggcggaggctctcaggtgcagctggaagagtctggacccgagcttgtgaagcctggggccagcgtgaagctgtcctgtaaagccagcggctacaccttcaccgagtacatcatccactgggtcaagcagcggagcggccagggcctggaatggatcggctggttttaccctggctccggcagcatcaagtacaacgagaagttcaaggacaaggccaccctgaccgccgacaagtccagcagcaccgtgtacatggaactgagcggcctgaccagcgaggacagcgccgtgtatttctgcgccagacacgacggctacagctacttcgactattggggccagggcaccacactgaccgtgtcctct

SEQ ID NO: 563 - DNA, 726 bp, Artificial Sequence
  Synthetic Polynucleotide
gacatccagatgacccagagccccagcagcctgtctgcctctctgggcgagagagtgtccctgacctgtcgggccacacaggaactgagcggctacctgtcttggctgcagcagaagcccgacggcaccatcaagcggctgatctacgccgccagcaccctggatagcggcgtgcccaagagattcagcggcaacagaagcggcagcgactacagcctgaccatcagctccctggaaagcgaggacttcgccgactactactgcctgcagtacgccatctacccctacaccttcggcggaggcaccaagctggaaatcaagggcggaggcggaagtggaggcggaggatctggcggcggaggctctgaggtgcaactgcagcagtctggccccgagcttgtgaagcctggcgcctccgtgaagatgagctgcaaggccagcggctacacctttaccagctacttcatccactgggtcaagcagaaacccggccagggcctggaatggatcggcttcatcaacccttacaacgacggcagcaagtacaacgagaagttcaagggcaaggccaccctgaccagcgacaagagcagcagcaccgcctacatggaactgtccagcctgacatccgaggacagcgccgtgtactactgcaccagggacgacggctactacggctacgccatggactactggggccagggaacaagcgtcaccgtgtcctct

SEQ ID NO: 564 - DNA, 741 bp, Artificial Sequence
  Synthetic Polynucleotide
gacaccatcgtgctgacacagagccctgcttccctggccgtgtccctgggacagagagccaccatctcttgcagagccagcgagagcgtggacagctacggcaacagcttcatgcactggtatcagcagaagcccggccagccccccaagctgctgatctacctggcctccaacctggaaagcggcgtgcccgccagattttctggcagcggcagcagaaccgacttcaccctgaccatcgaccccgtggaagccgatgatgccgccacctactactgccagcagaacaactacgacccctggaccttcggcggaggcaccaagctggaaatcaagggcggaggcggaagtggaggcggaggatctggcggcggaggctctgaagtgcaactccagcagagcggccctgagcttgtgaagcctggcgcttccgtgaagatgagctgcaaggccagcggctacaccttcaccagctacgtgatgcactgggtcaagcagaaacctggacagggcctggaatggatcggctacatcaacccctacaacgacggcaccaagtacaacgagaagttcaagggcaaggccaccctgacaagcgacaccagcagcagcaccgcctacatggaactgaacagcctgaccagcgaggacagcgccgtgtacttctgcgccagacccatctacttcgacaacgactacttcgattactggggccagggcaccaccctgaaggtgtcctct

SEQ ID NO: 565 - DNA, 723 bp, Artificial Sequence
  Synthetic Polynucleotide
gacatccagatgacccagagccccagcagcctgtctgccagcgtgggcgacagagtgaccatcacatgcaaggccagccaggacgtgggaatcgccgtggcctggtatcagcagaaacccggcaaggtgcccaagctgctgatctactgggccagcaccagacacaccggcgtgcccgatagattttccggcagcggctccggcaccgacttcaccctgacaatcagctccctccagcccgaggacgtggcaacctactactgccagcagtacagcagctacccctacaccttcggccagggcaccaaggtggaaatcaagggcggaggcggaagtggaggcggaggatctggcggcggaggctctgaagtgcaactggtggaatcaggcggcggactggtgcagcctggcggatctctgagactgagctgtgccgccagcggcttcgacttcagccggtactggatgagctgggtgcgccaggcccctggcaaaggactggaatggatcggcgagatcaaccccgacagcagcaccatcaactacgcccccagcctgaaggacaagttcatcatcagccgggacaacgccaagaacagcctgtacctccagatgaactccctgcgggccgaggacaccgccgtgtactattgcgccagacccgacggcaactactggtacttcgacgtgtggggccagggaaccctcgtgaccgtgtcatct

SEQ ID NO: 566 - DNA, 726 bp, Artificial Sequence
  Synthetic Polynucleotide
gacatcgtgatgacccagagccagaagagcatgagcaccagcgtgggcgacagagtgagcatcacctgcaaggccagccaggacgtgatcaccggcgtggcctggtaccagcagaagcccggccagagccccaagctgctgatctacagcgccagctacagatacaccggcgtgcccgacagattcaccggcagcggcagcggcaccgacttcaccttcaccatcagcaacgtgcaggccgaggacctggccgtgtactactgccagcagcactacagcacccccctgaccttcggcgccggcaccaagctggagctgaagggcggaggcggaagtggaggcggaggatctggcggcggaggctctcaggtgcagctgcagcagcccggcgccgagctggtgagacccggcgccagcgtgaagctgagctgcaaggccagcggctacagcttcaccacctactggatgaactgggtgaagcagagacccggccagggcctggagtggatcggcatgatccaccccagcgacagcgagaccagactgaaccagaagttcaaggacaaggccaccctgaccgtggacaagagcagcagcaccgcctacatgcagctgagcagccccaccagcgaggacagcgccgtgtactactgcgccagaagcaccatgatcgccaccagagccatggactactggggccagggcaccagcgtgaccgtgagcagc

SEQ ID NO: 567 - DNA, 744 bp, Artificial Sequence
  Synthetic Polynucleotide
cagagcgtgctgacacagcctccatccgtgtctggcgctccaggccagagagtgaccatctcctgtaccggcagcggcagcaacatcggagccccctacgacgtgtcctggtatcagcaactgcctggcaccgcccccaagctgctgatctaccacaacaacaagcggcccagcggcgtgcccgatagattcagcggctctaagagcggcaccagcgccagcctggctatcactggactccaggccgaggacgaggccgactactactgtgccacagtggaagccggcctgagcggctctgtgtttggcggcggaacaaagctgaccgtgctgggagctggcggaggcggaagtggaggcggaggatctggcggcggaggctctcaggtgcaactggtgcagagcggagccgaagtgaagaaacctggggccagcgtgaaggtgtcctgcaaggtgtccggctacaccctgaccgagctgagcattcactgggtgcgccaggcccctggcaagggactggaatggatgggcggcttcgaccccgaagagaacgagatcgtgtacgcccagcggttccagggcagagtgacaatgaccgaggacaccagcaccgacaccgcctacatggaactgagcagcctgcggagcgaggataccgccgtgtactactgcgccatcgtgggcagcttcagccctctgacactgggcctgtggggccagggaactatggtcaccgtgtccagc

SEQ ID NO: 568 - DNA, 744 bp, Artificial Sequence
  Synthetic Polynucleotide
cagagcgtgctgacacagcctccatccgtgtctggcgctccaggccagagagtgaccatctcctgtaccggcagcggcagcaacatcggagccccctacgacgtgtcctggtatcagcaactgcctggcaccgcccccaagctgctgatctaccacaacaacaagcggcccagcggcgtgcccgatagattcagcggctctaagagcggcaccagcgccagcctggctatcactggactccaggccgaggacgaggccgactactactgccagagctacgacagcagcagcatcagcaccatcttcggcggaggcaccaagctgacagtgctgggagctggcggaggcggaagtggaggcggaggatctggcggcggaggctctcaggtgcaactggtgcagagcggagccgaagtgaagaaacctggggccagcgtgaaggtgtcctgcaaggtgtccggctacaccctgaccgagctgagcattcactgggtgcgccaggcccctggcaagggactggaatggatgggcggcttcgaccccgaagagaacgagatcgtgtacgcccagcggttccagggcagagtgacaatgaccgaggacaccagcaccgacaccgcctacatggaactgagcagcctgcggagcgaggataccgccgtgtactactgtgccatcgtgggcagcttcagcggaatcgcctacagaccttggggccagggcacaatggtcaccgtgtctagc

SEQ ID NO: 569 - DNA, 738 bp, Artificial Sequence
  Synthetic Polynucleotide
gacatccagatgacccagagccccagcagcctgtctgccagcgtgggcgacagagtgaccatcacctgtagcgccagcagcagcgtgtcctacatgtactggtatcagcagaagcccggcaaggcccccaagctgctgatctacctgaccagcaatctggcctccggcgtgcccagcagattttctggcagcggctccggcaccgacttcaccctgacaatcagctccctccagcccgaggacttcgccacctactactgtcagcagtggcggagcaaccccttcaccttcggccagggcaccaagctggaaatcaagagaggcggaggcggaagtggaggcggaggatctggcggcggaggctctcagatcaccctgaaagagtccggccccaccctcgtgaagcctacccagaccctgacactgacctgcaccttcagcggcttcagcctgagcacaagcggcatgggcgtgggctggatcagacagcctcctggaaaggccctggaatggctggcccacatttggtgggacgacgtgaagcggtacagccccagcctgaagtcccggctgaccattaccaaggacaccagcaagaaccaggtggtgctgaccatgacaaacatggaccccgtggacaccgccacatattactgcgcccggatcgtgtccttcgacaacgacgtggtgtccgctatggactactggggccagggaaccctcgtgaccgtgtctagt

SEQ ID NO: 570 - DNA, 723 bp, Artificial Sequence
  Synthetic Polynucleotide
gagatcgtgatgacccagagccctgccaccctgtccgtgtctccaggcgaaagagccaccctgagctgcaaggcttcccagagcgtgtccaacgacgtcgtgtggtatcagcagaagcccggccaggcccccagactgctgatctactacgccagcaacagatacaccggcatccccgccagattcagcggctctggcagcggcaccgagttcaccctgacaatcagcagcctccagagcgaggacttcgccgtgtactactgtcagcaggactacaccagcccctggaccttcggccagggcaccaagctggaaatcaagagaggcggaggcggaagtggaggcggaggatctggcggcggaggctctcaggtgcaactggtgcagagcggagccgaagtgaagaaacctggggccagcgtgaaggtgtcctgcaaggccagcggctacacctttaccaactacggcatgaactgggtgcgccaggctcctggacagggcctggaatggatgggctggatcaacacctacaccggcgagcccacctacgccgacgacttcaagggcagagtgaccatgaccaccgacaccagcacctccaccgcctacatggaactgcggagcctgagaagcgacgacaccgccgtgtattattgcgcccggatcggcgacagcagccccagcgattattggggccagggaaccctcgtgaccgtgtcctct

SEQ ID NO: 571 - DNA, 723 bp, Artificial Sequence
  Synthetic Polynucleotide
gacatcctgctgacccagagccccgtgatcctgtccgtgtctcctggcgagagagtgtccttcagctgtcgggccagccagagcatcggcaccaacatccactggtatcagcagcggaccaacggcagccccagactgctgattaagtacgccagcgagtccatcagcggcatccccagcagattttccggcagcggctccggcaccgacttcaccctgagcatcaacagcgtggaaagcgaggacattgccgactactactgccagcagaacaacaactggcccaccaccttcggagccggcaccaagctggaactgaagggcggaggcggaagtggaggcggaggatctggcggcggaggctctcaggtgcagctgaagcagagcggacctggcctggtgcagcctagccagagcctgtccatcacctgtaccgtgtccggcttcagcctgaccaactacggcgtgcactgggtgcgccagagccctggaaaaggactggaatggctgggagtgatttggagcggcggcaacaccgactacaacacccccttcaccagcagactgtctatcaacaaggacaacagcaagagccaggtgttcttcaagatgaacagcctccagagcaacgacaccgccatctactactgtgctagagccctgacctactatgactacgagttcgcctactggggccagggcacactcgtgacagtgtctgct

SEQ ID NO: 572 - DNA, 723 bp, Artificial Sequence
  Synthetic Polynucleotide
gagatccagctggtgcagagcggagccgaagtgaagaagcctggcgagagcctgcggatcagctgcaagggcagcggcttcaacatcgaggactactacatccactgggtgcgccagatgcccggcaagggcctggaatggatgggcagaatcgaccccgagaacgacgagactaagtacggccccatcttccagggccacgtgaccatcagcgccgacaccagcatcaacaccgtgtacctccagtggtccagcctgaaggccagcgacaccgccatgtactactgcgcctttagaggcggcgtgtactggggccagggcaccacagtgacagtgtctagcggcggaggcggaagtggaggcggaggatctggcggcggaggctctgatgtcgtgatgacccagagccccgacagcctggctgtgtctctgggagagagagccaccatcaactgcaagtccagccagtccctgctggacagcgacggcaagacctacctgaactggctccagcagaagcccggccagccccccaagagactgatctccctggtgtccaagctggactccggcgtgcccgatagattttccggctctggcagcggcaccgacttcaccctgacaatcagctcccttcaggccgaggacgtggccgtgtactattgctggcagggcacacacttccccggcacctttggcggaggcaccaaggtggaaatcaag

SEQ ID NO: 573 - DNA, 747 bp, Artificial Sequence
  Synthetic Polynucleotide
gagctgcagatgacccagagccctagcagcctgtctgccagcgtgggcgacagagtgaccatcacctgtagagccagccagagcatcagcagctacctgaactggtatcagcagaagcccggccagccccccaaactgctgatctactgggccagcaccagagaaagcggcgtgcccgatagattcagcggcagcgagagcggcaccaactacaccctgaccatcagctccctgcagcccgaggacttcgccacctacttttgccagcagagcgacagcctgcccatcacctttggacagggcacccggctggacattcagggcggaggcggaagtggaggcggaggatctggcggcggaggctctgaggtgcaactgctggaatctgggggcggagtggtgcagcctggcagaagcctgagactgagctgtgccgccagcggcttcaccttcagctcctacggaatgcactgggtgcgccaggcccctggcaaaggactggaatgggtggccgtgatctcctacgacggcagcaacaagtactacgccgacagcgtgaagggccggttcaccatcagccgggacaacagcaagaacaccctgtacctgcagatgaacagcctgcgggccgaggacaccgccgtgtactactgcgccaaggatatgggctggggcagcggctggcggccttactactactacggcatggacgtgtggggccagggcaccaccgtgacagtgtcatct

SEQ ID NO: 574 - DNA, 744 bp, Artificial Sequence
  Synthetic Polynucleotide
gagcttgtgatgacccagagccccagcagcctgacagtgacagccggcgagaaagtgaccatgagctgcaagagcagccagagcctgctgaacagcggcaaccagaagaactacctgacctggtatcagcagaagcccggccagccccccaagctgctgatctactgggccagcaccagagaaagcggcgtgcccgatagattcaccggctctggcagcggcaccgacttcaccctgacaatcagcagcgtgcaggccgaggacctggccgtgtactactgccagaacgactacagctaccccctgaccttcggagccggcaccaagctggaaatcaagggcggaggcggaagtggaggcggaggatctggcggcggaggctctgaagtgcagctgctggaacagtctggcgccgaacttgtgcggcctggcaccagcgtgaagatcagctgtaaagccagcggctacgccttcaccaactactggctgggctgggtcaagcagaggcctggacacggcctggaatggatcggcgacatctttcccggctccggcaacatccactacaacgagaagttcaagggcaaggccaccctgaccgccgacaagtctagcagcaccgcctacatgcagctgtccagcctgacctttgaggacagcgccgtgtatttctgtgcccggctgcggaactgggacgagcccatggattattggggccagggcaccaccgtgaccgtgtctagt

SEQ ID NO: 575 - DNA, 738 bp, Artificial Sequence
  Synthetic Polynucleotide
gacatccaaatgacacagagtccttctagtttgagtgcgagcgtgggggacagggtgaccattacctgcagggccagccagagcataagctcataccttaattggtaccagcaaaaaccaggtaaggcccctaagctcctgatctacgcggcctcttcacttcaatctggggtcccttcccgcttcagtggctccggcagcggcaccgacttcacgctcactatatcaagtctgcagcctgaggatctcgccacctattactgtcaacaaagttattccacccctttcacctttggaccgggcacgaaagtggatattaagggcggaggcggaagtggaggcggaggatctggcggcggaggctctgtgcacgaggtccagcttgtgcagtccggggcagaggtcaagaagcctggttctagcgtaaaagtgagttgcaaagcctcaggtgggacattttcatcctacgcgatcagttgggttagacaggctcctggtcaagggctggaatggatgggcggaattattccaatcttcggaacagcgaattacgcgcagaagttccagggtagagtaaccatcactgctgacaagtccacctccaccgcatacatggaattgtctagtctccggagcgaggatacggcggtgtattattgtgctacgttcgccctgtttggcttccgcgaacaggctttcgacatctgggggcagggcacgacagtcacggttagtagt

SEQ ID NO: 576 - DNA, 720 bp, Artificial Sequence
  Synthetic Polynucleotide
tacatccacgtgacacagagccctagcagcctgtccgtgtccatcggcgatagagtgaccatcaactgccagacctctcaaggcgtgggcagcgacctgcactggtatcagcacaaacctggcagagcccctaagctgctgatccaccatgccagctctgtggaagatggcgtgcccagcagattttccggcaccggatttcacaccagcttcaacctgacaatcaacgacctccaggccgacgacatcggcacctactactgtcaagtgctccagagcttcggcagaggcagcagactggatacaaaaggcggaggcggaagtggaggcggaggatctggcggcggaggctctagggcacacctggtgcagtctggcaccgccatgaagaaacctggcgcttccgtcagagtgtcctgtcagacaagcggctacaccttcacagcccacatcctgttctggttcagacaggccccaggcagaggactggaatgggtcggatggatcaagccccagtacggggccgtgaatttcggcggaggcttcagagacagagtgaccctgaccagggacgtgtaccgggaaatcgcctacatggacatccggggcctgaagcctgatgacaccgccgtgtactactgcgccagggatagaagctacggcgacagctcttgggctctcgatgcttggggacagggcacaacagtggtggtgtctgct

SEQ ID NO: 577 - DNA, 735 bp, Artificial Sequence
  Synthetic Polynucleotide
gacatcgtgctgacccagagccctctgagcctggccgtgtctctgggacagcctgccatcatcagctgcaaggccagccagagcgtgtcctttgccggcacctctctgatgcactggtatcaccagaagcccggccagcagcccagactgctgatctacagagccagcaacctggaagccggcgtgcccgatagattttccggcagcggcagcaagaccgacttcaccctgaccatcagccccgtggaagccgaagatgccgccacctactactgccagcagagcagagagtacccctacaccttcggcggaggcaccaagctggaaatcaagaggggcggaggcggaagtggaggcggaggatctggcggcggaggctctcaggtccaactggtgcagagcggagccgaggtcgtgaagcctggcgcttccgtgaagattagctgcaaagccagcggctacacctttaccggctactttatgaactgggtcaagcagagccctggccagagcctggaatggatcggcagaatccacccctacgacggcgacaccttctacaaccagaagttccagggcaaggccaccctgacagtggacaagagcagcaacaccgcccacatggaactgctgagcctgaccagcgaggacttcgccgtgtactactgcaccagatacgacggcagccgggctatggactattggggccagggcaccaccgtgaccgtgtctagt

SEQ ID NO: 578 - DNA, 723 bp, Artificial Sequence
  Synthetic Polynucleotide
gacgttgtgatgacccagacccccctgagcctgcctgtgacacctggcgaacctgccagcatcagctgtcggagcagccagagcctggtgcacagaaacggcaacacctacctgcactggtatctccagaagcccggccagagccccaagctgctgatccacaaggtgtccaacagattcagcggcgtgcccgacagattctccggcagcggctctggcaccgacttcaccctgaagatcagccgggtggaagccgaggacctgggcgtgtacttctgtagccagagcacccatgtgccccccctgacatttggagccggcaccaagctggaactgaagggcggaggcggaagtggaggcggaggatctggcggcggaggctctgaagtgcagctggtgcagtctggcgctgaggtggaaaagcctggggccagcgtgaagattagctgcaaggccagcggcagcagcttcaccggctacaacatgaactgggtgcgccagaacatcggcaagagcctggaatggatcggagccatcgacccctactacggcggcaccagctacaaccagaagttcaagggcagagccaccctgaccgtggacaagagcaccagcaccgcctacatgcacctgaagtccctgcggagcgaggacaccgccgtgtactactgtgtgtccggcatggaatattggggccagggcaccagcgtgaccgtgtctagt

SEQ ID NO: 579 - DNA, 717 bp, Artificial Sequence
  Synthetic Polynucleotide
gagatcgtgatgacccagacccctgccaccctgtctgtgtctgccggcgagagagtgaccattacctgcaaggccagccagagcgtgtccaacgacgtgacctggtatcagcagaagcccggccaggcccccagactgctgatctacagcgccagcaacagatacagcggcgtgcccgccagattttccggcagcggctacggcaccgagttcaccttcaccatcagcagcgtgcagagcgaggacttcgccgtgtacttctgtcagcaagactacagcagcttcggccagggcaccaagctggaaatcaagaggggcggaggcggaagtggaggcggaggatctggcggcggaggctctcaggtgcagctggtggaatctggacctggcgtggtgcagcctggcagaagcctgagaatcagctgtgccgtgtccggcttcagcgtgaccaactacggcgtgcactgggtgcgccagccacctggaaaaggactggaatggctgggcgtgatctgggctggcggcatcaccaactacaacagcgccttcatgtcccggctgaccatctccaaggacaacagcaagaacaccgtgtacctccagatgaacagcctgcgggccgaggacaccgccatgtactactgtgcttccagaggcggccactacggctacgccctggattattggggccagggaaccctcgtgaccgtgtcctct

SEQ ID NO: 580 - DNA, 726 bp, Artificial Sequence
  Synthetic Polynucleotide
gacatccagatgacccagaccgccagcagcctgcctgcctctctgggcgacagagtgaccatctcctgtagcgccagccaggacatcagcaactacctgaactggtatcagcagaaacccgacggcaccgtgaagctgctgatcttctacagcagcaacctgcacagcggcgtgcccagcagattttctggcggcggaagcggcaccgactacagcctgaccatcagcaatctggaacccgaggacattgccacctacttttgccaccagtacagcaagctgccctggacctttggcggaggcaccaagctggaaatcaagagaggcggaggcggaagtggaggcggaggatctggcggcggaggctctgaagtgaccctggtggaaagcggcggagacttcgtgaagcctggcggctctctgaaggtgtcctgtgccgccagcggcttcgcctttagccactacgccatgagctgggtgcgccagacccctgccaagagactggaatgggtggcctacatcagcagcggcggctccggcacctactactccgatagcgtgaagggccggttcaccatcagccgggacaacgccaagaacaccctgtacctccagatgcggagcctgcggagcgaggacagcgccatgtatttctgcaccagagtgaagctgggcacctattacttcgactcttggggccagggcaccaccctgaccgtgtcatct

SEQ ID NO: 581 - DNA, 732 bp, Artificial Sequence
  Synthetic Polynucleotide
cagttcgtgctgacccagagcccttctgcctctgctgccctgggagcctctgccaagctgacctgtacactgagcagcgcccacaagacctacaccatcgactggtatcagcagcagaagggaaaggcccccagatacctgatccaagtgaagtccgacggcacctacacaaaggccaccggcgtgcccgatagattcagcggcagtagcagcggagccgatagatacctgattatccccagcgtgcaggccgacgacgaggccgattactactgcggcaccgattacaccggcggctacgtgttcggcggaggcacacaactgaccgtgacaggcggaggcggaagtggaggcggaggatctggcggcggaggctctgagcaactgaaagagtctggcggcggactgttcaagcccaccgataccctgaccctgacctgcaccgtgtccggcttcagcctgagctactacggcgtgaactgggtgcgccaggcccctggcaatggcctggaatggatcggcacaatcggcggcagcggcgacacctactatgcctcttgggccaagtccagaagcaccatcatcagaaacaccaacgagaacaccgtgaccctgaagatgaccagcctgacagccgccgacaccgccacctacttttgcgtcagatacgccaacatcggctacgagtatttcaacgtgtggggacccggcaccctcgtgaccgtgtcatct

SEQ ID NO: 582 - DNA, 729 bp, Artificial Sequence
  Synthetic Polynucleotide
gacatccagatgacccagagccccagcagcctgtctgccagcgtgggcgacagagtgaccatcacctgtagagccagccagggcatcagctcttggctggcctggtatcagcagaagcccgagaaggcccccaagagcctgatctacgccgcctctagtctccagagcggcgtgcccagcagattttctggcagcggctccggcaccgacttcaccctgacaatcagctccctccagcccgaggacttcgccacctactactgccagcagtacaacagctacccccccacctttggcggaggcaccaaggtggaaatcaagggcggaggcggaagtggaggcggaggatctggcggcggaggctctgaagtgcaactggtggaatcaggcggcggactggtgcagcctggcgagtctctgagactgagctgtgtggcctccggcttcaccttcagccggtacaagatgaactgggtgcgccaggcccctggcaagggactggaatgggtgtcctacatcagccgcagcggcagagacatctactacgccgacagcgtgaagggccggttcaccatcagcagagacaacgccaagaacagcctgtacctccagatgaactccctgcgggacgaggacaccgccgtgtactactgtgccggaaccgtgaccacctattactacttcggcatggacgtgtggggccacggcaccaccgtgacagtgtcatct

SEQ ID NO: 583 - DNA, 726 bp, Artificial Sequence
  Synthetic Polynucleotide
cagtctgtggtcacacagccacctagcatgtctgccgctccaggccagcaagtgaccatctcttgtagcggcggcaacagcaacatcgagcggaactacgtgtcctggtatctgcaactgcctggcacagcccctaagctggtcatcttcgacaacgacagacggcccagcggcatccccgatagattttctggcagcaagagcggcaccagcgccacactgggaattaccggacttcagacaggcgacgaggccgactactactgtggcacatgggactctagcctgagaggctgggttttcggcggaggcacaaagctgacagtgcttggtggcggaggcggaagtggaggcggaggatctggcggcggaggctctgaagtgcagctcgttgagtctggcggcggactgattcaacctggcggaagcctgagactgagctgtgccgcttccggcttcaccttcagcaactacgccatgaactgggttcgacaggcccctggcaaaggactggaatgggtgtccaccatcaacggcagaggcagcagcaccatctacgccgattctgtgaagggcagattcaccatcagccgggacaacagcaagaacaccctgtacctccagatgaactccctgagagccgaggacaccgccacctattactgtgcccggtacatcagcagaggactgggcgattcttggggccagggcacactggttacagtg

SEQ ID NO: 584 - DNA, 729 bp, Artificial Sequence
  Synthetic Polynucleotide
cagtctgtgctgacacagcctccatctgcctctggcacacctggacagagagtgaccatcagctgtagcggcagcagaagcaacgtcggcggcaactacgtgttctggtatcagcaggtcccaggcgctacccctaagctgctgatctacagaagcaatcagcggcctagcggcgtgcccgatagatttgccggaagcaagagcggcagctctgccagccttgccatctctggactgagaagcgaggacgaggccgactactactgtgccacctgggatgatagcctgagcggcttcgtgtttggcaccggcaccaaagtgacagtgcttggtggcggaggcggaagtggaggcggaggatctggcggcggaggctctgaagttcagctggttgaatctggcggcggactggttaagcctggcggatctctgagactgtcttgtgccgccagcggcttcaccttcagcgattactacatgagctggatcagacaggcccctggcaaaggactggaatgggtgtcctacatcagcagcagcggctccaccatctactacgccgatagcgtgaagggcagattcaccatcagccgggacaacgccaagaacagcctgtacctccagatgaactccctgagagccgaggacaccgccgtgtactattgcgccagaggctacggcaaagcctacgatcaatggggccagggcacactggtcaccgtttcttct

SEQ ID NO: 585 - DNA, 726 bp, Artificial Sequence
  Synthetic Polynucleotide
gacatccagatgacccagagccccagcagcctgtctgccagcgtgggcgacagagtgaccatcacctgtagagccagccaggacgtgaacaccgccgtggcctggtatcagcagaagcctggcaaggcccccaagctgctgatctacagcgccagcttcctggaaagcggcgtgcccagcagattcagcggaagcagaagcggcaccgacttcaccctgaccatcagctccctccagcccgaggacttcgccacctactactgccagcagcactacaccacccctcccaccttcggccagaccaaggtggaaatcaagagaggcggaggcggaagtggaggcggaggatctggcggcggaggctctgaagtgcaactggtggaatctggcggcggactggtgcagcctggcggatctctgagactgagctgtgccgccagcggcttcaacatcaaggacacctacatccactgggtgcgccaggcccctggaaagggactggaatgggtggcccggatctaccccaccaacggctacaccagatacgccgacagcgtgaagggccggttcaccatcagcgccgacaccagcaagaataccgcctacctccagatgaacagcctgcgggccgaggataccgccgtgtactactgctcaagatggggaggcgacggcttctacgctatggacgtgtggggccagggcacccttgtgaccgtgtcatct

SEQ ID NO: 586 - DNA, 765 bp, Artificial Sequence
  Synthetic Polynucleotide
cagtctgccctgacacagcctcctagcgcctctggctctcccggccagagcatcaccatcagctgtaccggcaccagcaacaacttcgtgtcctggtatcagcagcacgccggcaaggcccccaagctcgtgatctacgacgtgaacaagcggcccagcggcgtgcccgatagattcagcggcagcaagagcggcaacaccgccagcctgacagtgtctggcctccagaccgatgacgaggccgtgtactactgcggcagcctcgtgggcaactgggacgtgatctttggcggaggcaccaagctgaccgtgctgggcggaggcggaagtggaggcggaggatctggcggcggaggctctcagccccagctccaggaatctggccccacactggtggaagccagcgagacactgagcctgacctgtgccgtgtccggcgattctaccgccgcctgcaatagcttctggggctgggtgcgccagcctcctggaaagggactggaatgggtgggaagcctgagccactgcgccagctattggaaccggggctggacctaccacaaccccagcctgaagtccagactgaccctggccctggacacccccaagaacctggtgttcctgaagctgaacagcgtgacagccgccgacaccgccacctactactgtgccagatttggcggcgaggtgctgcggtacaccgactggcctaaacctgcctgggtggacctgtggggcagaggaacactcgtgaccgtgtccagc

SEQ ID NO: 587 - DNA, 750 bp, Artificial Sequence
  Synthetic Polynucleotide
gagctggtgctgacacagagccctggcaccctgtctctgtctgccggcgaaagagccaccctgagctgtagagccagccagagcgtgtcctctggcagcctggcttggtatcagcagaagccaggccaggcccccagactgctgatctacggcgcttctaccagagccaccggcatccccgatagattcagcggctctggctccggcaccgacttcaccctgacaatcggcagactggaacccgaggacctggccgtgtactactgccagcagtacggcaccagcccctacacattcggccagggcaccaagctggaaatcggcggaggcggaagtggaggcggaggatctggcggcggaggctctctggaacagagcggagccgaagtgaagaaacccggcagcagcgtgcaggtgtcctgcaaagcaagcggcggcaccttctctatgtacggcttcaactgggtgcgccaggctcctggacacggcctggaatggatgggcggcatcatccccatcttcggcacctccaactacgcccagaaattccggggcagagtgaccttcaccgccgaccaggccacaagcaccgcctacatggaactgaccaacctgcggagcgacgacaccgccgtgtattattgcgccagagacttcggccccgactgggaggatggcgacagctacgatggcagcggcagaggcttcttcgacttctggggccagggaacccttgtgaccgtgtcctca

SEQ ID NO: 588 - DNA, 690 bp, Artificial Sequence
  Synthetic Polynucleotide
gacatccagatgacccagagccccagcagcctgtctgccagcgtgggcgacagagtgaccatcacctgtcaggccagccaggacatcaacaactacctgaactggtatcagcagaagcccggcaaggcccccaagctgctgatctacgacgccagcaatctgcagaccggcgtgcccagcagattttccggctctggcagcggcaccgacttcaccttcaccatcgaggacattgccacctactactgccagcagtacaccttcggccctggcaccaaggtggacatcaaaggcggaggcggaagtggaggcggaggatctggcggcggaggctctgaagtgcaactgctggaatctggcggcggactggtgcagcctggcggatctctgagactgagctgtgccgccagcggcttcacctttagctggtacagcatgacctgggtgcgccaggcccctggcaaaggactggaatgggtgtccagcatcgtgccctggggcgatttcacccagtacgccgatagcgtgaagggccggttcaccatcagccgggacaacagcaagaacaccctgtacctgcagatgaacagcctgcgggccgaggacaccgccgtgtactattgtgccaagggacctggctggggcagcttcgatctgtggggcagaggaacccttgtgaccgtgtccagc

SEQ ID NO: 589 - DNA, 720 bp, Artificial Sequence
  Synthetic Polynucleotide
gacatccagatgacccagagccccagcagcctgtctgccagcgtgggcgacagagtgaccatcacctgtaccgccagcctgagcgtgtccagcacctacctgcactggtatcagcagaagcccggcagcagccccaagctgtggatctacagcaccagcaacctggcctccggcgtgcccagcagattttctggcagcggctctggcaccagctacaccctgaccatcagctccctccagcccgaggacttcgccacctactactgccaccagtaccacagaagccccctgacctttggcggaggcaccaaggtggaaatcaagagaggcggaggcggaagtggaggcggaggatctggcggcggaggctctgaagtgcaactggtggaatctggcggcggactggtgcagcctggcggatctctgagactgagctgtgccgccagcggcttcagcctgaccaaatacggcgtgcactgggtgcgccaggcccctggaaaaggactggaatgggtgggagtgaagtgggctggcggctccaccgactacaacagcgccctgatgagccggttcaccatcagcaaggacaacgccaagaacagcctgtacctccagatgaactccctgcgggccgaggacaccgccgtgtactactgtgccagagatcaccgggacgctatggactactggggccagggaacactcgtgaccgtgtcctct

SEQ ID NO: 590 - DNA, 732 bp, Artificial Sequence
  Synthetic Polynucleotide
gacatccagatgacccagagccccagcagcctgtctgccagcgtgggcgacagagtgaccatcacatgcaaggccagccaggacgtgggaacagccgtggcctggtatcagcagaagcctggcaaggcccccaagctgctgatctacagcgccagctacagatccaccggcgtgcccagcagattttccggctctggcagcggcaccgacttcaccctgaccatctctagcctccagcccgaggacttcgccacctactactgccagcaccactactccgccccctggacatttggcggaggcaccaaggtggaaatcaagggcggaggcggaagtggaggcggaggatctggcggcggaggctctgaagtgcaactggtggaatcaggcggcggactggtgcagcctggcggatctctgagactgagctgtgccgccagcggcttcaccttcagcagaaacggcatgagctgggtgcgccaggcccctggaaaaggactggaatgggtggcaaccgtgtccagcggcggcagctacatctactacgccgacagcgtgaagggccggttcaccatctccagagacaacgccaagaacagcctgtacctccagatgaactccctgcgggccgaggacaccgccgtgtactattgtgccagacagggcaccaccgccctggctaccagattcttcgatgtgtggggccagggcaccctcgtgaccgtgtcatct

SEQ ID NO: 591 - DNA, 720 bp, Artificial Sequence
  Synthetic Polynucleotide
gacatccagatgacccagagcttcagcagcctgagcgccagcgtgggcgacagagtgaccatcacctgtagagccagccaggacatcagcaactacctgaactggtatcagcagaagcccggcaaggcccccaagctgctgatctactacaccagcagactgcacagcggcgtgcccagcagattttctggcagcggctccggcaccgactacaccctgacaatcagctccctgcagcccgaggacttcgctacctacttctgtcagcaaggcaacaccctgccctggacctttggcggaggcaccaagctggaaatcaagagaggcggaggcggaagtggaggcggaggatctggcggcggaggctctgaagtgcaactggtgcagtccggcggagggctggtgcagagcggaggatctctgagactgagctgcagagccagcggctacaccttcacccggtactggatgctgtgggtgcgccagaggccaggcaagggactggaatgggtggccgagatcaacccccggaacgaccggaccaactacaacgagaagttcaagacccggttcaccatcagcgtggacagaagcaagaacaccctgtacctgcagatggacagcctgcgggccgaggataccgccgtgtacttttgtgctctgggaggcggctacgctatggactactggggccagggaacccttgtgaccgtgtcctct

SEQ ID NO: 592 - DNA, 720 bp, Artificial Sequence
  Synthetic Polynucleotide
gacatccagatgacccagagcccccctagcctgtctgcctctgtgggcggcaaagtgaccatcacatgcaaggccagccaggacatcgaccgctacatggcctggtatcaggacaagcccggcaagggacccaagctgctgatccacgataccagcaccctccagcccggcatccccagcagattttctggcagcggctccggcagagactacagcttcagcatcagcaacctggaacccgaggacattgccacctactactgcctccagtacgacaacctgtggaccttcggcggaggcaccaagctggaaatcaagagaggcggaggcggaagtggaggcggaggatctggcggcggaggctctcaggtgcaactggtgcagagcggagccgagcttgtgaagcctggcgcttccgtgaagatgagctgcaaagccagcggctacatcttcaccaactacaacatccactgggtcaagaagtccccaggccagggcctggaatggatcggagccatctaccccggaaacggcgacgccccttacagccagaagttccaggacagagccaccctgaccgccgacaccagcagcagcaccacctacatggaactgagcagcctgaccagcgaggacagcgccgtgtactattgcgtgcgggccaactgggatgtggccttcgcctattggggccagggcacactggtgtccgtgtcctct

SEQ ID NO: 593 - DNA, 723 bp, Artificial Sequence
  Synthetic Polynucleotide
gacatccagatgacccagagccctgccagcctgtctgcctctgtgggcgagacagtgaccatcacctgtcgggtgtccggcaacatccacaactacctggcctggtatcagcagaagcagggcaagagcccccaactgctggtgtacaacgccaagaccctggccgatggcgtgcccagcagattttctggctctggcagcggcacccagtacagcctgaagatcaacagcctccagcccgaggacttcggcagctactactgccagcacttctggtccaacccctacaccttcggcggaggcaccaagctggaaatcaagggcggaggcggaagtggaggcggaggatctggcggcggaggctctcaggtgcaactccagcagtctggcgcttccgtgaaggtgtcctgcaaggccagcgaactcgtgcggcctggcacaggctacgccttcaccaattacctgatcgagtgggtcaagcagaggcccggacagggcctggaatggatcggagtgattaacccaggcagcggcggcaccaactacaacgagaagttcaagggcaaggccaccctgaccgccgacaagagcagcagcacagcctacatgcaactgagcagcctgaccagcgacgacagcgccgtgtacttctgcgcccggtacagaagctacgactggtacttcgacgtgtggggagccggcaccaccgtgacagtgtcatct

SEQ ID NO: 594 - DNA, 723 bp, Artificial Sequence
  Synthetic Polynucleotide
gacatccagatgacacagtctccggcgtcactgtccgcctccgtgggggagactgtgactattatttgtagggcatcagttaacatctactcttatttggcctggtaccagcagaagcaaggcaagagtcctcagctgctggtgtataatgcgaagatcctggcagagggcgtgccgagccggttctccggcagcggctcaggtacccaattttccctcaagatcaattcactgcagccagaggactttggcagttactattgtcaacaccactacggcacattcactttcgggtccggtacaaaattggagattaagcgaggcggaggcggaagtggaggcggaggatctggcggcggaggctctcaggtacagttgaaagaaagcgggcctggactggtagcgccttcccaatctctctccatcacgtgcaccatctctggcttctccctgacttcctatggagttcactgggtgaggcagccccccggcaagggactggaatggctggtcgtcatctggtccgacgggtccacaacctacaactccgctctgaaaagtcggctctctatttctaaagataatagcaagagccaggtgtttctgaaaatgaactctctgcagaccgatgatacggccatttactactgcgcttcacactatggctcaaccttggcattcgcttcctggggccacggaacactggtgaccgtttccgcagcc

SEQ ID NO: 595 - DNA, 747 bp, Artificial Sequence
  Synthetic Polynucleotide
gacattgtgatgacccagtctcacaaattcatgtccacatcagtaggagacagggtcagcgtcacctgcaaggccagtcagaatgtgggtaataatgtagcctggtatcaacagaaaccagggcaatctcctaaagtactgatttactcggcatcctaccggtacagtggagtccctgatcgcttcacaggcagtggatctgggacagatttcactctcaccatcagtaatgtgcagtctgaagacttggcagagtatttctgtcagcaatataacacctatccattcacgttcggctcggggacaaagttggaaataaaaggcggaggcggaagtggaggcggaggatctggcggcggaggctctgaggtacagctggaggaaagcggtggaggactggtgcaacctggagggtctatgaagctctcttgcgtagcttctgggttcacgttctccaattactggatgaactgggtgcggcagtcccccgagaaaggcctggaatgggtagcagaaattcggttcaagtcccataactatgctacacactttgccgagtctgtcaaaggccggttcactattagtcgagacgacagcaagtcttcagtctacctgcagatgaataacttgcgggcagaggacacaggtatctactactgcaccaggagaatcggcaactccgactatgactggtggtactttgacgtctggggagcaggcaccagcgtgacggtgagttcagcctca

SEQ ID NO: 596 - DNA, 723 bp, Artificial Sequence
  Synthetic Polynucleotide
gacatccagatgacccagagcagcagcagcttcagcgtgtccctgggcgacagagtgaccatcacatgcaaggccagcgaggacatctacatccggctggcctggtatcagcagaagcccggcaacgcccccagactgctgattagcgccgccacctctctggaaaccggcatccccagcagattctccggctctggcagcggcgaggactacaccctgacaatcaccagcctccagaccgaggacgtggcaacctactactgccagcagtattggaccaccccctggacctttggcggaggcaccaagctggaaatcaagagaggcggaggcggaagtggaggcggaggatctggcggcggaggctctgatgtgcagctccaggaatctggccccggactcgtgaagcctagccagagcctgagcctgacatgcaccgtgaccggctacagcatcaccatcgactacacctggaactggatcagacagttccccggcaacaaactggaatggatgggctacatcacctacagcggcagcaccgactacaaccccagcctgaagtccagaagctccatcaccagagacacctctatgaaccagttcttcttgcagctgaacagcgtgaccaccgaggacaccgccacctactattgcgccagactgggcagaagatacgccctggactattggggccagggcaccagcgtgacagtgtcctct

SEQ ID NO: 597 - DNA, 720 bp, Artificial Sequence
  Synthetic Polynucleotide
gatgtgcagctccaggaaagcggccctggcctcgtgaagcctagccagagcctgagcctgacatgcaccgtgaccggctacagcatcaccagcgactacacctggaactggatcagacagttccccggcaacaagctggaatggatgggctacatcacctacagcggcagcaccagctacaaccccagcctgaagtcccggaactccatcaccagagacaccagcaagaaccagttcttcttgcagctgaacagcgtgaccaccgaggacaccgccacctactactgcgccagactgggcagacggtacaccatggactattggggccagggcacctccgtgaccgtgtctagcggaggcggaggaagtggcggcggaggatctgggggaggcggaagcgatatccagatgacccagtccagcagcagcttcagcgtgtccctgggcgacagagtgaccatcacctgtatggcctccgaggacatctacatccggctggcctggtatcagcagaagcccggcaacgcccccagactgctgattagcgccgccacctctctggaaaccggcgtgccaagcagattcagcggctctggcagcggcaaggactacaccctgagcatcacctccttgcagaccgaggacgtgggcacctactattgccagcagtattggagcagcccctggacctttggcggaggcacaaagctggaaatcaac

SEQ ID NO: 598 - DNA, 720 bp, Artificial Sequence
  Synthetic Polynucleotide
gacatccagatgacccagagcagcagcagcttcagcgtgagcctgggcgacagagtgaccatcacctgcatggccagcgaggacatctacatcagactggcctggtaccagcagaagcccggcaacgcccccagactgctgatcagcgccgccaccagcctggagaccggcgtgcccagcagattcagcggcagcggcagcggcaaggactacaccctgagcatcaccagcctgcagaccgaggacgtgggcacctactactgccagcagtactggagcagcccctggaccttcggcggcggcaccaagctggagatcaacggcggaggcggaagtggaggcggaggatctggcggcggaggctctgacgtgcagctgcaggagagcggccccggcctggtgaagcccagccagagcctgagcctgacctgcaccgtgaccggctacagcatcaccagcgactacacctggaactggatcagacagttccccggcaacaagctggagtggatgggctacatcacctacagcggcagcaccagctacaaccccagcctgaagagcagaaacagcatcaccagagacaccagcaagaaccagttcttcctgcagctgaacagcgtgaccaccgaggacaccgccacctactactgcgccagactgggcagaagatacacaatggactactggggccagggcaccagcgtgaccgtgagcagc

SEQ ID NO: 599 - DNA, 726 bp, Artificial Sequence
  Synthetic Polynucleotide
gaccagatcgtgctgacccagtcccccgctattatgtccgcatcaccgggcgaaaaagtgacgatctcctgtagcgcttcatctagcgtctcctacatgtattggtatcaacagaaacctgggtctagcccaaagccgtggatctacagaaccagtaaccttgccagtggggtgccagcccgcttcagcggtagtggcagtggaacttcctatagcctcacaataagcaacatggaggctgaagatgccgctgcctattactgccagcagtaccacagttacccaaccacgttcggcgggggaactaagctcgaagtaaaaggcggaggcggaagtggaggcggaggatctggcggcggaggctctgaggtgcagctggtggaatctgggggcggcctggtccaacctaagggatcactcaagctctcttgtgcggccagcggattctctttcaatacctatgctatgaattgggtgagacaggcgcccggaaagggcctcgaatggatagcccatatccggtcaaaatcaaacaatttcgcaacctactatgcggactccgtgaaggaccgattttccatctcccgagatgcctccgagaatattctgttcctgcagatgaataacctcaagacagaggacaccgccatgtactactgtgtgcgccagggcggtgactttcccatggattactgggggcaggggaccagcgtgaccgtgagctct

SEQ ID NO: 600 - DNA, 729 bp, Artificial Sequence
  Synthetic Polynucleotide
gacatccagatgacccagagccccagcagcctgtctgccagcgtgggcgacagagtgaccatcacctgtagagccagccagagcatcagcagctacctgaactggtatcagcagaagcccggcaaggcccccaaactgctgatctacgacgccagcaacctggaaaccggcgtgcccagcagattttccggcagcggctctggcaccgacttcaccttcaccatcagctccctccagcccgaggacattgccacctactactgccagcagtacgacaacctgcccctgacctttggcggaggcaccaaggtggacatcaagagaggcggaggcggaagtggaggcggaggatctggcggcggaggctctcaggtgcaactggtggaatctggcggcggagtggtgcagcctggcagaagcctgagactgagctgtgccgccagcggcttcacctttagcagctacgccatgcactgggtgcgccaggcccctggaaaaggcctggaatgggtggccgtgatctcctacgacggctccaacaagtattacgccgacagcgtgaagggccggttcaccatctccagagacaacagcaagaacaccctgtacctccagatgaacagcctgcgggccgaggacaccgccgtgtactattgtgccagggctcacaacagcagctcttggagcttcgactactggggccagggcaccctcgtgaccgtgtcatct

SEQ ID NO: 601 - DNA, 756 bp, Artificial Sequence
  Synthetic Polynucleotide
gacgtcgtgatgacccagagccctctgagcctgcctgtgtccctgggcgatcaggccagcatctcctgcagatccagccagagactggtgcacagcaacggcaacacctacctgcactggtatctgcagaagcccggccagagccccaagctgctgatctaccgggtgtccaacagattccccggcgtgcccgatagattcagcggctctggcagcggcaccgacttcaccctgaagatcagccgggtggaagccgaggacctgggcatctatttctgcagccagagcacccacgtgccctacacctttggcggaggcaccaagctggaaatcaagcggggcggaggcggaagtggaggcggaggatctggcggcggaggctctgaagtgcggctgcagcagtctggccccgacctgattaagcctggggccagcgtgaagatgagctgcaaggccagcggctacaccttcaccggctacgtgatgcactgggtcaagcagaggccaggccagggcctggaatggatcggcttcatcaacccctacaacgacgacatccagagcaacgagcggttccggggcaaggccaccctgaccagcgataagagcagcaccaccgcctacatggaactgagcagcctgacctccgaggacagcgccgtgtactactgtgctaggggagccggctacaacttcgacggggcctacagattcttcgacttttggggccagggcaccacactgaccgtgtcctct

SEQ ID NO: 602 - DNA, 729 bp, Artificial Sequence
  Synthetic Polynucleotide
agctacgagctgacccagcctcctagcgtgtccgtgtctcctggacagaccgccaccatctcttgcagcggcgatcaactgggcgggaagtacggccactggtatcagaagaagcccggccagagccccgtgctggtgctgtaccaggacagaaaacggcctgccggcatccccgagagattcagcggaagcagcagcggcaacaccatcaccctgaccatcagcggcacccaggccgtggatgaggccgactactactgccaggcttgggacaccaatctgggcggcgtgttcggcggaggcaccaaagtgacagtgctgggacagggcggaggcggaagtggaggcggaggatctggcggcggaggctctcaggtgcaactggtggaaagcggagccgaagtgaagaaacctggggccagcgtgaaggtgtcctgcaaggccagcggctacacctttaccggctactacatgcactgggtgcgccaggctccaggccagggactggaatggatgggccggatcaaccccaatagcggcggcaccaactacgcccagaaattccagggcagagtgaccatgaccagagacaccagcatcagcaccgcctacatggaactgagccggctgagaagcgacgacaccgccgtgtactactgcgccagccctagaggcagaggcagcgccttcgatatttggggccagggcacactcgtgaccgtgtcctct

SEQ ID NO: 603 - DNA, 738 bp, Artificial Sequence
  Synthetic Polynucleotide
aacttcatgctgacccagccccacagcgtgtccgagagccctggcaagaccgtgaccatctcctgcaccagaagcagcggctctatcgccagcaaatacgtgcagtggtatcagcagaggcccggcagcagccctaccaccgtgatctacgaggacaaccagaggcctagcggcgtgcccgatagattcagcggcagcatcgacaccagcagcaacagcgccagcctgaccatcagcggcctgagaacagaggacgaggccgactactactgccacagctacgacagcaacaaccactccgtgttcggcggaggcaccaaagtgacagtgctgggacagggcggaggcggaagtggaggcggaggatctggcggcggaggctctgaagtgcaactggtggaaagcgggggaggcgtggtgcagccaggcggatctctgagactgagctgtgccgccagcggcttcaccttcagcagctacgccatgagctgggtgcgccaggcccctggaaaaggcctggaatgggtgtccgccatctctggctctggcggcagcacctactacgccgatagcgtgaagggccggttcagcatcagccgggacaacagcaagaacaccctgtacctccagatgaacagcctgcgggccgaggacaccgccgtgtactactgtgccagaaccagaagctccggggccttcgacatctggggccagggaacactcgtgaccgtgtcctct

SEQ ID NO: 604 - DNA, 726 bp, Artificial Sequence
  Synthetic Polynucleotide
gacatccagatgaaccagagccccagcagcctgagcgccagcctgggcgataccatcaccatcacctgtcacgccagccagaacatcaacgtgtggctgagctggtatcagcagaagcccggcaacatccccaagctgctgatctacaaggccagcaacctgcacaccggcgtgcccagcagattttctggcagcggctctggcaccggcttcaccattaccatcagctccctccagcccgaggacattgccacctactactgccagcagggccagagctacccctggacatttggcggaggcaccaagctggaaatcaagagaggcggaggcggaagtggaggcggaggatctggcggcggaggctctgaagtgcaactccagcagagcggcccagagcttgtgaagcctggcgcttccgtgaagattagctgcaaagccagcggctacagcttcaccggctacttcatgaactgggtcaagcagagccacggcaagagcctggagtacatcggcagattcaacccctacaacggcgagacactgtacaaccagaagttcaagggcaaggccaccctgaccgtggacaagagcagcagcaccgtgcacatggaactgctgagcgtgaccagcgaggacagcgccgtgtactactgtggcagaagcggcaacgacgacgctatggactattggggccagggcaccagcgtgaccgtgtctagtgct

SEQ ID NO: 605 - DNA, 717 bp, Artificial Sequence
  Synthetic Polynucleotide
gacatcctgctgacacagagccccgccatcctgtccgtgtctccaggcgagagagtgtcctttagctgccgggccagccagaacatcggcaccagcatccactggtatcagcagcggaccaacggcagccccagactgctgattaagtacgccagcgagtccgtgtccggcatccccagcagattttctggcagcggctccggcaccgacttcaccctgagcatcaacagcgtggaaagcgaggacattgccgactactactgccagcacaccaatagctggcccaccacctttggcggaggcaccaagctggaaatcaagagaggcggaggcggaagtggaggcggaggatctggcggcggaggctctcaggtgcaactccagcagtccgacgccgagcttgtgaagcctggcgcttccgtgaagattagctgcaaggccagcggctacaccttcaccgaccacgccattcactgggtcaagcagaagcccgagcagggcctggaatggatcggctacttcagccccggcaacggcgacatcaagtacaacgagaagttcaagggcaaggccaccctgaccgccgacaagagcagcagcacagcctacatgcaactgaacagcctgaccagcgaggactccgccgtgtacttctgcaagcggagctacggcaactacgactactggggccagggcaccacactgaccgtgtctagt

SEQ ID NO: 606 - DNA, 732 bp, Artificial Sequence
  Synthetic Polynucleotide
gacatcgtgatgacccagagccccgatagcctggccgtgtctctgggagagagagccaccatcaactgcaagagcagccagagcctgctgaacagcggcgaccagaagaactacctgacctggtatcagcagaagcccggccagccccccaagctgctgatctactgggccagcaccagagaaagcggcgtgcccgatagattcagcggcagcggaagtggcaccgacttcaccctgaccatcagttctcttcaggccgaggacgtggccgtgtactactgccagaacgactacagctaccccctgaccttcggccagggcaccaaggtggaaatcaagggcggaggcggaagtggaggcggaggatctggcggcggaggctctcaggtgcagctggtgcagtctggggccgaagtgaagaaaaccggcagcagcgtgaaggtgtcctgcaaggccagcggctacacctttaccgaccacgccattcacgtgtggcggcaggctccaggacaggccctggaatggatgggccacttcagccccggcaacaccgacatcaagtacaacgacaagttcaagggcagagtgaccctgaccgtggaccgcagcatgagcaccgcctacatggaactgagcagcctgcggagcgaggacaccgccatgtactattgcaagaccagcaccttctttttcgactactggggccagggaacaatggtcaccgtgtccagc

SEQ ID NO: 607 - DNA, 729 bp, Artificial Sequence
  Synthetic Polynucleotide
gacatccagatgacccagagccccagcagcctgtctgccagcgtgggcgacagagtgaccatcacatgcaaggccagccaggacgtgtccattgccgtggcctggtatcagcagaagcccggcaaggcccccaaggtgctgatctacagcgccagctacagatacaccggcgtgcccgacagattcagcggctctggcagcggcaccgacttcaccttcaccatcagctccctccagcccgaggatattgccgtgtactactgccagcagcactacatcacccccctgacctttggcggaggcaccaaggtggaaatcaagggcggaggcggaagtggaggcggaggatctggcggcggaggctctcagatccaactggtgcagagcggccacgaagtgaagaaacctggggccagcgtgaaggtgtcctgcaaagccagcggctacacctttaccaactacggcatgaactgggtgcgccaggcccctggacagggcctggaatggatgggctggatcaacaccaagaccggcgagcccacctacgccgaagagttcaagggcagattcgtgttcagcctggaaaccagcgcctccaccgcctacctccagatcagctctctgaaggccgaggacaccgccatgtacttttgcggcagaggcggctacggcagcagctactggtacttcgatgtgtggggccagggcaccaccgtgaccgtgtcatct

SEQ ID NO: 608 - DNA, 738 bp, Artificial Sequence
  Synthetic Polynucleotide
caggctgtcgtgacacagcctcctagcgcctctggcacaccaggccagagagtgaccatctcctgtagcggcagcagcagcaacatcggcagcaacaccgtgaactggtatcagcaggtgcccggcaccgctcccaagctgctgatctacagcaacaaccagcggcccagcggcgtgcccgatagattttctggcagcaagagcggcaccagcgccagcctggctatctctggactccagtccgaggacgaggccgactactattgcgccgcctgggacgatagcctgaacggctgggtgttcggcggaggcaccaagctgacagtgctgggcggaggcggaagtggaggcggaggatctggcggcggaggctctcagatgcaactggtgcagagcggagccgaagtgaaagagcctggcgagagcctgcggatctcctgcaagggcagcggctacagcttcaccaatttctggatctcttgggtgcgccagatgcccggcaagggcctggaatggatgggcagagtggaccccggctactcctacagcacctacagccctagcttccagggccacgtgaccatcagcgccgacaagagcaccagcaccgcctacctccagtggaacagcctgaaggccagcgacaccgccatgtactactgcgccagagtgcagtacagcggctattacgattggttcgacccctggggccagggcacactcgtgacagtgtcaagc

SEQ ID NO: 609 - DNA, 720 bp, Artificial Sequence
  Synthetic Polynucleotide
gacatccagatgacccagagccccagcacactgagcgccagcgtgggcgacagagtgaccatcacctgtcgggccagccagaacatcaacaagtggctggcctggtatcagcagaggcccggaaaagccccccagctgctgatctacaaggccagcagcctggaaagcggcgtgcccagcagattttctggcagcggctctggcaccgagtacaccctgaccatcagctccctccagcccgacgacttcgccacctactactgccagcagtacaacagctacgccaccttcggccagggcaccaaggtggaaatcaagagaggcggaggcggaagtggaggcggaggatctggcggcggaggctctcaggtgcagctggtgcagtctggggccgaagtgaagaagcctggcgagagcctgaagatcagctgcaagggctccggctacaacttctctaacaagtggatcggctgggtgcgccagctgcctggcagaggactggaatggatcgccatcatctaccccggctacagcgacatcacctacagccccagcttccagggccgcgtgacaatcagcgccgacaccagcatcaacaccgcctacctgcactggcacagcctgaaggccagcgacaccgccatgtactactgcgtgcggcatacagccctggctggcttcgattattggggcctgggcaccctcgtgaccgtgtctagt

SEQ ID NO: 610 - DNA, 735 bp, Artificial Sequence
  Synthetic Polynucleotide
cagagcgtcgtgacacagcctcctagcgtgtcagtggcccctggcaagaccgccagaatcacctgtggccggaacaacatcggcagcaagagcgtgcactggtatcagcagaagcccggccaggctcctgtgctggtggtgtacgacgacagcgacagacccagcggcatccccgagagattcagcggcagcaactccggcaataccgccaccctgaccatcagcagagtggaagccggcgacgaggccgactactactgccaagtgtgggacagcagcagcgatcacgtggtgtttggcggaggcaccaagctgacagtgctgggtggcggaggcggaagtggaggcggaggatctggcggcggaggctctgaagtgcaactggtgcagtctggcggaggggtcgtgcggcctggcggatctctgagactgtcttgtgccgccagcggcttcaccttcgacgactacggcatgagctgggtgcgccaggcccctggaaaaggcctggaatgggtgtccggcatcaactggaatggcggcagcaccggctacgccgattctgtgcggggcagattcaccatcagccgggacaacgccaagaacagcctgtacctgcagatgaactccctgcgggccgaggacaccgccctgtactattgcgccagagagcggggctacggctaccacgaccctcacgattattggggccagggcacccttgtcaccgtgtcctct

SEQ ID NO: 611 - DNA, 732 bp, Artificial Sequence
  Synthetic Polynucleotide
gacatcgtgctgacacagagccctgcttctctggccgtgtctctgggacagagagccaccatcagctgtagagccagcgagagcgtggacaactacggcaacaccttcatgcactggtatcagcagaagcccggccagcctcctaagctgctgatctacagagccagcaacctggaaagcggcatccccgccagattttctggcagcggcagcagaaccgacttcaccctgaccatcaatcccgtggaagccgacgacgtggcaacctactactgccagcagagcaacgaggaccctcctacatttggagccggcaccaagctggaactgaaaggcggaggcggaagtggaggcggaggatctggcggcggaggctctcagattcagctggtgcagtctggccccgagctgaagaaacctggcgagacagtgaagatcagctgcaaggccagcggctacatcttcaccaattacggcatgaactgggtcaagcaggcccctggcaagagcttcaagtggatgggctggatcaacacctacaccggcgagagcacatacagcgccgacttcaagggcagattcgccttcagcctggaaaccagcgccagcacagcctacctgcacatcaacgacctgaagaacgaggacaccgccacctacttttgcgccagaagcggcggctacgaccctatggattattggggccagggcaccagcgtgaccgtttcttct

SEQ ID NO: 612 - DNA, 726 bp, Artificial Sequence
  Synthetic Polynucleotide
gagatcgtgctgacacagagccctggcaccctgagcctgtctccaggcgaaagagccacactgagctgtcgggccagccagagcgtgtccaatacctacctggcctggtatcaccagaggcccggacaggctccccggctgctgatctatggcgcttctagcagagccaccggcatccccgatagattcagcggctctggcagcggcaccgacttcgccctgacaatcagctccctggaacccgaggacttcgccgtgtactactgccagcagtacagcaactcctggaccttcggccagggcaccaaggtggaaatcaagagaggcggaggcggaagtggaggcggaggatctggcggcggaggctctcaggtgcaactggtggaatctggcgggggagtggtgcagcctggcagaagcctgagactgtcttgtgccgccagcggcttcaccttcagcagctacgacatgcactgggtgcgccaggcccctggcaaaggactggaatgggtggccgtgatctcctacgacggcaccaacgagtattacgccgacagcgtgaagggccggttcaccatctccagagacaccagcaagaacaccctgtacctccagatgaacagcctgcgggccgaggacacagccgtgtattattgcgccagagagcggtacttcgactggtccttcgactactggggccagggaaccctggtgtccgtgtctagt

SEQ ID NO: 613 - DNA, 723 bp, Artificial Sequence
  Synthetic Polynucleotide
gagctgacacaggaccctgctgtgtctgttgccctgggccagacagtgcggattacctgtcaaggcgacagcctgagaagcaactacgccaactggtatcagcagaagcccggacaggctcccgtgctggttatctacggccagaacaacagacccagcggcatccccgatagattcagcggctctagctctggcaataccgccagcctgacaatcactggcgctcaggctgccgatgaggccgactactactgcgatagcagagtgtccaccggcaatcacgtggtgtttggcggcggaacaaagctgacagtgctcggacaaggcggaggcggaagtggaggcggaggatctggcggcggaggctctgaagttcagctggtgcagagcggagccgaagtgaagaaacctggggcctctgtgaaggtgtcctgcaaggcttccggctacacctttaccagctacgccatgcactgggtccgacaggcacctggacaacggcttgaatggatgggctggatcaacgccggcaacggcaacaccaagtacagccagaaattccagggccgcgtgaccatcaccagagatacaagcgccagcaccgcctacatggaactgtctagcctgagatccgaggacaccgccgtgtactactgtgccagagacatcagctacggcagcttcgactattggggccagggcacactggtcaccgttagctct

SEQ ID NO: 614 - DNA, 711 bp, Artificial Sequence
  Synthetic Polynucleotide
gacatccagatgacacagagccctagcagcctgtctgccagcgtgggagacagagtgaccatcacctgtagcgccaccagcagcatcagctacatgcactggtatcagcagaagcccggcaaggcccctaaaggctggatctacgataccagcaaactggcccacggcgtgcccagcagattttctggttctggcagcggcaccgacttcaccctgacaatatctagcctccagcctgaggacttcgccacctactactgccaccagagaagaagctaccccttcaccttcggccagggcaccaaggtggaaatcaaaggcggaggcggaagtggaggcggaggatctggcggcggaggctctgaagtgcaactggttcagagcggagccgaagtgaagaaacctggggcctctgtgaaggtgtcctgcaaggcttccggctacacctttaccaatttctggattcactgggtccgacaggctccaggccaaggactggaatggatcggagagatcgaccccagcgacagctacaccaactacaaccagaaattcaaaggccgggtcaccatcaccagagacaccagcacaagcaccgcctacctggaactgagcagcctgagaagcgaggacaccgccgtgtactactgcgccagggaaatcaccaccgtggattattggggccagggaaccctggtcaccgtgtcatct

SEQ ID NO: 615 - DNA, 732 bp, Artificial Sequence
  Synthetic Polynucleotide
gacatccagatgacacagagccctagcagcctgtctgccagcgtgggagacagagtgaccatcacatgcaaggccagccagggcttcaacaaatacgtggcctggtatcagcagaagcccggcaaggctcctaagctgctgatctactacaccagcacactccagcctggcgtgcccagcagattttctggctctggcagcggcagagactacaccctgacaatatccagcctccagccagaggacttcgccacctactactgtctccagtacggcaacctgctgtacgcctttggacagggcaccaaggtggaaatcaagagaggcggaggcggaagtggaggcggaggatctggcggcggaggctctgaagttcagcttgtgcagagcggagccgaagtgaagaaacctggggcctctgtgaaggtgtcctgcaaagccagcggctacacctttaccagctactggatcggctgggtccgacaggctcctggacaaggactggaatggatcggcgacatctatcccggcggaggctacaccaactacaacgagaagttcaagggccgcgtgacaatcaccagagacacctctacaagcaccgcctacctggaactgagcagcctgagaagcgaggacaccgccgtgtactactgcgccagactggatggcagcagctacagaggcgctatggattcttggggccagggcacactggtcaccgtttcttct

SEQ ID NO: 616 - DNA, 720 bp, Artificial Sequence
  Synthetic Polynucleotide
gacatccagatgacacagagccctagcagcctgtctgccagcgtgggagacagagtgaccatcacctgtagagccagccaggacatccggtactacctgaactggtatcagcagaagcccggcaaggcccctaagctgctgatctatgtggcctccagcctccagagcggagtgccttctagattttctggcagcggctccggcaccgagtttaccctgacagtgtctagcttgcagcccgaggacttcgccacctactactgcctgcaagtgtacagcacccctcggacctttggacagggcaccaaggtggaaatcaaaggcggaggcggaagtggaggcggaggatctggcggcggaggctctgaagtgcagcttgttgaatctggcggcggactggctaagcctggcggatctctgagactgtcttgtgccgccagcggcttccggttcaccttcaacaactactacatggactgggtccgacaggcccctggacaaggacttgaatgggtgtccagaatcagcagcagcggcgaccctacttggtacgccgattctgtgaagggcagattcaccatcagcagagagaacgccaagaacaccctgttcctccagatgaactccctgagagccgaggacaccgccgtgtactattgtgcctctctgaccaccggcagcgattcttggggacagggcgtgctggttaccgtgtcatct

SEQ ID NO: 617 - DNA, 723 bp, Artificial Sequence
  Synthetic Polynucleotide
gagatcgtgatgacacagagccccgccacactgagtgtgtctccaggcgaaagagccacactgtcctgtagagccagccagagcgtgtccagaaacctggcctggtatcagcagaagcctggacaggctccccggctgttgatctacggcgcttctacaagagccaccggcattcccgccagattttctggctctggcagcggcaccgagttcaccctgacaatcggaagcctccagagcgaggacttcgccgtgtactactgccagcagtacaagacctggcctcggacctttggacagggcaccaacgtggaaatcaaaggcggaggcggaagtggaggcggaggatctggcggcggaggctctcaagttcagctgcaacaatggggagccggcctgctgaagcctagcgaaacactgtctctgacctgcgccgtgttcggcggctctttcagcggctactactggtcctggatcagacagcctcctggcaaaggactggaatggatcggcgagatcaaccaccggggcaacaccaacgacaaccccagcctgaaaagcagagtgaccatcagcgtggacaccagcaagaaccagttcgccctgaagctgagcagcgtgacagccgctgataccgccgtgtattattgcgccagagagcggggctacacctacggcaatttcgatcactggggccagggcaccctggtcacagtttcttct

SEQ ID NO: 618 - DNA, 741 bp, Artificial Sequence
  Synthetic Polynucleotide
gacatccagatgacccagagccccagcagcctgtctgccagcgtgggcgacagagtgaccatcacatgcaaggccagcaagaacatcagaagctacctggcctggtatcagcagaagcccggcaaggcccccaagctgctgatctacagcggcagcacactgcacagcggcgtgcccagcagattttccggctctggcagcggcaccgacttcaccctgaccatctctagcctccagcccgaggacttcgccacctactactgccagcagcaccacgagtaccccctgacattcggccagggcaccaaggtggaaatcaagagaggcggaggcggaagtggaggcggaggatctggcggcggaggctctcaggtgcaactccaggaatctggccccggactcgtgaagcccagcgagacactgagcctgacctgtaccgtgtccggctacaccatcaccagcggctacgactggtcctggatcagacagcctcctggcaagggcctggaatggatcggctacatcaactacggcggctccaccaactacaagcccagcctgggaagccgcgtgacaatcagcgtggacacctccaagaaccagttcagcctgaagctgagcagcgtgacagccgccgataccgccgtgtactactgcgcccggtacaacgagtacaagagctacatctacgattggtacttcgacttctggggccagggaaccctcgtgaccgtgtctagt

SEQ ID NO: 619 - DNA, 747 bp, Artificial Sequence
  Synthetic Polynucleotide
cagtctgtggtcacacagcctccatccgtgtctgctgcccctggacagaaagtgaccatctcctgtagcggcagcagcagcaacatcggcaacaactacgtgtcctggtatcagcagctccccggcacagctcccaaactgctgatctacgacaacaacaagcggcccagcggcatccccgatagattttctggcagcaagagcggcaccagcgccacactgggaattaccggacttcagacaggcgacgaggccgactactactgtggcacatgggatggcagcctgtacaccatgcttttcggcggaggcaccaagctgacagtgcttggcggaggcggaagtggaggcggaggatctggcggcggaggctctgaagtgcaactggtggaatctggcggcggactggttaagcctggcggatctctgagactgtcttgtgccgccagcggcttcaccttcagcaatgcctggatgagctgggttcgacaggcccctggaaaaggactggaatgggtcggattcatccggtccaaagcctacggcggcaccacagaatatgccgcctctgtgaagggcagattcaccatcagccgggacgacagcaagtctatcgcctacctccagatgaacaacctgaaaaccgaggacaccgccgtgtactactgcgccagagatggcctgtacagcagctcttggtacgacagcgattactggggccagggcacactggtcacagtgtcatct

SEQ ID NO: 620 - DNA, 762 bp, Artificial Sequence
  Synthetic Polynucleotide
cagtctgtgctgacacagcctcctagtgtgtctggcgctcctggacagagagtgaccatctcttgtaccggcagcagcagcaatatcggagccggctatgacgtgcactggtatcagcagctccctggcacagcccctaaactgctgatcttcggcaacagcaacagacccagcggcgtgcccgatagattcagcggctttaagagcggcacaagcgccagcctggctatcactggactgcaagccgaggacgaggccgactacttctgccagagctacgatagcagcctgagcggcagcggagtgtttggcacaggcaccaaagtgacagtgcttggcggcggaggcggaagtggaggcggaggatctggcggcggaggctctcaaatgcaactggttcaaagcggcggtggcctggtgcaacctggaagaagtctgagactgagctgtgccgccagcggcttcaccttcgatgattacgccatgcactgggtccgacaggcccctggaaaaggactggaatgggtgtccggcatctcctggaatagcggctctatcggctacgccgacagcgtgaagggcagattcaccatcagccgggacaacgccaagaacagcctgtacctccagatgaactccctgagagccgaggatacagccctgtactactgcgccaaggacatccacagcggcagctactacggcctgctgtactacgctatggacgtgtggggccagggcacaaccgtgacagtttcttct

SEQ ID NO: 621 - DNA, 762 bp, Artificial Sequence
  Synthetic Polynucleotide
ctgcctgttctgacacagcctccatctgcctctggcacacctggacagagagtgaccatcagctgtagcggcagaagcagcaacatcggcagcaacagcgtgaactggtacagacagcttcctggcgctgcccctaagctgctgatctacagcaacaaccagcggcctcctggcgtgccagtcagattttctggcagcaagagcggcacaagcgccagcctggctatttctggactccagtctgaggacgaggccacctactactgtgccacctgggacgacaacctgaacgtgcactacgtgttcggcaccggcaccaaagtgacagtgcttggaagtagaggcggaggcggaagtggaggcggaggatctggcggcggaggctctcttgaaatggctcaggtgcagctggtgcagagcggagccgaagtgaagaaacctggcagcagcgtgaaggtgtcctgcaaagcttctggcggcaccttcagcagctacgccatctcttgggttcgacaggcccctggacaaggactggaatggatgggcagaatcatccccatcctgggaatcgccaactacgcccagaaattccagggcagagtgacaatcaccgccgacaagagcaccagcaccgcctacatggaactgagcagcctgagaagcgaggacaccgccgtgtactattgtgcaagaggcggctactacagccacgacatgtggagcgaagattggggccagggcacactggtcacagtgtcatct

SEQ ID NO: 622 - DNA, 729 bp, Artificial Sequence
  Synthetic Polynucleotide
gacatcgtgctgacacagagccctgcttctctggccgtgtctctgggagagagagccaccatcaactgtagagccagcgagagcgtgtccgtgattggagcccacctgatccactggtatcagcagaagcctggacagcctcctaagctgctgatctacctggcctccaacctggaaacaggcgtgccagccagattttctggcagcggctctggcaccgatttcaccctgacaatcagcagcctccaggccgaagatgccgccatctactactgcctccagagccggatcttccccagaacctttggacagggcaccaagctggaaatcaaaggcggaggcggaagtggaggcggaggatctggcggcggaggctctcaagttcagctggtgcagtctggctccgagctgaagaaacctggcgagtccgtgaagatcagctgcaaggccagcggctacaccttcaccgactacagcatcaactgggtcaagcaggcccctggacagggactgaaatggatgggctggatcaacaccgagacaagagagcccgcctacgcctacgacttcagaggcagattcgtgttctccctggacaccagcgccagcacagcctatctccagatcagctctctgaaggccgaggataccgccgtgtacttctgcgccctggactacagctacgctatggactattggggccagggcaccctggtcacagtctcttct

SEQ ID NO: 623 - DNA, 732 bp, Artificial Sequence
  Synthetic Polynucleotide
gacatcgtgctgacacagtctcccgccacactgtcactgagccctggcgatagagccacactgagctgtagagccagcgagagcgtgacaatcctgggcagccacctgatctactggtatcagcagaagcccggacaggcccctagactgctgattcagctcgccagcaatgtgcagacaggcatccctgccagattttccggcagcggcagcagaaccgatttcaccctgaccataagcagcctggaacctgaggacttcgccgtgtactactgcctccagagccggacaatccccagaacctttggacagggcaccaagctggaaatcaagagaggcggaggcggaagtggaggcggaggatctggcggcggaggctctcaagttcaactggtgcagagcggctccgagctgaagaaacctggcgagtccgtgaagattagctgcaaggccagcggctacaccttcacacactacagcatgaactgggtccgacaggctccaggccaaggactggaatggatgggcagaatcaacaccgagacaggcgagcccctgtacgccgacgatttcaagggcagattcgtgttcagcctggacaccagcgccagcacagcctatctccagatcagctctctgaaggccgaggacaccgccgtgtattattgcagcaacgactacctgtactccctggactattggggccagggcacactggtcacagtgtctagt

SEQ ID NO: 624 - DNA, 744 bp, Artificial Sequence
  Synthetic Polynucleotide
gacttcgtgatgacacagagccctgatagcctggccgtgtctctcggcgagcgagtgaccatgagctgcaagtctagccagagcctgctgaacagcggcaaccagaagaactacctgacctggtatcagcagaagcccggccagcctcctaagctgctgatctactgggccagcaccagagaaagcggcgtgcccgatagattttctggctctggcagcggcaccgacttcaccctgacaatttctagcctgcaagccgaggacgtggccgtgtactactgccagaacgactacagctacccctacaccttcggccagggcaccaagctggaaatcaaaggcggaggcggaagtggaggcggaggatctggcggcggaggctctgaagtgcaactggttcagagcggagccgagctgaagaaacctggggccagcgtgaaggtgtcctgtaaagccagcggctacacctttaccgactactacatgaaatgggtccgacaggccccaggccagggactcgaatggatcggcgatattatccccagcaacggggccaccttctacaaccagaaattcaagggccgcgtgaccatcaccgtggacaagagcacaagcaccgcctacatggaactgagcagcctgagaagcgaggacaccgccgtgtattattgcgccagaagccatctgctgcgggccagttggttcgcctattggggacagggaaccctggtcaccgttagctct

SEQ ID NO: 625 - DNA, 744 bp, Artificial Sequence
  Synthetic Polynucleotide
gacttcgtgatgacacagagccctgatagcctggccgtgtctctcggcgagcgagtgaccatgagctgcaagtctagccagagcctgctgaacagcggcaaccagaagaactacctgacctggtatcagcagaagcccggccagcctcctaagctgctgatctactgggccagcaccagagaaagcggcgtgcccgatagattttctggctctggcagcggcaccgacttcaccctgacaatttctagcctgcaagccgaggacgtggccgtgtactactgccagaacgactacagctacccctacaccttcggccagggcaccaagctggaaatcaaaggcggaggcggaagtggaggcggaggatctggcggcggaggctctcaagtgcaactggttcagagcggagccgagctgaagaaacctggggccagcgtgaaggtgtcctgtaaagccagcggctacacctttaccgactactacatgaaatgggtccgacaggccccaggccagggactcgaatggatcggcgatattatccccagcaacggggccaccttctacaaccagaaattcaagggccgcgtgaccatcaccgtggacaagagcacaagcaccgcctacatggaactgagcagcctgagaagcgaggacaccgccgtgtattattgcgccagaagccatctgctgcgggccagttggttcgcctattggggacagggaaccctggtcaccgttagctct

SEQ ID NO: 626 - DNA, 714 bp, Artificial Sequence
  Synthetic Polynucleotide
gacgtgcagatcacacagagccctagctacctggctgcctctcctggcgagacaatcaccatcaactgtcgggccagcaagagcatcagcaaggacctggcctggtatcaagagaagcccggcaagaccaacaagctgctgatctacagcggcagcacactccagtctggcatccccagcagattttccggctctggcagcggcaccgatttcaccctgaccataagcagcctggaacctgaggacttcgccatgtactactgccagcagcacaacaagtacccctacacctttggcggaggcaccaagctggaaatcaagagaggcggaggcggaagtggaggcggaggatctggcggcggaggctctcaagttcaactgcaacagcctggggccgagcttgttagacctggcgcttctgtgaagctgagctgcaaggccagcggctacaccttcaccagctactggatgaactgggtcaagcagcggcctgaccagggcctcgaatggatcggcagaatcgacccctacgacagcgagacacactacaaccagaagttcaaggacaaggccatcctgaccgtggacaagagcagctccaccgcctacatgcaactgagcagcctgacctctgaggatagcgccgtgtactattgcgccagaggcaactgggacgactattggggccagggcacaaccctgacagtgtctagt

SEQ ID NO: 627 - DNA, 720 bp, Artificial Sequence
  Synthetic Polynucleotide
gagatcgtgctgacacagagccctaccagcatgacagcctctccaggcgagcaagtgaccatcacctgtagagccagcagcagcatcaactacatgcactggtatcagcagaagcctggcgcaagccccagaccttggatctacgagacaagcaagctggcctccggcgtgcccgatagattttctggatctgccagcggcaccagctacagcctgaccatcaacaacatggaagccgaggacgccgccacctactactgccagcagtggaattacccctcctggacctttggcggaggcaccaagctggaacttaaaggcggaggcggaagtggaggcggaggatctggcggcggaggctctgaagtgcagctcgttgagtctggtggcggactggttcagcctggaagaagcctgaagctgagctgtgccgccagcggcttcaccttcagcgactacaatatggcctgggtccgacaggcccctaagaaaggactggaatgggtcgccaccatcctgtacgatggcggcagaacctactaccggggcagcgtgaagggcagattcaccatcagcagagacaacgccaagagcaccctgtacctgcggatggactctctgagaagcgaggataccgccacatattactgtgccacacacagccggggcaccgactactttgattattggggccagggcgtgatggttaccgtgtctagt

SEQ ID NO: 628 - DNA, 747 bp, Artificial Sequence
  Synthetic Polynucleotide
gacatcgtgatgacacagagcccttctagcctggccgtgtctgagggcgagacagtgaccatcaactgcaagagcagccagagcttcctgtctagcggcgacggcaagaattacgtggcctggtatcagtacaagcccggacagagccccaagctgctgatctactgggccagcacaagacagagcggcgtgcccgatagattcatcggctctggcagcggcaccgacttcaccctgacaatctctacagtgcaggccgaggacctggctatctactactgccagcagtattacgacacccctctgacctttggctccggcaccaagctggaaatcaaaggcggaggcggaagtggaggcggaggatctggcggcggaggctctgaagtgaagctgcaagagtctggccccagcctggtgcagagtagccaaacactgagcctgacctgtaccgtgtccggctttagcctgaccagctaccacatccactgggtccgacagacccctggcaaaggactggaatggatgggcgtgatgtggagcgacggcgacaccagctataacagcgccctgaagtcccggctgagcatcagcagagatacaagccagagccaggtgttcctgaagatgaacagcctccagaccgaggacaccgccacctactattgtgccagaggctactacagcagctacctgtacctttggttcgcctattggggccagggcaccctggttacagtcagctct

SEQ ID NO: 629 - DNA, 759 bp, Artificial Sequence
  Synthetic Polynucleotide
gacgtgctgatgacccagacacctgtgtctctgccagtgtctctcggaggccaggtgtccatctcctgtagaagcagccagagcctggtgcactccgacggcgatacctacctgcactggtatctccagaagcctggacagagccctcagctcctgatctaccgggtgtccaacagattcagcggcgtgcccgatagattttccggcagcggctctggcaccgacttcaccctgaagatcagcagagtggaacccgaggacctgggcctgtactactgtctccagaccacacacttcccaccttggacctttggcggaggcaccaagctggaaatgaaaggcggaggcggaagtggaggcggaggatctggcggcggaggctctcaggttcagctccagcagtctggacccgagcttagaaggccaggatctagcgtcagactgagctgcaaggccagcggctaccggatcaaggacttcctgatccactggattaagaacagacccgagcacggcctggaatggatcggatggattgaccctgaggacggcgagactaagtacgcccagaagttccagaccaaggccacactgaccgccgacacctctagcaacaccgcctacatgcaactgagcagcctgaccagcgaggacaccgccacctacttttgtgctagatggggcgacgtgtactacggcctgatgagaggccatgtgatggatgcctggggccagggaacaagcgtgacagtctcttct

SEQ ID NO: 630 - DNA, 747 bp, Artificial Sequence
  Synthetic Polynucleotide
gacatcgtgatgacccaggccgctcccagcatccctgtgacacctggcgagagcgtgtccatctcctgccggtctagcaagagcctgctgaacagcaacggcaatacctacctgtactggttcctccagcggccaggccagtctccccaactgctgatctaccggatgagcaacctggcctccggcgtgcccgatagattttctggcagcggctccggcaccgccttcaccctgagaatcagcagagtggaagccgaggacgtgggcgtgtactactgtatgcagcacctggaataccccttcaccttcggagccggcaccaagctggaactgaagagaggcggaggcggaagtggaggcggaggatctggcggcggaggctctgaagtgcaactccagcagagcggccctgagctgattaagcctggggccagcgtgaagatgagctgcaaggccagcggctacaccttcaccagctacgtgatgcactgggtcaagcagaagcccggccagggcctggaatggatcggctacatcaacccctacaacgatggcaccaagtacaacgagaagttcaagggcaaggccaccctgaccagcgacaagagcagcagcaccgcctacatggaactgagcagcctgacaagcgaggacagcgccgtgtactattgcgccagaggcacctactactacggcagccgggtgttcgactattggggccagggcaccacactgaccgtgtcctct

SEQ ID NO: 631 - DNA, 747 bp, Artificial Sequence; identical to SEQ ID NO: 630
  Synthetic Polynucleotide

SEQ ID NO: 632 - DNA, 801 bp, Artificial Sequence
  Synthetic Polynucleotide
atcaacatctacaacgccgagcctgccaatcctagcgagaagaacagccccgaattcgacatcgtgatgacacagagccccgccacactgtcactgtctccaggcgaaagagccacactgagctgtcggagcagcaagagcctccagaacgtgaacggcaacacctacctgtactggttccagcagaagcccggccagtctcctcagctcctgatctacagaatgagcaacctgaacagcggcgtgcccgacagattttctggcagcggaagcggcaccgagttcaccctgaccataagcagcctggaacctgaggacttcgccgtgtactactgtatgcagcacctggaataccccatcaccttcggagccggcaccaagctggaaatcaaaggcggaggcggaagtggaggcggaggatctggcggcggaggctctgaagtgcaactggttgaatctggcggcggactggttaagcctggcggatctctgaagctgagctgtgccgccagcggctacacctttaccagctacgtgatgcactgggtccgacaggcccctggcaaaggacttgagtggatcggctacatcaacccctacaacgatggcaccaagtacaacgagaagttccagggcagagtgaccatcagctccgacaagagcatcagcaccgcctacatggaactgagcagcctgagaagcgaggataccgccatgtactattgcgccagaggcacctactactacggcaccagagtgttcgactactggggccagggaaccctggtcacagtctcttct

SEQ ID NO: 633 - DNA, 732 bp, Artificial Sequence
  Synthetic Polynucleotide
gacatccagatgacacagagccctagcagcctgtctgccagcgtgggagacagagtgaccatcacatgcaaggccagcgaccacatcaacaactggctggcctggtatcagcagaagcctggacaggcccctaagctgctgatctacggcgctaccacactggaaacaggcgtgcccagcagattttctggcagcggctctggcaccgactacaccctgacaatatccagcctccagcctgaggacttcgccacctactactgtcagcagagctggaacaccccttggacattcggccagggcaccaagctggaaatcaagagaggcggaggcggaagtggaggcggaggatctggcggcggaggctctcaagttcagcttcaacagcctggcgctgagctggtcaaacctggcgcttctgtgaagatgagctgcaaagccagcggctacgccttcagcagctactggatcaactggatgaagcagaaacccggccagggactcgaatggatcggccaaatctatcccggcgacggcgacaccaactacaacggcaagttcaagggcagagccacactgaccgccgatacctctagcagcacagcctacatgcagctgagcagcctgaccagcgaagatagcgccgtgtacttctgtgcccggtccatcacaacagtcgtgggctgcgctatggactattggggccagggaacaagcgtgaccgtgtctagt

SEQ ID NO: 634 - DNA, 738 bp, Artificial Sequence
  Synthetic Polynucleotide
cagatcgtgctgtctcagtctcctgccatcctgagcgcttccccaggcgagaaagtgaccatgacctgtagagccagcagcagcgtgtcctacatgcactggtatcagcagaagcccggcagcagccctaagccttggatctacgccaccagcaatctggcctctggcgtgccagccagattttctggctctggcagcggcaccagctacagcttcacaatcagcagagtggaagccgaggacgccgccacctactattgtcagcagtggaccttcaatcctcctaccttcggcggaggcacccggctggaaatcaaaagaacagtggctgctggcggaggcggaagtggaggcggaggatctggcggcggaggctctcaggcttatctgcaacagagcggagccgaactcgtcagacctggcgcttctgtgaagatgagctgcaaggccagcggctacaccttcaccagctataatatgcactgggtcaagcagacccctcggcagggactcgaatggatcggcggaatctatcccggcaacggcgacacctcctacaaccagaagttcaagggcaaagccacactgaccgtgggcaagagcagcagcaccgcctatatgcagctcagcagcctgaccagcgaggacagcgccgtgtacttctgcgccagatacgactacaactacgctatggactactggggccagggcaccagcgtgacagttagctctgccagc

SEQ ID NO: 635 - DNA, 735 bp, Artificial Sequence
  Synthetic Polynucleotide
gacgagatcgtgctgacacagagccctgccaccctgtctctgagccctggcgaaagagccaccctgagctgtagagccagccagagcgtgtccagctacctggcctggtatcagcagaagcccggccaggctccccggctgctgatctacgatgccagcaatagagccaccggcatccccgccagattttccggctctggcagcggcaccgacttcaccctgaccatcagctccctggaacccgaggacttcgccgtgtactactgccagcagcggagcaactggcccatcacattcggccagggcacccggctggaaatcaaaggcggaggcggaagtggaggcggaggatctggcggcggaggctctgaggtgcagcttgttgagtctggcggaggactggtgcagcccgatagaagcctgagactgtcttgtgccgccagcggcttcaccttccacgattatgccatgcactgggtccgacaggcccctggcaaaggacttgaatgggtgtccaccatctcttggaacagcggcacaatcggctacgccgactctgtgaagggcagattcaccatcagccgggacaacgccaagaacagcctgtacctccagatgaactccctgagagccgaggacacagccctgtactactgcgccaaggacatccagtacggcaactactactacggcatggacgtgtggggccagggcacaacagtgacagtctcttct

SEQ ID NO: 636 - DNA, 717 bp, Artificial Sequence
  Synthetic Polynucleotide
gacatccagatgacacagagccctagcagcctgtctgccagcgtgggagatagagtgaccatcaactgcaaggccagccaggacatcaacagctacctgagctggttccagcagaagcctggcaaggcccctaagacactgatctaccgggccaacagactggtggatggcgtgccaagcagattttctggcagcggcagcggccaggattacaccctgacaatatccagcctccagcctgaggacttcgccacctactactgcctccagtacgacgagttccctctgacctttggcggaggcaccaaggtggaaatcaaaggcggaggcggaagtggaggcggaggatctggcggcggaggctctcaggtgcaactggtgcagtctggggccgaagtgaagaaacctggggcctctgtgaaggtgtcctgcaaagccagcggctacacctttaccaactacgacatcaactgggtccgacaggctccaggccaaggactggaatggatcggctggatctatcctggcgacggcagcaccaagtacaacgagaagttcaaggccaaggccacactgaccgccgataccagcacaagcaccgcctacatggaactgcggagcctgagaagcgacgacaccgccgtgtactattgtgcctccggctacgaggacgctatggactattggggccagggcaccaccgtgacagtgtctagt

SEQ ID NO: 637 - DNA, 723 bp, Artificial Sequence
  Synthetic Polynucleotide
gacatcgtgatgacccagacacctctgagcctgagcgtgacacctggacagcctgccagcattagctgcaagagcagccagtctctgctggacggcgacggcaagacctacctgaattggctgctccagaagcctggacagagccctcagcggctgatctacctggtgtccaagctggatagcggcgtgcccgatagattttctggcagcggctctggcaccgacttcaccctgaagatcagcagagtggaagccgaggacgtgggcgtgtactactgttggcagggcacacacttccccagaacattcggccagggcacaaagctggaaatcaaaggcggaggcggaagtggaggcggaggatctggcggcggaggctctcaagtgcaactggttcagagcggagccgaagtgaagaaacctggggcctctgtgaaggtgtcctgcaaggccagcggctacaccttcaaggacacctacatccactgggtccgacaggcccctggacaaggacttgagtggatgggcagaatcgaccccgccaacggcaacaccaaatacgaccccaagttccagggcagagtgaccatgaccagagacaccagcatcagcaccgcctacatggaactgagccggctgagatccgatgacaccgccgtgtactattgcgctagaagaggcggagtggattggggccagggaacactggttaccgtgtctagt

SEQ ID NO: 638 - DNA, 726 bp, Artificial Sequence
  Synthetic Polynucleotide
gacatccagatgacacagagccctagcagcctgtctgccagcgtgggagacagagtgaccatcacatgcaaggccagccaggatgtgtctacagccgtggcctggttccagcagaagcctggaaaagcccctaagctgctgatctacagccccagctacagatacaccggcgtgcccagcagattttctggcagcggctctggcaccgacttcaccctgacaatatccagcctccagcctgaggacttcacctactactgccagcagctctacagcaccccttacacattcggccagggcaccaaggtggaaatcaaaggcggaggcggaagtggaggcggaggatctggcggcggaggctctgaagtgcaactggttcagagcggagccgaagtgaagaaacctggggcctctgtgaaggtgtcctgcaaagccagcggctacacctttaccgactactacctggacgtggtcgtgcggcaagctcctggacaaggactggaatggatcggcagagtgaacccctacaacggcggcaccatctacaaccagaaattcaagggaagagtgaccctgaccagagacaccagcacctccacagcctacctggaactgagcagcctgagaagcgaagataccgccgtgtactactgcgccagggaccactacagatatgaccctctgctggactactggggccagggaaccctggttacagtgtctagt

SEQ ID NO: 639 - DNA, 744 bp, Artificial Sequence
  Synthetic Polynucleotide
gacatccagatgacacagagccctagcagcctgtctgccagcgtgggagacagagtgaccatcacctgtagagccagccagagcgtgtccaccagcagctacaactacatgcactggtatcagcagaagcccggcaagcctcctaagctgctgattaagtacgccagcaacctggaaagcggcgtgcccagcagattttctggcagcggctctggcaccgacttcaccctgacaatatccagcctccagcctgaggacttcgccacctactactgtcagcactcctgggagatccctctgacattcggccagggcaccaaggtggaaatcaaaggcggaggcggaagtggaggcggaggatctggcggcggaggctctgaagtgcaactggttcagagcggagccgaagtgaagaaacctggggcctctgtgaaggtgtcctgcaaggccagcggctacagcttcaccgactattatatgcactgggtccgacaggctccaggccagggacttgagtggatcggcagaatcaacccctacaacggcgctgccttctacagccagaacttcaaggatagagtgaccctgaccgtggacaccagcaccagcacagcctacctggaactgagcagcctgagaagcgaggacaccgccgtgtactactgcgccattgagagaggcgctgacctggaaggctacgctatggattattggggccagggaaccctggtcaccgtgtcatct

SEQ ID NO: 640 - DNA, 738 bp, Artificial Sequence
  Synthetic Polynucleotide
gagatcgtgctgacacagtctccagccacactgagcgcttctccaggcgagagagtgaccctgacctgtagagccagcagcaacgtgatctccagctacgtgcactggtatcagcagaagcctggcagcagccccagactgtttctgtacagcaccagcaatctggcctccggcgtgccaagcagattttctggctctggcagcggcaccgacttcacctttaccatctctagcctggaagccgaggacgccgccacctactactgtcagcagtacagcggctaccctctgaccttcggccagggcacaagactggaaatcaaaggcggaggcggaagtggaggcggaggatctggcggcggaggctctcaagttcagctgcaagagtctggccctggcctggtcaagcctagcgaaacactgagcctgacctgcgccgtgtctggctactctatcaccagcgcctactattggaactggatcagacagcctcctggcaaaggactggaatggatcggctacatcagctacgacggcagaaacaactacaaccccagcctgaagaaccggatcaccatcaatcccgacaccagcaagaaccagttcagcctccagctgaacagcgtgacccctgaggataccgccgtgtactactgtgccagagaaggcgactacgacgtgggcaactactacgctatggactactggggccagggaaccctggtcacagtctcttct

SEQ ID NO: 641 - DNA, 738 bp, Artificial Sequence
  Synthetic Polynucleotide
gagatcgtgctgacacagtctcccgccacactgtcactgtctccaggcgaaagagccacactgagctgtagagccagcagcaacgtgatctccagctacgtgcactggtatcagcagaagcctggacaggcccctcggctgctgatctacagcacaagcaatctggcctctggcatccccgccagattttctggctctggaagcggcaccgacttcaccctgaccataagcagcctggaacctgaggacttcgccgtgtactactgccagcagtatagcggctaccctctgaccttcggccagggcacaagactggaaatcaaaggcggaggcggaagtggaggcggaggatctggcggcggaggctctgaagtgcaactggtggaaagtggcggcggactggtgcaacctggaagaagcctgagactgtcctgtgccgccagcggctactctatcacaagcgcctactactggaactgggtccgacaggctcctggcaaaggactggaatgggtgtcctacatcagctacgacggcagaaacaactacaaccccagcctgaagaaccgcttcaccatcagccgggacaacgccaagaagtccctgtacctccagatgaacagcctgagagccgaggacacagccctgtactattgcgccaaagagggcgactacgacgtcggcaactactacgctatggactactggggccagggaaccaccgtgactgtctcttct

SEQ ID NO: 642 - DNA, 765 bp, Artificial Sequence
  Synthetic Polynucleotide
gacgtggtcatgacacagaccccactgagcctgcctgtgtctctgggagatcaggccagcatctcctgtagaagcagccagagcctggtgcacagcaacggcaacacctacctgcggtggtatctccagaagcctggacagagccccaaggtgctgatctacaaggtgtccaacagagtgtccggcgtgcccgatagattttctggcagcggctctggcaccgacttcaccctgaagatcaatagagtggaagccgaggacctgggcgtgtacttctgtagccagagcacccatgtgccttggacctttggcggaggcaccaagctggaaatcaagagcagcgccgacgacgccaagaaggacgccgccaaaaaggatgatgccaagaaagacgatgctaaaaaagacggcggcgtgaagctggacgagacaggcggaggacttgttcaacctggcggagccatgaagctgagctgtgtgaccagcggctttaccttcggccactactggatgaactgggtccgacagtcccctgagaaaggactggaatgggtcgcccagttcagaaacaagccctacaactacgaaacctactacagcgacagcgtgaagggcagattcaccatcagccgggacgacagcaagtccagcgtgtacctccagatgaacaacctgcgcgtggaagataccggcatctactactgtaccggggccagctacggcatggaatatctcggccagggcaccagcgtgaccgtgtctaca

SEQ ID NO: 643 - DNA, 753 bp, Artificial Sequence
  Synthetic Polynucleotide
caggtgcaactggtggaatctggcggcaatctggttcagcctggcggctctctgagactgtcttgtgccgccagcggcttcaccttcggcagcttttctatgagctgggtccgacaagctcctggcggaggacttgaatgggtggcaggactgtctgccagaagcagcctgacacactacgccgactctgtgaagggcagattcaccatcagccgggacaacgccaagaacagcgtgtacctccagatgaacagcctgagagtggaagataccgccgtgtactactgcgccagaagaagctacgacagcagcggctactggggccacttctacagctacatggatgtgtggggccagggcaccctggttacagtttctggcggaggcggaagtggaggcggaggatctggcggcggaggctcttctgtgctgacccagcctagctccgtgtctgctgctcctggacagaaagtgaccatctcctgtagcggcagcaccagcaacatcggcaacaactacgtgtcctggtatcagcagcaccccggcaaggcccctaagctgatgatctacgacgtgtccaagaggcccagcggcgtgccagatagattttccggcagcaagagcggcaacagcgccagcctggatattagcggactccagtctgaggacgaggccgactactattgcgccgcctgggatgatagcctgagcgagtttctgtttggcaccggcaccaagctgacagtgcttgga

SEQ ID NO: 644 - DNA, 726 bp, Artificial Sequence
  Synthetic Polynucleotide
cagtctgtggtcacacagcctccatctgtgtctggcgctccaggccagagagtgaccatctcttgtaccggcagcagcagcaatatcggagccggctatgacgtgcactggtatcagcagctccctggcacagcccctaaactgctgatctacggcaacagcaacagacccagcggcgtgcccgatagattttccggctctaagagcggcacaagcgccagcctggctattactggactccaggccgaggacgaggccgactactactgtcagagctacgacagcagcctgagcggcagctatgtgtttggcaccggcaccaagctgacagtgcttggaggcggaggcggaagtggaggcggaggatctggcggcggaggctctgaagttcaactggtggaaaccggcggcaacctggttcaacctggcgcttctctgagactgagctgtgccgccagcggctttagctttagcggaacagccatgcactgggtccgacaggcacctggcaaaggactggaatgggtgtccaccatcagcagcacaggcagaagcacctactaccgggacagcgtgaagggcagattcaccatctccagagacaacagcaagaacaccctgtacctccagatgaacagcctgagaggcgaggacaccgccgtgtactattgtgccagagtgtccttcgactactggggccagggaaccctggtcacagtctcttct

SEQ ID NO: 645 - DNA, 732 bp, Artificial Sequence
  Synthetic Polynucleotide
cagtctgtggttacacagcctgcctccgtgtctggctctcctggccagagcatcaccatcagctgtaccggcaccagctctgatgtcggcggctacaattacgtgtcctggtatcagcagcaccccggcaaggcccctaagctgatgatctacgacgtgtccaagaggcccagcggcgtgtccaatagattcagcggcagcaagagcggcaacaccgccagcctgacaatttctggactgcaagccgaggacgaggccgactactactgtagcagctacaccagcagcagcacactggtgtttggcggaggcaccaagctgacagttcttggaggcggaggcggaagtggaggcggaggatctggcggcggaggctctgaagttcagctggttgaaagcggcggagcctttgttcagcctggcggatctctgagactgagctgtgccgccagcggcttcacattttccagctacgccatgacctgggtccgacaggctcctggcaaaggactggaatgggtgtccaccatctccggcagaggcagaagcaccttctacgccgatagcgtgaagggcagattcacaatcagccgggacaacagcaagaacaccctgtacctccagatgaacagcctgagagccgaggataccgccgtgtactactgtgcccggtactatcacgctggcgcctttgatctttggggccagggaacactggtcaccgtgtcatct

SEQ ID NO: 646 - DNA, 738 bp, Artificial Sequence
  Synthetic Polynucleotide
gacgtggtcatgacacagagcccttctagcctgtctgccagcgtgggcgacagagtgacaatcacctgtcagagcagcctggacatcagccactacctgaactggtatcagcagaagcccggcaaggcccctaagctgctgatctacgacgccagcaatctggaaaccggcgtgcccagcagattttctggcagcggaagcggcacccacttcaccttcacaatatccagcctccagcctgaggacttcgccacctactactgccagcagtacgacaacctgcctctgacctttggcggaggcaccaagctggaaatcaagagaggcggaggcggaagtggaggcggaggatctggcggcggaggctctcaagttcaactggttcaatcaggcggaggcgtggtgcaacctggtggctctctgagagtgtcttgtgctgcctctggcgtgaccctgagcgactatggaatgcactgggtccgacaggcccctggcaaaggacttgagtgggtcgccttcatcagaaacgacggcagcgacaagtattacgccgacagcgtgaagggcagattcaccatcagccgggacaacagcgagaaaaccgtgtctctccagatgtctagcctgagagccgaggacaccgccgtgtactactgtgccaagaatggcgagagcggccctctggactactggtatctggatctgtggggcagaggcaccctggtcacagtctcttct

SEQ ID NO: 647 - DNA, 759 bp, Artificial Sequence
  Synthetic Polynucleotide
gacgtgatgctgacccagacaccactgagcctgcctgtgtctctgggcgatcaggccagcatctcctgtagaagcagccagagcatcctgcacagcaccggcgatacctacctggaatggtatctccagaagcctggacagagccccaagctgctgattaacaaggtgtccaaccggctgagcggcgtgcccgatagattttctggcagcggctctggcaccgacttcaccctgaagatcagcagagtggaagccgaggacctgggcgtgtactactgcttccaaggcagccatgttccttggacctttggcggaggcaccaagctggaaatcaagagagctgacgccgctcctaccgtgtccatctttcctggaggcggtggaagtggcggcggtggttcaggcggcggaggatctcaagtgaagctccagcagagcggccctagccttgtgaaacctggcgcttccgtgaagatgagctgcaaggccagcggctacaccttcaccgatttctacatgaaatgggtcaagcagagccacggcaagtctctggaatggatcggcgacatcaaccccaacatcggagacaccttctacaaccagaagttcaagggcaaagccacactgaccgtggacaagagcagcagcaccgcctacatgcagctcaacagcctgaccagcgaggacagcgccgtgtacttttgttccgtgggctacttcgacgtgtggggagccggaacaaccgtgacagtctcttct

SEQ ID NO: 648 - DNA, 759 bp, Artificial Sequence
  Synthetic Polynucleotide
ctgcctgttctgacacagcctccatccgtgtctgtggcccctggaaagaccgccagaatcacatgcggcggcaacaacatcggcagcaagagcgtgcactggtatcagcagaagcctggacaggctcctgtgctggtggtgtacgacgacagcgatagacctagcggcatccccgagagattcagcggcagcaattccggcaataccgccacactgaccatcagcagagtggaagctggcgacgaggccgactactactgccaagtgtgggacagcagcagcgactacgtggtgtttggcggcggaacaaagctgacagtgcttggcggaggcggaagtggaggcggaggatctggcggcggaggctctgaagttcaactggtgcagagcggagccgaagtgaagaagccaggcgagagcctgaagattagctgcaaaggcagcggctacagcttcaccagctactggatcggctgggtccgacagatgcctggcaaaggactggaatggatgggcatcatctaccccggcgacagcgacaccagatacagccctagctttcagggccaagtgaccatctccgccgacaagagcatcagcacagcctacctccagtggtcctctctgaaggccagcgataccgccatgtactactgcgccagacaagtctggggatggcaaggcggcatgtaccccaggtctaactggtggtacaacctggactcttggggccagggcacactggtcacagtctcttct

SEQ ID NO: 649 - DNA, 738 bp, Artificial Sequence
  Synthetic Polynucleotide
gagctggtcatgacacagagccctgcttctctggccgtgtcactgggacagagagccaccatctcttgcagagccagcgagagcgtggacagctacggcaagagcttcatgcactggtatcagctcaagcccggccagcctcctaagctgctgatctacagagcctccaacctggaaagcggcgtgccagccagattttctggcagcggcagcagaaccgacttcaccctgaccattgatcccgtggaagccgatgatgccgccacctactactgccagcagaacaacgaggacccctggacatttggcggaggcaccaagctggaaatcaaaggcggaggcggaagtggaggcggaggatctggcggcggaggctctgaagtgcagctcgaacagtctggccccgagcttgtgaaacctggcgcttccgtgaagatgagctgcaaggccagcggctacaccttcaccaactactacatgaaatgggtcaagcagagccacggcaagtccctggaatggatcggcgatctgaaccccaacaacggcgacaccttctacaaccagaagttcaagggcaaagccacactgaccgtggacaagagcagcaacaccgcctacatgcagctcaactccctgaccagcgaggacagcgccgtgtactactgtgccagaaccggcagatacgaagagaacgctatggactactggggccagggcacaagcgtgacagtctcttct

SEQ ID NO: 650 - DNA, 732 bp, Artificial Sequence; identical to SEQ ID NO: 623
  Synthetic Polynucleotide

SEQ ID NO: 651 - DNA, 732 bp, Artificial Sequence; identical to SEQ ID NO: 532
  Synthetic Polynucleotide

SEQ ID NO: 652 - DNA, 720 bp, Artificial Sequence
  Synthetic Polynucleotide
gacgtggtcatgacacagagcccttctagcctgtctgccagcgtgggcgacagagtgaccatcacctgtatggcctccgaggacatctacatccggctggcctggtatcagcagaagcctggaaacgcccctaagctgctgatctacgccgccacctctctggaaacaggcgtgccaagcagattttccggcagcggctctggcaccgatttcaccctgacaatatccagcctccagcctgaggacttcgccacctactactgccagcagtattggagcagcccctggacatttggcggaggcaccaaggtggaaatcaaaggcggaggcggaagtggaggcggaggatctggcggcggaggctctcaggttcagctgcaagagtctggccccggactggtcaagcctagccaaacactgagcctgacctgtaccgtgtccggctacagcatcaccagcgactacacctggaactggatcagacagcctcctggcaacggactggaatggatcggctacatcacctacagcggcagcaccagctacaaccccagcctgaaaagccgggtgctgatctccgtggacaccagcaagaatcaggtgtccctgaagctgagcagcgtgacagccgctgataccgccgtgtactactgtgccagactggggagaagatacacaatggactactggggccagggcaccaccgtgacagtttcttct

SEQ ID NO: 653 - DNA, 735 bp, Artificial Sequence
  Synthetic Polynucleotide
gaggtgcaactggttgagtctggcggaggactggtgcagcctggaagaagcctgagactgtcttgtgccgccagcggcttcaccttcgacgattatgccatgcactgggtccgacaggcccctggcaaaggacttgaatgggtgtccggcatctcctggaacagcggctctatcggctacgccgattccgtgaagggcagattcaccatcagccgggacaacgccaagaacagcctgtacctccagatgaactccctgagagccgaggacacagccctgtactactgcgccaaagacaaaggcggaggctactacgacttttggagcggcagcgattattggggccagggcacactggtcacagtgtctagcggcggaggcggaagtggaggcggaggatctggcggcggaggctcttcttctgagctgacacaggaccctgccgtgtctgttgctctgggccagacagtgcggattacctgtcagggcgatagcctgagaagctactacgcctcctggtatcagcagaagccaggccaggctcctgtgctggtcatctacggcaagaacaacagacccagcggcatccccgatagattcagcggaagcagctctggcaataccgccagcctgacaattactggcgctcaggccgaggacgaggccgactactactgcaacagcagagatagcagcggctgggttttcggcggaggcacaaaactgacagtgctg

SEQ ID NO: 654 - DNA, 762 bp, Artificial Sequence
  Synthetic Polynucleotide
gaagtgcagctccagcagtctggacctggcctggttaagcctagccagacactgagcctgacctgtgccatcagcggcgatagcgtgctgagcaacagcgacacctggaactggatcagacagagccctagcagaggactggaatggctgggcagaacctaccacagaagcacttggtacgacgactacgccagctctgtgcggggcagagtgtccatcaatgtggacaccagcaagaaccagtacagcctgcaactgaacgccgtgacacctgaggataccggcgtgtactactgcgccagagacagactccaggacggcaactcttggagcgacgcctttgatgtgtggggccagggcacaatggtcaccgtttctagcggcggaggcggaagtggaggcggaggatctggcggcggaggctctcaatctgctctgacacagcctgccagcgtgtcaggatctcctggacagagcatcaccatctcttgcaccggcaccagctctgatgtcggcggctacaattacgtgtcctggtatcagcagcaccccggcaaggcccctaagctgatgatctacgacgtgtccaacagacccagcggcgtgtccaatagattctccggcagcaagagcggcaacaccgccagcctgacaatttctggactgcaagccgaggacgaggccgactactactgtagcagctacaccagcagcagcacactggtgtacgtgttcggcacaggcaccaaagtgaccgtgctt

SEQ ID NO: 655 - DNA, 756 bp, Artificial Sequence
  Synthetic Polynucleotide
caggtgcaactggttcagtctggggccgaagtgaagaaacctggggcctctgtgaaggtgtcctgcaaggcttccggctacacctttaccagctacgacatcaactgggtccgacaggccacaggccaaggactggaatggatgggctggatgaaccccaacagcggcaataccggctacgcccagaaattccagggcagagtgaccatgaccagaaacaccagcatcagcaccgcctacatggaactgagcagcctgagaagcgaggacaccgccgtgtactattgcgccagaggcgacagcaactactggtcctactacggcatggacgtgtggggccagggaacactggttacagtttctagcggcggaggcggaagtggaggcggaggatctggcggcggaggctctggcggtggtggatctcaatctgtgctgacccagcctagatccgtgtctggctctcctggacagagcgtgaccatctcttgtaccggcaccagctctgatgtcggcggctacaattacgtgtcctggtatcagcagcaccccggcgaagcccctaagctgattatctacgacgccgacaagcggcccagcggcatcagcaatagattcagctctggcaagagcggcaacaccgccagcctgacaatcagcggactccaggtggaagatgaggccgactactactgctgctcctatgccggcggaagcacctgggttttcggaggcggtacaaaagtgaccgtgctg

SEQ ID NO: 656 - DNA, 762 bp, Artificial Sequence
  Synthetic Polynucleotide
gaagtgcagctccagcagtctggacctggcctggttaagcctagccagacactgagcctgacctgtgccatcagcggcgatagcgtgtcctctaatagcgccgcctggaactggatcagacagagccctagcagaggactggaatggctgggcagaacctactaccgcagcaagtggtacagcgactacgccgtgtccgtgaagtcccggatcaccatcaatcccgacaccagcaagaaccagttcagcctgcaactgaacagcgtgacccctgaggataccgccgtgtactactgcgccagagatccctacgacttttggagcggctaccccgacgcctttgacatctggggacagggcacaatggtcaccgtttctagcggcggaggcggaagtggaggcggaggatctggcggcggaggctctcaatctgctctgacacagcctgccagcgtgtcaggatctcctggacagagcatcaccatctcttgcaccggcaccagctctgatgtcggcggctacaattacgtgtcctggtatcagcagcaccccggcaaggcccctaaagtgattatcagcgaagtgaacaacagacccagcggcgtgtcccacagattcagcggctctaagtctggcaacaccgccagcctgacaatctctggactgcaagccgaggacgaggccgactacttctgtagcagctacaccagcggcagaaccctgtacgtgttcggcacaggcagcaaagtgacagtgctggga

SEQ ID NO: 657 - DNA, 759 bp, Artificial Sequence
  Synthetic Polynucleotide
gaagtgcagctccagcagtctggacctggcctggttaagcctagccagacactgagcctgacctgtgccatcagcggcgattccatgctgagcaacagcgacacctggaactggatcagacagagccccagcagaggcctggaatggctgggcagaacataccacagaagcacttggtacgacgactacgccagctctgtgcggggcagagtgtccatcaatgtggacaccagcaagaaccagtacagcctgcaactgaacgccgtgacacctgaggataccggcgtgtactactgtgccagagtgcggctccaggacggcaattcttggagcgacgcctttgatgtgtggggccagggcacaatggtcaccgtttctagcggcggaggcggaagtggaggcggaggatctggcggcggaggctctcaatctgctctgacacagcctgccagcgcctctggatctcctggacagagcgtgaccatctcctgtaccggcacctcttctgatgtcggcggctacaactacgtgtcctggtatcagcagcaccccggcaaggcccctaagctgatgatctacgacgtgtccaacagacccagcggcgtgtccaatagattctccggcagcaagagcggcaacaccgccagcctgacaatttctggactgcaagccgaggacgaggccgactactactgtagcagctacaccagcagcagcacactgtacgtgttcggcacaggcacccagctcacagttctt

SEQ ID NO: 658 - DNA, 732 bp, Artificial Sequence
  Synthetic Polynucleotide
gagatcgtgctgacacagtctcccgccacactgtcactgtctccaggcgaaagagccacactgagctgtagcgccagcagcagcgtgtcctacatgtactggtatcagcagaagcccggacaggcccctagactgctgatctacagaaccagcaacctggcctctggcatccccgccagattttctggctctggcagcggcaccgatttcaccctgaccataagcagcctggaacctgaggacttcgccgtgtactactgccagcagtaccacagctaccccaccacctttggacagggcaccaaggtggaaatcaagcggacagttggcggaggcggaagtggaggcggaggatctggcggcggaggctctgaagtgcagctggttgaatcaggtggcggcctggttcaacctggcggatctctgagactgtcttgtgccgccagcggcttcagcttcaacacctacgccatgaactgggtccgacaggctcctggcaaaggactggaatgggtgtcccacatcagaagcaagagcaacaacttcgccacctactacgccgacagcgtgaaggacagattcaccatcagccgggacaacgccaagaacagcctgtacctccagatgaactccctgagagccgaggacaccgccgtgtattattgcgccagacaaggcggcgacttccctatggattattggggccagggcaccctggtcaccgtttcttct

SEQ ID NO: 659 - DNA, 720 bp, Artificial Sequence
  Synthetic Polynucleotide
gacgtggtcatgacacagagcccttctagcctgtctgccagcgtgggcgacagagtgaccatcacctgtaaagccagcgaggacatctacatccggctggcctggtatcagcagaagcctggaaaggcccctaagctgctgatctacgccgccacctctctggaaacaggcgtgccaagcagattttccggcagcggctctggcaccgatttcaccctgacaatatccagcctccagcctgaggacttcgccacctactactgccagcagtattggaccacaccttggacctttggcggaggcaccaaggtggaaatcaaaggcggaggcggaagtggaggcggaggatctggcggcggaggctctcaggtgcagctccaagagtctggccctggactggtcaagcctagccagacactgagcctgacctgtaccgtgtccggctacagcatcaccatcgactacacctggaactggatcagacagcctcctggcaaaggactggaatggatcggctacatcacctacagcggcagcaccgactacaaccccagcctgaaaagccgggtgctgatctccgtggacaccagcaagaatcaggtgtccctgaagctgagcagcgtgacagccgctgataccgccgtgtactactgtgccagactgggcagaagatacgccctggattattggggccagggcaccaccgtgacagtgtcatct

SEQ ID NO: 660 - DNA, 735 bp, Artificial Sequence
  Synthetic Polynucleotide
gacatccagctgactcagagccctagctttctgagcgccagcgtgggcgacagagtgaccattacatgtagagccagccagggcatcagcaccgacctgaactggtatcagcagaagcctggcaaggcccctaagctgctgatctacgccgccagcaatctggaaagcggcgtgccaagcagattttccggctctggcagcggcaccgagttcaccctgacaatatctagcctccagcctgaggacttcgccacctactactgccagcagagctacaactggccctacacctttggcggaggcaccaaggtggaaatcaagagaggcggaggcggaagtggaggcggaggatctggcggcggaggctctgaagttcagctggttgaatcaggcggaggactcgtgaaacctggcggctctctgagactgtcttgtgccgccagcggcttcaccttcagcaacttcgagatgaactgggtccgacaggccccaggcaaaggactggaatgggtgtccggcatcagctccaatggccggtacatcaactacgccgacagcgtgaagggcagattcaccatcagccgggacaacgccaagaacagcctgtacctccagatgaactccctgagagccgaggacaccgccgtgtactattgtgccagagtggtggacttcgaccaggactacaacggcttcgactattggggccagggcaccctggttaccgttagctct

SEQ ID NO: 661 - DNA, 729 bp, Artificial Sequence
  Synthetic Polynucleotide
gacatccaactgactcagagccccagctttctgagcgcctctgtgggcgacagagtgaccatcacatgtagtctcagcctgggcatcagcacatggcgggattggtttccgccgaggcttggcaggggccttgagccgctgacctacgccgccagcacactgcaaagcggagtgcctagcagattttccggcagcggctctggcaccgagttcaccctgacaatatccagcctccagcctgaggacttcgccacctactactgccagcagctcaacagctaccctctgacctttggcggaggcaccaaggtggaaatcaagagaggcggaggcggaagtggaggcggaggatctggcggcggaggctctgaagttcaactggttgagtctggtggcggcctggttaagcctggcggatctctgagactgagctgtgccgccagcggcttcacctttagcacatacggcatgagctgggtccgacaggcccctggaaaaggacttgagtgggtcgcctacatcaacaacggctccggctacatctactacgccgacagcgtgaagggcagattcaccatcagccgggacaacgccaagaacagcctgtacctccagatgaactccctgagagccgaggacaccgccgtgtactattgtgccagaggacagtggtggagcggcggagactttgattattggggccagggcaccctggtcaccgtttcttct

SEQ ID NO: 662 - DNA, 735 bp, Artificial Sequence
  Synthetic Polynucleotide
gacatccagatgacccagaccacaagcagcctgtctgccagcctgggcgacagagtgaccatctcttgtagagccagccaggacatcagcaactacctgaactggtatcagcagaaacccgacggcaccgtgaagctgctgatctactacaccagcatcctgcacagcggcgtgcccagcagattttctggctctggcagcggcaccgactacagcctgaccatcagcaatctggaacaagaggacttcgctacctacttctgccagcaaggcaacaccctgccttggacatttggcggaggcaccaagctggaaatcaaagctggcggaggcggaagtggaggcggaggatctggcggcggaggctctgaagtgcaactggttgaatctggcggcggactggttaagcctggcggatctctgaagctgagctgtgccgcctctggcttcgccttcagcatctacgatatgagctgggtccgacagacccctgagaagagactggaatgggtcgcctacatctctagcggcggagggacctactatcccgacacagtgaagggcagattcaccatctccagagacaacgccaagaacaccctgtacctccagatgagcagcctgaagtccgaggacaccgccatgtactactgcgccagacacagcggctatggcacacattggggagtgctgtttgcctactggggccagggaacactggtcacagtttctgct

SEQ ID NO: 663 - DNA, 765 bp, Artificial Sequence
  Synthetic Polynucleotide
gacatcgtgatgacacagagccctgatagcctggccgtgtctctgggagagagagccaccatcaactgcaagagcagccagagcctgctgtacagaagcaaccagaagaactacctggcctggtatcagcagaagcccggccagcctcctaagctgctgatctactgggccagcaccagagaaagcggcgtgcccgatagattttctggctctggcagcggcaccgacttcaccctgacaatttctagcctgcaagccgaggacgtggccgtgtactactgccagcagtattacaactaccccagaaccttcggccagggcaccaaggtggaaatcaagagaacagttggcggaggcggaagtggaggcggaggatctggcggcggaggctctgaagttcagctgcttgaatcaggcggcggactggttcaacctggcggatctctgagactgagctgtgccgccagcggctacagcatcacaagcgactatgcctggaactgggtccgacaggcccctggcaaaggactggaatgggtgtcctacatcagcaacagcggcagcaccagctacaaccccagcctgaagtcccggttcaccatcagcagagacaacagcaagaacaccctgtacctccagatgaacagcctgagagctgaggacaccgccgtgtattattgcgccaaagagcggaactacgactacgacgattactactacgctatggactactggggccagggaaccctggtcacagtctcttct

SEQ ID NO: 664 - DNA, 744 bp, Artificial Sequence
  Synthetic Polynucleotide
gacgtggtcatgacacagagccctctgagcctgcctgtgacacttggacagcctgccagcatcagctgtagaagcagccagagcctgctgcacagcagcggcaatacctacctggaatggtatcagcagaggcccggacagagccccagacctctgatctacaagatcagcacccggttcagcggcgtgcccgatagattttctggctctggcagcggcaccgacttcaccctgaagattagcagagtggaagccgaggacgtgggcgtgtactactgcttccaaggcagccacgtgccatacacctttggcggcggaacaaaggtggaaatcaagagaggcggaggcggaagtggaggcggaggatctggcggcggaggctctcaagttcagctggttcagagcggagccgaagtgaagaaacctggggcctctgtgaaggtgtcctgcaaagcctctggcctgaccatcgaggactactacatgcactgggtccgacaggcccctggacaaggacttgaatggatgggctggatcgaccccgagaacggcgatacagagtacggccctaagttccagggcagagtgaccatgaccagagacaccagcatcaacaccgcctacatggaactgagccggctgagatccgatgacaccgccgtgtactattgcgccgtgcacaatgcccactacggcacttggtttgcctattggggccagggcacactggtcaccgttagctct

SEQ ID NO: 665 - DNA, 720 bp, Artificial Sequence
  Synthetic Polynucleotide
gacatccagatgacacagagccctagcagcctgtctgccagcgtgggagacagagtgaccatcacctgtagagccagcgagaacatctacagcaacctggcctggtatcagcagaagcctggcaaggcccctaagctgctgatctacgccgccaccaatctggctgatggcgtgccaagcagattttccggctctggcagcggcaccgatttcaccctgacaatatccagcctccagcctgaggacttcgccacctactactgccagcacttttggggcacccctacattcggccagggcaccaaggtggaaatcaagagaacagttggcggaggcggaagtggaggcggaggatctggcggcggaggctctgaagtgcagctggttgaatcaggtggcggcctggttcaacctggcggatctctgagactgagctgtgccgcctctggcttcagcctgacaaattacggcgtgcactgggtccgacaggcccctggaaaaggactggaatgggtgtccgtgatttggagcggcggcagcaccgattacaacgccgccttcatcagccggttcaccatcagcgccgacaccagcaagaataccgcctacctccagatgaactccctgagagccgaggacaccgccgtgtactattgcgccagagaactgatccacgctatggacaactggggccagggaaccctggtcacagtctcttct

SEQ ID NO: 666 - DNA, 741 bp, Artificial Sequence
  Synthetic Polynucleotide
gacttcgtgatgacacagagccctctgagcctgcctgtgacacctggcgaacctgccagcatcagctgtagaagcagccagagcatcgtgcacagcaacggcaacacctacctggaatggtatctccagaagcctggacagagcccacagctgctgatctacaaggtgtccaacagattcagcggcgtgcccgacagattttctggcagcggctctggcaccgacttcaccctgaagattagcagagtggaagccgaggacgtgggcgtgtactactgcttccaaggctctcacgtgcccctgacctttggacagggcaccaagctggaaatcaagagaggcggaggcggaagtggaggcggaggatctggcggcggaggctctgaagtgcagctggttgaaagcggagccgaagtgaagaaacctggggcctctgtgaaggtgtcctgcaaggccagcggctacacctttaccagctactggattcactgggtccgacaggcccctggacaaggacttgagtggatgggcgagaacgacccctccaacggcaggaccaactacaacgagaagttcaagaaccgcgtgaccctgaccgtggacaccagcatctctaccgcctacatggaactgagccggctgagatccgatgacaccgccgtgtactattgcgccagaggacccaactacttttacagcatggactactggggccagggcacaatggtcaccgttagctct

SEQ ID NO: 667 - DNA, 720 bp, Artificial Sequence
  Synthetic Polynucleotide
gacatccagctgactcagagccctagctttctgagcgccagcgtgggcgacagagtgaccatcacatgtagcgccagatccagcatcagcttcatgtactggtatcagcagaagcccggcaaggcccctaagctgctgatctacgacaccagcaatctggcctctggcgtgcccagcagattttctggaagcggcagcggcaccgagttcaccctgacaatctctagcctggaagccgaggatgccgccacctactattgccagcagtggtccagctatcccctgacatttggacagggcaccaagctggaaatcaaaggcggaggcggaagtggaggcggaggatctggcggcggaggctctcaggttcagctggttcagtctggggccgaagtgaagaaacctggggcctctgtgaaggtgtcctgcaaggcttccggctacacctttaccggctcttggatgaactgggtccgacaggctcctggacagggactcgaatggatcggcagaatctatcctggcgacggcgagacaaactacaacggcaagttcaaggaccgcgtgacaatcaccgccgacaagagcacaagcaccgcctacatggaactgagcagcctgcggagcgaagataccgccgtgtactactgcgcccggatctacggcaacaacgtgtacttcgatgtgtggggccagggcacaaccgtgacagtctcttct

SEQ ID NO: 668 - DNA, 744 bp, Artificial Sequence
  Synthetic Polynucleotide
cagctggtgctgacacagtctccaagcgcctctgccagcctgggatctagcgtgaagctgacctgtacactgagcagcggccacaagaccgacaccatcgactggtatcagcagcagcctggcaaggcccctagatacctgatgaagctggaaggcagcggcagctacaacaaaggctctggcgtgcccgatagattcagcggcagttcttctggcgctgattggtatctgaccatcagcagcctccagagcgaggacgaggccgattactactgcggcacagactaccccggcaactacctgtttggcggcggaacacagctgacagtgcttggcggcggaggcggaagtggaggcggaggatctggcggcggaggctctcaagaacagctggttgaaagcggcggaggactggttcaacctggcggttctctgagactgagctgtgccgccagcggcttcaccttcagcgactactacatgagctggatcagacaggccccaggcaaaggactggaatgggtcgccacaatctaccccagcagcggcaagacctactacgccgattctgccaagggcagactgaccatctccagcgacaacgccaaggacagcctgtacctccagatgaacagcctgagagccgaggacaccgccgtgtactactgcaccagagatagctacgccgacgacgccgctctgtttgacatttggggccagggcaccaccgtgaccgtttcttct

SEQ ID NO: 669 - DNA, 729 bp, Artificial Sequence
  Synthetic Polynucleotide
gacatcgtgctgacacagagccctccaagcctggctatgagcctgggaaagagagccaccatcagctgtagagccagcgagagcgtgacaatcctgggctctcacctgatccactggtatcagcagaagcccggccagcctcctacactgctgattcagctggcctccaatgtgcagacaggcgtgccagccagattttctggcagcggcagcagaaccgacttcaccctgaccattgatcccgtggaagaggacgacgtggccgtgtactactgcctccagagcagaacaatccccagaacctttggcggaggcaccaagctggaaatcaaaggcggcggaggaagcggaggcggaggatctggtggtggtggatctcaaatccagctggtgcagtctggccccgagctgaagaaacctggcgagacagtgaagatcagctgcaaggccagcggctacaccttcaccgactacagcatcaactgggtcaagagagcccctggcaagggcctgaaatggatgggctggatcaacaccgaaaccagagagcccgcctacgcctacgacttcagaggcagattcgccttcagcctggaaaccagcgccagcacagcctacctccagatcaacaacctgaagtacgaggacaccgccacctacttttgcgccctggactacagctacgctatggactattggggccagggcaccagcgtgacagtctcttct

SEQ ID NO: 670 - DNA, 741 bp, Artificial Sequence
  Synthetic Polynucleotide
caggtacagctgcaggaatctgggcccggacttgtcaagccaagtcagacactttctcttacatgtaccgtgagcggcggaagtataagcagtggaggcttttactggtcttggatacggcagcacccaggcaaaggcttggagtggattggatacattcatcattcaggatctacacactataatccatcccttaagtcccgggtcaccattagcattgatacgtctaagaatctgttcagtctcaggctgtcctccgtcactgctgccgacacagccgtgtactactgcgcctccttggtttactgcggaggcgactgttatagcggctttgattattgggggcaggggaccctcgtaaccgtgagctctggaggcggaggatcaggtggcggtggatctggcggtggcggatctgatatccagctcactcaaagcccctctagtctctctgcctcagtgggggatcgggtcagttttacttgtcaagcttcacaggatatcaacaacttccttaattggtatcagcagaagccaggaaaagcacccaagctgctcatctatgatgcctcaaatttggagacgggtgttcccagtcgattctctgggtcagggtccgggaccgactttacgtttacgatctcctctctgcagcccgaagacatcgccacatactattgtcaacagtacggcaacttgcctttcacatttgggggcgggactaaggttgaaatcaagagg

SEQ ID NO: 671 - DNA, 735 bp, Artificial Sequence
  Synthetic Polynucleotide
caggtccaactgcaagaaagcggacccggactggtgaagccttctgagacacttagtctgacgtgcacggtcagtggcggctccatctcctcctattattggtcatggatacgacaacccccaggtaagggcctggaatggattggctatatctactattcaggaagcacgaactacaatcccagcctgaagtcccgagtgacaatttcagtagataccagtaaaaaccagttcagtcttaaactgtcaagcgtgacagctgccgacaccgctgtgtattactgcgtctcactggtgtattgtggaggggattgttatagcgggttcgattattggggacagggaaccctggtgactgtatcttccggaggcggaggatcaggtggcggtggatctggcggtggcggatctgatattcaactgacacaatcccccagctcactcagcgccagcgtgggggacagggttagctttacctgtcaagcctctcaggatataaataactttctgaactggtatcaacagaagcctgggaaggcgcccaaactcctgatctatgatgcgtccaacctggaaactggcgtgccttcacgctttagcggctctggcagtggtacagacttcacttttaccatctcttcacttcagccggaggacatcgccacatattactgtcaacagtacggaaacttgccctttacttttggaggcggcaccaaagttgaaatcaaaaga

SEQ ID NO: 672 - DNA, 750 bp, Artificial Sequence
  Synthetic Polynucleotide
caagttactttgaaggagtctggacctgtactggtgaagccaaccgagacactgacactcacgtgtacagtgagtggtttttccttgatcaacgcaaggatgggcgtcagctggatcaggcaaccccctggcaaggctctggaatggctcgctcacatattcagcaatgccgaaaaaagctaccggacaagcctgaaatcccgcctgactatttccaaggacacttctaagtctcaggtggtgctgaccatgaccaacatggacccggtggacaccgccacctattactgcgcaagaatccctgggtatggtgggaatggtgactaccattattatgggatggatgtgtgggggcaaggcacaaccgtaacggtctcaagcggaggcggaggatcaggtggcggtggatctggcggtggcggatctgacattcagatgacccaaagcccgtccagcctgtccgccagcctgggagatagagtgacaatcacgtgtagagcttcccaagggataagaaatgatctcgggtggtatcagcagaagcccggcaaagcccccaaaaggcttatatatgctagtagtacactgcagtctggagttccttcccgattttcaggtagcggctccggtacagagttcaccctcacgataagctcactccagcctgaggatttcgcaacgtactactgcctccagcacaacaattttccctggactttcggccagggcaccaaggtggagatcaagagg

SEQ ID NO: 673 - DNA, 732 bp, Artificial Sequence
  Synthetic Polynucleotide
cagatccagttggtggaatcagggggcggtgtggtgcagccgggtaggagcctgagactgtcatgcgtggcgtctggcttcacattcaagaactacggcatgcactgggtgcgacaggcccccggaaagggtttggagtgggtcgccgtgatctggtacgacggatctaatgagtattacggagatcctgtgaagggaaggttcaccatctcccgcgacaatagcaaaaatatgctctacctgcaaatgaactcactcagggcggatgatacggcggtctactattgcgctcgctcagggattgctgtggccggcgcattcgattactggggacagggtaccctggtgacagtatcaagcggaggcggaggatcaggtggcggtggatctggcggtggcggatctgagattgtgttgacacagtctcccgataccctgtcactgtcacccggcgagaaggcaacgctgagttgcagagcaagccagtcagtctcctcttcttttctggcctggtatcagcaaaaaccaggtcaggcaccatctctcctgatttacgttgccagcagacgggcggctggcattcccgacaggttctctggaagcggatctgggaccgattttaccctgacaattagccgcttggagcccgaagactttggtatgttttactgccagcactacggaaggacacctttcacatttggcccgggcacgaaagtcgatataaaacgc

SEQ ID NO: 674 - DNA, 735 bp, Artificial Sequence
  Synthetic Polynucleotide
gacatccaactgactcagagccccagctttctgagcgcctctgtgggcgacagagtgaccatcacatgtagagccagccagggcatcagcagctacctggcttggtatcagcagaagcctggcaaggcccctaaactgctgatctacgccgccagcacactccagtctggcgtgccaagcagattttctggcagcggctctggcaccgagttcaccctgacaatatccagcctccagcctgaggacttcgccacctactactgccagcaagtgaacagctaccctctgacctttggcggaggcaccaaggtggaaatcaagagaggcggaggcggaagtggaggcggaggatctggcggcggaggctctcaactgcaactgcaagagtctggccctggcctggtcaagcctagcgaaacactgagcctgacctgtaccgtgtctggcggcagcatcagctccagcacatattactggggctggatcagacagcctcctggcaaaggactggaatggatcggctccatctacttcaccggcagcaccgactacaaccccagcctgaagtccagggtgtccatctccgtggacaccagcaagaaccagttctccctgaagctgagcagcgtgacagccgctgataccgccgtgtactactgcgccaaagaggacgatagcagcggctactacagcttcgactattggggccagggcaacctggtcaccgttagctct

SEQ ID NO: 675 - DNA, 744 bp, Artificial Sequence
  Synthetic Polynucleotide
cagtctgctctgacccagcctagatccgtgtctggctctcctggacacagcgtgaccatcagctgtaccggcacctcttccgacgtgggcgactacaattacgtgtcctggtatcagcagaggcccggcaaggtgccaaagctgctgatctacgacgtgtccaagaggccaagcggcgtgcccgatagattttccggcagcaagtctggcaacaccgccagcctgacaatctctggactgcaagccgaggacgaggccatctacttttgtgccagctacgccggcaactacaacgtggtgtttggcggaggcaccaagctgacagtgcttggacaaggcggaggcggaagtggaggcggaggatctggcggcggaggctctcaagttcagctggtgcagtctggcagcgagctgaagaaacctggggcctctgtgaaggtgtcctgcaaggcttccggctacaccttcaacacctacgccatgaattgggtccgacaggctccaggccaaggactggaatggatgggctggatcaacaccaacaccggcaatcccacatacgcccagggcttcaccggcagattcgtgttctctctggacacctccgtgtccaccgcctacctccagatcagctctctgaaggccgaggataccgccgtgtactactgcgccagacggtacttcgattggctgctgggagccttcgacatctggggccagggaacaatggtcaccgtgtctagt

SEQ ID NO: 676 - DNA, 720 bp, Artificial Sequence
  Synthetic Polynucleotide
gacatccagatgacacagagccctagcagcctgtctgccagcgtgggagacagagtgaccatcacatgtagcgccagccagggcatcaacaactacctgaactggtatcagcagaagcccggcaaggcccctaagctgctgatccactacacatctggactgcacgctggcgtgcccagcagattttctggctctggcagcggcaccgactacaccctgacaatatctagcctccagcctgaggacgtggcaacctactactgccagcagtacagcatcctgccttggacctttggcggaggcaccaaggtggaaatcaagagaggcggaggcggaagtggaggcggaggatctggcggcggaggctctcaagttcagcttgttcagagcggagccgaagtgaagaaacccggcagctctgtgaaggtgtcctgcaaggcttccggctacgcctttagcagcagctggatgaactgggtccgacaggctcctggacagggccttgaatggatgggcagaatctatcccggcgacggcaatacccactacgcccagaaattccagggccgcgtgacactgacagccgacaagtctacaagcaccgcctacatggaactgagcagcctgagaagcgaggacaccgccgtgtactattgcggcgaaggctatctggaccctatggactattggggccagggcacactggtcaccgttagctct

SEQ ID NO: 677 - DNA, 729 bp, Artificial Sequence
  Synthetic Polynucleotide
gaggtgcagctggttgaatctggcggaggactggttcagcctggcggatctctgagactgtcttgtgccgccagcggctacaccttcaccacctattggatgcactgggtccgacaggcccctggcaaaggacttgagtgggtcggatatatcaggcccagcaccggctacacagagtacaaccagaagttcaaggaccgcttcaccatcagcgccgacaccagcaagaataccgcctacctccagatgaacagcctgagagccgaggacaccgccgtgtactactgtgccagatccagatggctgctggactattggggccagggcacactggttacagtttctggcggaggcggaagtggaggcggaggatctggcggcggaggctctgacattcagatgacacagagccctagcagcctgagcgcctctgtgggagacagagtgaccatcacatgcaagagcagccagagcgtgctgtactccagcaatcagaagaactacctggcctggttccagcagaagcctggcaaggctcctaagctgctgatctactgggccagcaccagagaaagcggcgtgccaagcagattttctggcagcggctctggcaccgacttcaccctgacaatatccagcctccagcctgaggacttcgccacctacttttgccaccagtacctgagcagctacacattcggacagggcaccaaggtggaaatcaagcgg

SEQ ID NO: 678 - DNA, 720 bp, Artificial Sequence
  Synthetic Polynucleotide
gacatccagatgacacagagccctagcagcctgtctgccagcgtgggagacagagtgaccatcacctgtagagccagccaggacatcagcaactacctgaactggtatcagcagaagcccggcaaggcccctaagctgctgatctactacaccagcagactgcacagcggcgtgcccagcagattttctggctctggcagcggcaccgacttcaccctgacaatatctagcctccagcctgaggacttcgccacctactattgccagcagggcaacaccctgccttacacatttggacagggcaccaaggtggaaatcaagagaggcggaggcggaagtggaggcggaggatctggcggcggaggctctgaagtgcagctggttgaatcaggtggcggcctggttcaacctggcggatctctgagactgagctgtgccgccagcggcttcaccttcagcgactactttatgagctgggtccgacaggcccctggcaaaggacttgaatgggtcgccaccatcagcaatggcggcacctacacttactaccccgacagcgtgaagggcagattcaccatctccagagacaacagcaagaacaccctgtacctccagatgaactccctgagagccgaggacaccgccgtgtactactgcgccagattcgacggctacatcttcgactattggggccagggcaccctggtcacagtctcttct

SEQ ID NO: 679 - DNA, 741 bp, Artificial Sequence
  Synthetic Polynucleotide
gacatccagatgacacagagccctagcagcctgtctgccagcgtgggagacagagtgaccatcacctgtaccgccagcagcagagtgtccagcagctacctgcactggttccagcagaagcctggcaaggcccctaagctgctgatctacagcaccagcaatctggcctctggcgtgcccagcagattttctggctctggcagcggcaccgacttcaccctgacaatatctagcctccagcctgaggacttcgccacctactactgccaccagtaccacagaagcccctacacattcggccagggcaccaaggtggaaatcaagagaggcggaggcggaagtggaggcggaggatctggcggcggaggctctgaagttcagctggttgaatctggcggcggactggttcaacctggcggatctctgagactgagctgtgccgcctctggctacgccttcagcaacagctggatcaactgggtccgacaggcccctggcaaaggactggaatgggtcggacaaatctaccccggcgactacgacaccaactacaacggcaagttcaagggcagattcaccatcagccgggacaagagcaagaacaccgcctacctccagatgaactccctgagagccgaggacaccgccgtgtactattgtgctagaggcggctccatctactacggcaacctgggcttcttcgacgtgtggggacagggcacactggtcacagtctcttct

SEQ ID NO: 680 - DNA, 711 bp, Artificial Sequence
  Synthetic Polynucleotide
gacatccagatgacacagagccctagcagcctgtctgccagcgtgggagacagagtgaccatcacatgtagcgccagcagcagcgtgacctacatgtactggtatcagcagaagcccggcaaggcccctaagctgctgatctacgacaccagcaatctggcctctggcgtgcccagcagattttctggctctggcagcggcaccgactacaccctgacaatatctagcctccagcctgaggacttcgccacctactactgccagcagtggtccaactatcccctgacattcggccagggcaccaaggtggaaatcaaaggcggaggcggaagtggaggcggaggatctggcggcggaggctctcaagttcagctggttcagagcggagccgaagtgaagaaacctggggcctctgtgaaggtgtcctgcaaggccagcggctacagcttcatcgagtacaccatcaactgggtccgacaggcccctggacaaggcctggaatggatcggcaacatcgacccctactacggcacaacctactacaaccagatgttcaccggcagagccacactgaccgtggacacctctatcagcaccgcctacatggaactgagccggctgagatccgatgacaccgccgtgtactattgtgccagaggcagcgcctggtttccctattggggacagggaaccctggtcaccgttagctct

SEQ ID NO: 681 - DNA, 711 bp, Artificial Sequence
  Synthetic Polynucleotide
gagatcgtgctgacacagagcccttctagcctgtctgccagcgtgggcgacagagtgaccatcacatgtagagccagcgagaacatctacagctacctggcctggtatcagcagaagcctggcaaggcccctaagctgctgatctacaacaccaagacactcggcgagggcgtgcccagcagattttctggttctggcagcggcaccgacttcaccctgaccatatctagcctgcagcctgaggacttcgccacctactactgccagcaccactacggcacccctttcacatttggccctggcaccaaggtggacatcaaaggcggaggcggaagtggaggcggaggatctggcggcggaggctctcaagttcagctggttcagagcggagccgaagtgaagaaacctggggcctctgtgaaggtgtcctgcaaggccagcggctacaccttcagcgactattgggtgcactgggtccgacaggctccaggacaaggactggaatggatgggagccatcgacggcagcgataccttcaacgattacagccagaaattcaaaggccgcgtgaccatgaccagagacaccagcatcagcaccgcctacatggaactgagccggctgagatccgatgacaccgccgtgtactattgtgccagaggcggcctgctgcagtattggggacagggaacactggtcaccgtgtcctct

SEQ ID NO: 682 - DNA, 723 bp, Artificial Sequence
  Synthetic Polynucleotide
caggttcagctccagcagtctggacctgagctggttaagcctggcgcttccgtgaagatcagctgcaaggcttccggctacgccttcagcagcagctggatgaactgggtcaaacagaggcccggcaaaggactggaatggatcggcagaatctaccccggcgacgaggacaccaattacagcggcaagttcaaggacaaggccacactgaccgccgacaagagcagcaccacagcctacatgcagctgagcagcctgaccagcgaggatagcgccgtgtacttctgtgccagaagcctgctgtacggcgactacctggattattggggccagggcacaaccctgacagtgtctagcggcggaggcggaagtggaggcggaggatctggcggcggaggctctcaaattgtgctgacacagagccccgccatcatgagcgcttctccaggcgagaaagtgaccatgacctgtagcgccagcagctccgtgtcttacatgcactggtatcagcagaagtccggcacaagccccaagcggtggatctacgataccagcaaactggcctccggcgtgcccgatagattttctggcagcggcagcggaaccagctacttcctgaccatcaacaacatggaagccgaggacgccgccacctactactgccagcagtggaacatcaaccctctgacctttggagccggcaccaagctggaactgaagaga

SEQ ID NO: 683 - DNA, 732 bp, Artificial Sequence
  Synthetic Polynucleotide
gacatccagatgacacagagcagcgcctacctgagcgtgtcccttggaggcagagtgaccatcacatgcaaggccagcgaccacatcaacaactggctggcctggtatcagcacaagcccggcaatgcccctagactgctgatctctggcgctaccacactggaaacaggcgtgcccagcagattttctggcagcggctctggcaaggactacaccctgagcatcaccagcctccagaccgaggatgtggctacctactactgccagcagagctggaacaccccttggacatttggcggaggcaccaagctggaaatcaagagaggcggaggcggaagtggaggcggaggatctggcggcggaggctctcaagttcagctgcaacagagcggagccgagcttgtcagacctggcagctctgtgaagattagctgcaaagccagcggctacgccttcagcagctactgggtcaactggatgaagcagcggcctggacagggcctcgaatggatcggccaaatctatcctggcgacggcgacaccaactacaacggcaagtttaagggcagagccaccgtgaccgccgacaagagcagcagcacatcctacatgcagttcagcagcctgaccagcgaggacagcgccgtgtatttctgtgccagatccatcaccaccgtcgtgggctgcgctatggattattggggccagggcacaagcgtgaccgtgtcatct

SEQ ID NO: 684 - DNA, 729 bp, Artificial Sequence
  Synthetic Polynucleotide
gaggttcagctgcttgagtctggcggaggactggttcaacctggcggaagcctgagactgtcttgtgccgccagcggcttcacctttagcagctacgccatgagctgggtccgacaggctcctggcaaaggactggaatgggtgtccgtgatctctggctctggcggcagacccaattacgccgattctgtgaagggcagattcaccatcagccgggacaacagcaagaacaccctgtacctccagatgaacagcctgcgcgacgaggataccgccgtgtactattgtgccaaggtggactacagcaactacctgttcttcgactactggggccagggcaccctggtcacagtttctagcggcggaggcggaagtggaggcggaggatctggcggcggaggctctgaaatcgtgctgacacagagccccggcacactgtcactttctccaggcgaaggcgctaccctgtcttgtagagctggacagtctgtgcggagcagctacctcggatggtatcagcagaagcctggacaggcccctcggctgttgatctacggtgcttctagcagagccacaggcatccccgatagattttctggcagcggctccggcaccgacttcaccctgacaatcagcagactggaacccgaggacttcgccgtgtattactgccagcagtacggctacagccctcctacatttggcggaggcaccaagctggaaatcaag

SEQ ID NO: 685 - DNA, 738 bp, Artificial Sequence
  Synthetic Polynucleotide
gacatcgtgctgacacagagccctccaagcctggctatgagcctgggaaagagagccaccatcagctgtagagccagcgagagcgtgacaatcctgggctctcacctgatccactggtatcagcagaagcccggccagcctcctacactgctgattcagctggcctccaatgtgcagacaggcgtgccagccagattttctggcagcggcagcagaaccgacttcaccctgaccattgatcccgtggaagaggacgacgtggccgtgtactactgcctccagagcagaacaatccccagaacctttggcggaggcaccaagctggaaatcaagggcagcacaagcggcagcggaaagcctggatctggcgagggatctaccaagggacagatccagctggtgcagtctggccccgagctgaagaaacctggcgagacagtgaagatcagctgcaaggccagcggctacaccttcaccgactacagcatcaactgggtcaagagagcccctggcaagggcctgaaatggatgggctggatcaacaccgaaaccagagagcccgcctacgcctacgacttcagaggcagattcgccttcagcctggaaaccagcgccagcacagcctacctccagatcaacaacctgaagtacgaggacaccgccacctacttttgcgccctggactacagctacgctatggactattggggccagggcaccagcgtgacagtctcttct

SEQ ID NO: 686 - DNA, 738 bp, Artificial Sequence
  Synthetic Polynucleotide
gacatccagatgacacagagccctagcagcctgtctgccagcgtgggagacagagtgaccatcacctgtagagccagcagcagcgtgtcctacatgcactggtatcagcagaagcccggcaaggcccctaagctgctgatctacgccaccagcaatctggcctctggcgtgccaagcagattttctggcagcggctctggcaccgacttcaccctgacaatatccagcctccagcctgaggacttcgccacctactactgccagcagtggaccttcaatcctcctaccttcggccagggcaccaagctggaaatcaagagaacagtggctgccggcggaggcggaagtggaggcggaggatctggcggcggaggctctcaagttcagctggttcagtctggggccgaagtgaagaaacctggggcctctgtgaaggtgtcctgcaaggcttccggctacacctttaccagctacaatatgcactgggtccgacaggctcccggccagagacttgaatggatgggcggcatctaccccggcaatggcgacacctcctacaaccagaaattcaagggccgcgtgacaatcaccagagacacctctgccagcaccgcctacatggaactgagcagcctgagaagcgaggacaccgccgtgtactactgcgccagatacgactacaactacgctatggactactggggccagggaaccctggtcacagtgtctagtgcttcc

SEQ ID NO: 687 - DNA, 723 bp, Artificial Sequence
  Synthetic Polynucleotide
gagatcgtgctgacacagagccctggcacactgtcactgtctccaggcgaaagagccacactgagctgtagagccagccagagcgtgtccagctcttacctggcttggtatcagcagaagcccggacaggctcccagactgctgatctacggtgcctctagcagagccacaggcatccccgatagattttctggcagcggctccggcaccgacttcaccctgacaatcagcagactggaacccgaggacttcgccgtgtactactgccagcagtaccaccactctccactgacctttggcggaggcaccaaggtggaaatcaagagaggcggaggcggaagtggaggcggaggatctggcggcggaggctctgaagttcagctggttgaatcaggtggcggcctggttcaacctggcggatctctgagactgtcttgtgccgccagcggcttcactttcagcggcagatccatgaactgggtccgacaggcccctggcaaaggactggaatgggtgtcctacatcagcagcgacagccggaccatctactacgccgatagcgtgaagggcagattcaccatctccagagacaacgccaagaacagcctgtacctccagatgaactccctgagagccgaggacacagccgtgtattattgtgccagaggcggccacggctacttcgatctttggggcagaggcaccctggtcaccgtttcttct

SEQ ID NO: 688 - DNA, 732 bp, Artificial Sequence
  Synthetic Polynucleotide
gagatcgtgctgacacagagccctggcacactgtcactgtctccaggcgaaagagccacactgagctgtagagccagccagagcgtgtccagcgattacctggcttggtatcagcagaagcccggacaggctcccagactgctgatctatggtgcctctcggagagccacaggcatccccgatagattttctggcagcggctccggcaccgacttcaccctgacaatcagcagactggaacccgaggacttcgccgtgtactactgccagcagtacgtgtcctactggacctttggcggaggcaccaaggtggaaatcaagagaggcggaggcggaagtggaggcggaggatctggcggcggaggctctcaagttcagctggttgaatcaggcggaggcgttgtgcagcctggcagaagtctgagactgtcttgtgccgccagcggcttcaccttcagcagctatggaatgcactgggtccgacaggcccctggcaaaggacttgaatgggtggccggcatttggtgggacggcagcaatgagaagtacgccgacagcgtgaagggcagattcaccatctccagagacaacagcaagaacaccctgtacctccagatgaacagcctgagagccgaggacacagccgtgtattattgcgccaaagaggccccttactacgccaaggactacatggacgtgtggggcaagggcaccacagtgactgtctcttct

SEQ ID NO: 689 - DNA, 732 bp, Artificial Sequence
  Synthetic Polynucleotide
gacatccagatgacacagagccctagcagcctgtctgccagcgtgggagacagagtgaccatcacctgtagagccagccaggacgtgaacacagccgtggcttggtatcagcagaagcctggcaaggcccctaagctgctgatctacagcgccagctttctgtacagcggcgtgcccagcagattcagcggaagcagaagcggcaccgacttcaccctgacaatatccagcctccagcctgaggacttcgccacctactactgccagcagcactacaccacacctccaacattcggccagggcaccaaggtggaaatcaagagaacaggcggaggcggaagtggaggcggaggatctggcggcggaggctctgaagtgcagctggttgaatcaggtggcggcctggttcaacctggcggatctctgagactgagctgtgccgccagcggcttcaacatcaaggacacctacatccactgggtccgacaggcccctggcaaaggacttgaatgggtcgccagaatctaccccaccaacggctacaccagatacgccgactctgtgaagggcagattcaccatcagcgccgacaccagcaagaacaccgcctacctccagatgaactccctgagagccgaggacaccgccgtgtactactgtagcagatggggcggctggggcttctacgctatggattattggggccagggaaccctggtcaccgtgtcatct

SEQ ID NO: 690 - DNA, 717 bp, Artificial Sequence
  Synthetic Polynucleotide
caggtgcagctggttgaatctggcggcggacttgtgaagcctggcggatctctgagactgagctgtgccgccagcggcttcaccttcagcgactactacatgacctggatcagacaggcccctggcaaaggactggaatggatcagctacatcagcagcagcggcagcaccatctactacgccgatagcgtgaagggcagattcaccatcagccgggacaacgccaagaacagcctgtacctccagatgaactccctgagagccgaggacaccgccgtgtactactgcgccagagacagaaacagccacttcgactattggggccagggcaccctggtcacagtttctagcggcggaggcggaagtggaggcggaggatctggcggcggaggctctgatattcagatgacacagagccccagcagcgtgtccgcctctgtgggagatagagtgaccatcacctgtagagccagccagggcatcacaagatggctggcctggtatcagcagaagccaggcaaggcccctaagctgctgatctacgccgcttctgtgctccagagcggagtgcctagcagattttctggcagcggctccggcaccgatttcaccctgacaatatccagcctccagcctgaggacttcgccacctactactgccagcagagcaacagcttccccagaacattcggacagggcaccaaggtggaaatcaag

SEQ ID NO: 691 - DNA, 717 bp, Artificial Sequence
  Synthetic Polynucleotide
caggtgcagctggttgaatctggcggcggacttgtgaagcctggcggatctctgagactgagctgtgccgccagcggcttcaccttcagcgatcactacatgagctggatcagacaggcccctggcaaaggactggaatggttcagctacatcagcagcagcggcggcatcatctactacgccgatagcgtgaagggcagattcaccatcagccgggacaacgccaagaacagcctgtacctccagatgaactccctgagagccgaggacaccgccgtgtactactgtgccagagatgtgggcagccacttcgactattggggccagggaacactggtcaccgtttctagcggcggaggcggaagtggaggcggaggatctggcggcggaggctctgatattcagatgacacagagccccagcagcgtgtccgcctctgtgggagatagagtgaccatcacctgtcgggccagccaggacattagcagatggctggcttggtatcagcagaagccaggcaaggcccctaagctgctgatttcagccgccagcagactccagagcggagtgcctagcagattttctggctctggcagcggcaccgacttcaccctgacaatatctagcctccagcctgaggacttcgccatctactattgccagcaggccaagagcttccccagaacatttggacagggcaccaaggtggaaatcaag

SEQ ID NO: 692 - DNA, 753 bp, Artificial Sequence
  Synthetic Polynucleotide
caggtgcagctggttgaatctggtggcggagtggtgcagtctggcagaagcctgagactgtcttgtgccgccagcggcttcaccttcagaaactacggaatgcactgggtccgacaggcccctggcaaaggacttgaatgggtcgccgtgatttggtacgacggcagcgacaagtactacgccgattctgtgcggggcagattcaccatcagccgggacaacagcaagaacaccctgtacctccagatgaacagcctgagagccgaggacaccgccgtgtactactgtgccagagatggctacgacatcctgaccggcaatcccagagacttcgactattggggccagggcacactggtcacagtttctagcggcggaggcggaagtggaggcggaggatctggcggcggaggctctgataccgtgatgacccagacacctctgagcagccacgtgacacttggacagcctgccagcatcagctgtagaagcagccagagcctggtgcacagcgacggcaatacctacctgtcttggctccagcagaggccaggacagcctcctagactgctgatctaccggatcagcagacggttcagcggcgtgcccgatagattttctggaagcggagccggcaccgacttcaccctggaaatcagcagagtggaagccgaggatgtgggcgtctactactgtatgcagagcacccacgtgccacggacctttggacagggcaccaaggtggaaatcaag

SEQ ID NO: 693 - DNA, 732 bp, Artificial Sequence
  Synthetic Polynucleotide
gaggtgcagctggttgaatctggcggaggactggttcagcctggcggatctctgagactgtcttgtgccgccagcggcttcccattcagcagctacgatatgcactgggtccgacaggccacaggcaaaggactggaatgggtgtccgccatcggaacagccggcgctacctattatcccggctctgtgaagggcagattcaccatcagcagagagaacgccaagaacagcctgtacctccagatgaactccctgagagccggcgataccgccgtgtactattgtgccagaggcgactacgtgtggggcacctacagacccctgttcgattattggggccagggcaccctggtcacagtttctagtggcggaggcggaagtggaggcggaggatctggcggcggaggctctgatattcagctgactcagagccccagcttcctgtctgcctctgtgggcgacagagtgaccatcacatgttgggccagccagggcatcaacaactacctggcctggtatcagcagaagcccggcaaggctcctaagctgctgatctacgccgccagcacactgcaaacaggcgtgccaagcagattttccggctctggcagcggcaccgagttcaccctgacaatatctagcctccagcctgaggacttcgccacctactactgccagcagctgaacagctaccctctgacctttggaggcggcaccaaggtggaaatcaag

SEQ ID NO: 694 - DNA, 723 bp, Artificial Sequence
  Synthetic Polynucleotide
caggttcagctgcaagagtctggccctggcctggtcaagcctagcgaaacactgagcctgacctgtaccgtgtctggggccagcatcagcagcttctactggtcctggatcagacagcctcctggcaaaggactggaatggatcggctacatctactacagcggcaccaccaactacaaccccagcctgaagtccagagtgaccatcagcgtggacaccagcaagaaccagttctccctgaagctgagcagcgtgacagccgccgatacagccgtgtactactgtgccagaattgccgtggccggcttcttcttcgactattggggccagggcaccctggtcacagtttctagcggcggaggcggaagtggaggcggaggatctggcggcggaggctctgaaattgtgctgacacagagccccggcacactgtcactttctccaggcgaaagagccacactgagctgtagagccagccagagcgtgaacaagaactacctggcttggtatcagcagaagcccggacaggctcccagactgctgatctacggtgcctctagcagagccacaggcatccccgatagattttctggcagcggctccggcaccgacttcaccctgacaatcagcagactggaacccgaggacttcgccgtgtattattgccagcagtacgacagaagccctctgacctttggaggcggcaccaaggtggaaatcaag

SEQ ID NO: 695 - DNA, 750 bp, Artificial Sequence
  Synthetic Polynucleotide
caggttcagctggttcagtctggggccgaagtgaagaaacctggggcctctgtgaaggtgtcctgcaaggccagcggctacacctttaccaactactacatgcactgggtccgacaggcccctggactgggacttgagtggatgggcatcatcaaccctagcgacggcagcacaagctacgcccagaaattccagggcagagtgaccatgaccagagacaccagcaccaacaccgtgtacatggacctgagcagcctgagaagcgaggacaccgccgtgtactattgtgccagaggcggcaacagcgccttctacagctactacgacatggacgtgtggggccagggcaccacagtgacagtttctagcggcggaggcggaagtggaggcggaggatctggcggcggaggctctgatgtggtcatgacacagacccctctgagcctgcctgtgacacttggacagcctgccagcatcagctgtagatccagccagagcctggtgtacagagatggcaacacctacctgagctggttccagcagaggcctggacagtctcctcggcggctgatctacaaggtgtccaactggcagagcggcgtgcccgatagattttctggcggtggcagcggcaccgacttcaccctgaagatcagcagagtggaagccgaggacgtgggcgtgtactactgtatgcagggcacacactggcctccaacattcggccagggaacaaaggtggaaatcaag

SEQ ID NO: 696 - DNA, 711 bp, Artificial Sequence
  Synthetic Polynucleotide
caggttcagctccagcagtctggacctgagctggttaagcctggcgcttctgtgcggatctcttgcaaggccagcggctacaccttcaccacctactacatccactgggtcaagcagcggcctggacagggactcgaatggatcggctggatctaccccggcaacgtgaacaccaactacaacgagaagttcaagggcaaagccacactgaccgccgacaagagcagcagcacagcctacatgcagctgaccagcctgacctctgaggacagcgccgtgtacttttgtgccagaggcgtgtactacttcgactactggggccagggcaccatcctgacagtttctagcggcggaggcggaagtggaggcggaggatctggcggcggaggctctatcgtgatgacccagactcctaagttcctgctggtgtctgccggcgacagagtgaccatcacctgtaaagccagccagagcgtgaacaacgacgtgtcctggttccagcagaagcccggccaatctcctacactgctgatctactacgccagcaacagatacaccggcgtgcccgatagattcaccggctctggctacggcaccgacttcacctttaccatcagcaccgtgcaggccgaggacctggctgtgtacttctgccagcaagactacagcagcccttacacctttggaggcggcaccaagctggaaatcaag

SEQ ID NO: 697 - DNA, 720 bp, Artificial Sequence
  Synthetic Polynucleotide
caggttcagctgcaagagtctggccctggcctggtcaagcctagccaaacactgagcctgacctgtaccgtgtctggcggcagcatcaacaacaacaattactactggacctggatcagacagcaccccggcaaaggactggaatggatcggctacatctactacagcggcagcaccttctacaaccccagcctgaagtccagagtgaccatcagcgtggacaccagcaagacccagttctccctgaagctgagcagcgtgacagccgccgatacagccgtgtactactgcgccagagaagataccatgaccggcctggatgtgtggggccagggaacaacagtgacagtgtctagcggcggaggcggaagtggaggcggaggatctggcggcggaggctctgacattcagatgacacagagccctagcagcctgagcgcctctgtgggagacagagtgacaattacctgtcgggccagccagtctatcaacaactacctgaactggtatcagcagaagcccggcaaggcccctacactgctgatctatgccgccagctctctccagagcggagtgcctagcagattcagcggaagcagaagcggcaccgacttcaccctgacaatatccagcctccagcctgaggacttcgccgcctacttttgccagcagacctacagcaaccccacctttggccagggcaccaaggtggaagtgaag

SEQ ID NO: 698 - DNA, 735 bp, Artificial Sequence
  Synthetic Polynucleotide
agctacgagctgacacagcctccaagcgtgtccgtgtctcctggacagacagccagcatcacctgtagcggcgataagctgggcgataagtacgccagctggtatcagcagaagcccggccagtctcctgtgctggtcatctaccaggacaacagaaggcccagcggcatccccgagagattcagcggcagcaatagcggcaataccgccacactgaccatcagcggcacccaggctatggacgaggccgactactattgccaggcttgggacagcgacacctacgtgttcggcaccggcaccaaagtgacagtgcttggacaaggcggaggcggaagtggaggcggaggatctggcggcggaggctctgaagttcagctggttcagagcggagccgaagtgaagaaacctggggcctctgtgaaggtgtcctgcaaggcttccggcgataccttcaagcggtactacgtgcactgggtccgacaggctccaggacaaggactggaatggatgggcatcatcaaccccagcggcgtgtccacaacatacgcccagaaattccagggcagagtgaccatgaccagagacaccagcacctccaccgtgtacatggaactgagcagcctgagaagcgaggacaccgccgtgtactactgtgctgaagtgcgcggcagcggcttcaactacttcggcatggatgtgtggggccagggcacactggttaccgtttcttct

SEQ ID NO: 699 - DNA, 732 bp, Artificial Sequence
  Synthetic Polynucleotide
gaggttcagctgcttgagtctggcggaggactggttcaacctggcggaagcctgagactgtcttgtgccgccagcggcttcacctttagcagctacgccatgagctgggtccgacaggctcctggcaaaggactggaagtggtggtgtctgccatttctggcggcggaggcagaacctactacgccgattctgtgaagggcagattcaccatcagccgggacaacagcaagaacaccctgtacctgcagatgaacagcctgagagccgaggacaccgccgtgtactactgtgccagagaagagatggccttccgggcctacagattcgacatctggggccagggaaccctggtcacagtttctagcggcggaggcggaagtggaggcggaggatctggcggcggaggctctgatattcagatgacacagagccccagcagcctgtctgcctctgtgggagacagagtgaccatcacctgtagagccagccagagcatcagcagctacctgaactggtatcagcagaagcccggcaaggcccctaaactgctgatctatgccgcctccagtctgcagagcggagtgcctagcagattttctggctctggcagcggcaccgacttcaccctgacaatatctagcctgcagcctgaggacttcgccacctactactgccagcagagctacatcacccctctgacattcggtggcggcaccaaggtggaaatcaag

SEQ ID NO: 700 - DNA, 756 bp, Artificial Sequence
  Synthetic Polynucleotide
gacatcgtgctgacacagagccctgcttctctggccgtgtctcttggacagggcgctaccatcagctgtagagccagcaagagcgtgtccaccagcggctacacctacatgcactggtatcagcagaagcccggccagcctcctaagctgctgatctacctggcctccaacctggaaagcggagtgcctgccagattttctggcagcggctctggcaccgacttcaccctgaatatccatcctgtggaagaagaggacgccgccacctactactgtcagcactctggcgaactgccacctagctttggcggaggcaccaagctggaaatcaagagagctggcggaggcggaagtggaggcggaggatctggcggcggaggctctgaagtgcagctggtggaatctggcggcgaccttgtgaaacctggcggctctctgaagctgagctgtgccgtgtccggcttcacctttagcagctacggcatgagctgggtccgacagacccctgacaagagactggaatgggtcgccacagtgtctagcggcggcacctacacatattaccccgacagcgtgaagggcagattcaccatcagccgggacaacgccaagaacaccctgtacctccagatgagcagcctgaagtccgaggacagcgccatgtactactgcgccagacaccggggcaattactacgccacctattattacgctatggactactggggccagggcaccagcgtgacagtttcttct

SEQ ID NO: 701 - DNA, 738 bp, Artificial Sequence
  Synthetic Polynucleotide
gacatccagatgacacagagccctagcagcctgtctgccagcgtgggagacagagtgaccatcacatgtagcgccagccagggcatcagaaactacctgaactggtatcagcagaaacccggcaaggtgcccaagctgctgatctactacaccagcagactgcacagcggcgtgcccagcagattttctggctctggcagcggcaccgacttcaccctgacaatatctagcctccagcctgaggacgtggcaacctactactgtcagcagtacggcaagctgccctacacattcggccagggcaccaagctggaaatcaagagaacagtggctgccggcggaggcggaagtggaggcggaggatctggcggcggaggctctgaagttcagctggttgaatcaggcggcggactggttcaacctggcggatctctgagactgagctgtgccgccagcggcttcacattttccgacgcctggatggactgggtccgacaggctcctggaaaaggactggaatgggtcggagagatccggtccaaagtgaacaaccacgaaacctactatgccgagagcgtgaagggcagattcaccatcagccgggacgacagcaagaacagcctgtacctccagatgaactccctgaaaaccgaggacaccgccgtgtactactgcgccagaaacgactacttcgactactggggccagggaaccaccgtgacagtgtctagtgcttcc

SEQ ID NO: 702 - DNA, 762 bp, Artificial Sequence
  Synthetic Polynucleotide
gaggttcagctgcaagagtctggggccgaagtgaagaaacctggcagcagcgtgaaggtgtcctgcaaggccagcggcttcaacatcaaggacacctacatgcactgggtccgacaggcccctggacaaggacttgagtggatgggcagaatcgaccccgccaacggcaacagcaaatacgtgcccaagttccagggcagagtgaccatcacagccgacgagagcacaagcaccgcctacatggaactgagcagcctgagaagcgaggacaccgccgtgtactactgtgcccctttcggctactacgtgtccgactacgccatggcctattggggccagggaaccaccgtgacagtgtctagtgcatctggcggaggcggaagtggaggcggaggatctggcggcggaggctctgacatcgtgatgacacagagccccgatagcctggccgtgtctctgggagaaagagccaccatcaactgtagagccggcgagagcgtggacatcttcggcgtgggatttctgcactggtatcagcagaagcccggccagcctcctaagctgctgatctacagagccagcaacctggaaagcggcgtgcccgatagattttctggcagcggctctggcaccgacttcaccctgacaatcagacctctccaggccgaggatgtggccgtgtattattgccagcagaccaacgaggacccctacacatttggacagggcaccaagctggaaatcaagagaacagtggccgcc

SEQ ID NO: 703 - DNA, 741 bp, Artificial Sequence
  Synthetic Polynucleotide
caagttcagctggttcagtctggggccgaagtgaagaaacctggcagcagcgtgaaggtgtcctgcaaagcaagcggcggcacctttagcagctacgccatctcttgggtccgacaggcaccaggacaaggactggaatggatgggcctgattatccccagatacggcaaggccagatacgcccagaaattccagggcagagtgaccatcaccgccgacgagtctacaagcaccgcctacatggaactgagcagcctgagaagcgaggacacagccgtgtattattgcgcccggaactggccctactactacatggatttttggggccagggaaccctggtcaccgtgtctagtgcatctggcggaggcggaagtggaggcggaggatctggcggcggaggctctgacatcgtgctgacacagtctcccgccacactgtcactgtctccaggcgaaagagccacactgagctgtagagccagccagaacatcgtgttcaacctggcctggtatcagcagaagcctggacaggctccccggctgctgatctacgatgccagcaatagagccaccggcgtgcccgccagattttctggttctggcagcggcaccgacttcaccctgaccatatctagcctggaacctgaggacttcgccgtgtactactgccagcagaaaaagtccatgcctctgaccttcggccagggcaccaaggtggaaatcaagagaacagtggctgcc

SEQ ID NO: 704 - DNA, 750 bp, Artificial Sequence
  Synthetic Polynucleotide
gaggtgcagctggttgaatctggcggcggacttgtgaagcctggcggatctctgagactgagctgtgccgccagcggcttcacctttagcaatgcctggatgagctgggtccgacaggcccctggaaaaggactggaatgggtcggacggatcaagagcaagaccgaaggcggcaccaccgattatgctgcccctgtgaagggcagattcaccatcagcagggacgacagcaagaacaccctgtacctccagatgaacagcctgaaaaccgaggacaccgccgtgtactactgcaccacaccttacgagtggtcttggtacgactactggggccagggcacactggtcacagtgtcatctgcatctggcggaggcggaagtggaggcggaggatctggcggcggaggctctcagacagtggtcacccaagagcctagcctgacagtgtctcctggcggaaccgtgacactgacatgtggcagttctaccggcgctgtgaccaccagcaattacgccaactgggtgcagcagaagccaggccaagctcctagaggactgatcggcggcacaaacaagagagcccctggcacaccagccagattttctggctctctgctcggcggaaaggccgctcttacactgtctggtgtccagcctgaggacgaggccgagtattattgcgccctgtggtacagcaacctgtgggttttcggcggaggcaccaagctgacagtgctgactgttgctgct

SEQ ID NO: 705 - DNA, 750 bp, Artificial Sequence
  Synthetic Polynucleotide
caggttcagctggttcagtctggggccgaagtgaagaaacctggggcctctgtgaaggtgtcctgcaaggcttccggctacacctttaccagctactacatgcactgggtccgacaggcccctggacaaggacttgagtggatgggcatcatcaaccctagcggcggcagcacaagctacgcccagaaattccagggcagagtgaccatgacacacgacaccagcacctccaccgtgtacatggaactgagcagcctgagaagcgaggacaccgccgtgtactactgcgccagatccttcttcaccggcttccacctggattactggggccagggaacactggtcacagtgtcatctgcatctggcggaggcggaagtggaggcggaggatctggcggcggaggctctgaaattgtgctgacacagagccccggcacactgtcactttctccaggcgaaagagccacactgagctgtagagccagccagagcgtgtccagctcttacctggcttggtatcagcagaagcccggccaggctcctagactgctgatctacggtgccagcagcagagccacaggcatccccgatagattttctggcagcggctccggcaccgacttcaccctgacaatcagcagactggaacccgaggactttgccgtgtattattgccagcagtacaccaacgagcactactacaccttcggccagggcaccaaggtggaaatcaagagaacagtggccgcc

SEQ ID NO: 706 - DNA, 768 bp, Artificial Sequence
  Synthetic Polynucleotide
gagatcgtgctgacacagtctcccgccacactgtcactgtctccaggcgaaagagccacactgagctgtagcgtgtccagcagcatcagcagcagcaacctgcactggtatcagcagaagcctggacaggcccctcggctgctgatctacggcacatctaatctggcctctggcatccccgccagattttctggctctggaagcggcaccgacttcaccctgaccataagcagcctggaacctgaggacttcgccgtgtactactgccagcagtggtccagctatccccacacatttggcggaggcaccaaggtggaaatcaagagaacagtggctgccggcggaggcggaagtggaggcggaggatctggcggcggaggctctcaggttcagctggttcagagcggagccgaagtgaagaaacctggggcctctgtgaaggtgtcctgcaaggcttccggctacacctttaccaactacctgatcgagtgggtccgacaggctccaggacaaggactggaatggatgggcctgattaaccctggcagcggcggcaccaactacaacgagaagttcaagggcagagtgaccatgaccaccgacaccagcacaagcaccgcctacatggaactgcggagcctgagaagcgacgacaccgccgtgtattattgcgccagaagaagccctctcggctcttggatctactacgcctatgacggcgtggcctattggggccagggaacactggttacagtgtcctctgccagc

SEQ ID NO: 707 - DNA, 723 bp, Artificial Sequence
  Synthetic Polynucleotide
gacatccagatgacacagagccctagcagcctgtctgccagcgtgggagacagagtgaccatcacctgtaaagccggccagaacgtgggcacaagcgtggcatggtatcagcagaagcctggcaaggcccctaagctgctgatctacagcgccagctacagatacagcggcgtgcccagcagattttctggcagcggctctggcaccgacttcaccctgacaatatccagcctccagcctgaggacttcgccacctactactgccagcagtacatcacatacccctacaccttcggccagggcaccaaggtggaaatcaagagaacagtggctgccggcggaggcggaagtggaggcggaggatctggcggcggaggctctgaagttcagctggttgaatcaggcggcggactggttcaacctggcggatctctgagactgagctgtgccgccagcggcttcaccttcagcagatactggatgagctgggtccgacaggcccctggcaaaggacttgaatgggtcgccgagatcaaccccgacagcagcaccatccagtacaccccatctctgaaggcccggttcaccctgtccgtggacagaagcaagaacaccctgtacctccagatgaactccctgagagccgaggacaccgccgtgtactattgtgccagacctgcctattggggccagggaacactggtcacagtgtctagcgcttcc

SEQ ID NO: 708 - DNA, 744 bp, Artificial Sequence
  Synthetic Polynucleotide
gacatccagatgacacagagccctagcagcctgtctgccagcgtgggagacagagtgaccatcacatgtagcgccagccaggacatcggcaactttctgaactggtatcagcagaagcccggcaaggcccctaagctgctgatctactacacctccagcctgtacagcggcgtgcccagcagattttctggcagcggctctggcaccgacttcaccctgacaatatccagcctccagccagaggacttcgccacctactactgccagcagtacagcaagctgcccctgacctttggacagggcaccaagctggaaatcaagagaacagtggctgccggcggaggcggaagtggaggcggaggatctggcggcggaggctctcaagttcagctggttcagtctggggccgaagtgaagaaacctggggcctctgtgaaggtgtcctgcaaggcttccggctacacctttaccggctacaacatccactgggtccgacaggctcccggccaaagacttgaatggatgggcgctatctaccccggcaacggcgataccagctacaagcagaaattccggggcagagtgacaattaccagagacaccagcgccagcaccgcctacatggaactgtctagcctgagaagcgaggacaccgccgtgtactattgcgccagaggcgaaacagccagagccacctttgcctattggggccagggaaccctggtcacagtgtctagtgcttcc

SEQ ID NO: 709 - DNA, 336 bp, Artificial Sequence; identical to SEQ ID NO: 225
  Synthetic Polynucleotide

SEQ ID NO: 710 - DNA, 321 bp, Artificial Sequence; identical to SEQ ID NO: 226
  Synthetic Polynucleotide

SEQ ID NO: 711 - DNA, 324 bp, Artificial Sequence; identical to SEQ ID NO: 227
  Synthetic Polynucleotide

SEQ ID NO: 712 - DNA, 324 bp, Artificial Sequence; identical to SEQ ID NO: 228
  Synthetic Polynucleotide

SEQ ID NO: 713 - DNA, 324 bp, Artificial Sequence; identical to SEQ ID NO: 229
  Synthetic Polynucleotide

SEQ ID NO: 714 - DNA, 324 bp, Artificial Sequence; identical to SEQ ID NO: 230
  Synthetic Polynucleotide

SEQ ID NO: 715 - DNA, 324 bp, Artificial Sequence; identical to SEQ ID NO: 231
  Synthetic Polynucleotide

SEQ ID NO: 716 - DNA, 336 bp, Artificial Sequence; identical to SEQ ID NO: 232
  Synthetic Polynucleotide

SEQ ID NO: 717 - DNA, 336 bp, Artificial Sequence; identical to SEQ ID NO: 233
  Synthetic Polynucleotide

SEQ ID NO: 718 - DNA, 327 bp, Artificial Sequence; identical to SEQ ID NO: 234
  Synthetic Polynucleotide

SEQ ID NO: 719 - DNA, 735 bp, Artificial Sequence
  Synthetic Polynucleotide
agctacgtgctgacacagcctccatccgtgtctgtggctccaggacagaccgccagaatcacatgcggcggcaacaacatcggcagcaagagcgtgcactggtatcagcagccacctggacaggctccagtggtggtggtgtacgacgacagcgatagacctagcggcatccccgagagattcagcggcagcaattccggcaataccgccacactgaccatcagcagagtggaagctggcgacgaggccgtgtactactgccaagtgtgggacagcagcagcgatcacgtggtgtttggcggcggaacaaagctgacagtgcttggcggaggcggaagtggaggcggaggatctggcggcggaggctctcaactccagctgcaagagtctggccctggcctggtcaagcctagcgaaacactgagcctgacctgtaccgtgtctggcggctctatcagctccagcagctatttctggggctggatcagacaacctcctggcaaaggactggaatggatcggctccatctactacagcggcatcacctactacaaccccagcctgaagtccagagtgaccatctccgtggacaccagcaagaaccagttctccctgaagctgagcagcgtgacagccgccgataccgccgtgtattattgtgccagacatgacggcgctgtggccggcctgtttgattattggggacagggcaccctggtcaccgtgtcatctgct

SEQ ID NO: 720 - DNA, 735 bp, Artificial Sequence
  Synthetic Polynucleotide
agctacgtgctgacacagcctccatccgtgtctgtggctccaggacagaccgccagaatcacatgcggcggcaacaacatcggcagcaagagcgtgcactggtatcagcagccacctggacaggctccagtggtggtggtgtacgacgacagcgatagacctagcggcatccccgagagattcagcggcagcaattccggcaataccgccacactgaccatcagcagagtggaagctggcgacgaggccgtgtactactgccaagtgtgggacagcagcagcgatcacgtggtgtttggcggcggaacaaagctgacagtgcttggcggaggcggaagtggaggcggaggatctggcggcggaggctctcaactccagctgcaagagtctggccctggcctggtcaagcctagcgaaacactgagcctgacctgtaccgtgtctggcggctctatcagctccggcagctatatctggggctggatcagacaacctcctggcaaaggactggaatggatcggctccatctactacagcggcatcacctactacaaccccagcctgaagtccagagtgaccatctccgtggacaccagcaagaaccagttctccctgaagctgagcagcgtgacagccgccgataccgccgtgtattattgtgccagacatgacggcgctgtggccggcctgtttgattattggggacagggcaccctggtcaccgtgtcatctgct

SEQ ID NO: 721 - DNA, 735 bp, Artificial Sequence
  Synthetic Polynucleotide
agctacgtgctgacacagcctccatccgtgtctgtggctccaggacagaccgccagaatcacatgcggcggcaacaacatcggcagcaagagcgtgcactggtatcagcagccacctggacaggctccagtggtggtggtgtacgacgacagcgatagacctagcggcatccccgagagattcagcggcagcaattccggcaataccgccacactgaccatcagcagagtggaagctggcgacgaggccgtgtactactgccaagtgtgggacagcagcagcgatcacgtggtgtttggcggcggaacaaagctgacagtgcttggcggaggcggaagtggaggcggaggatctggcggcggaggctctcaactccagctgcaagagtctggccctggcctggtcaagcctagcgaaacactgagcctgacctgtaccgtgtctggcggctctatcagctccggcagctatttctggggctggatcagacaacctcctggcaaaggactggaatggatcggctccatctactacagcggcatcacctactacaaccccagcctgaagtccagagtgaccatctccgtggacaccagcaagaaccagttctccctgaagctgagcagcgtgacagccgccgataccgccgtgtattattgtgccagacatgacggcgctatggccggcctgtttgattattggggacagggcaccctggtcaccgtgtcatctgct

SEQ ID NO: 722 - DNA, 735 bp, Artificial Sequence
  Synthetic Polynucleotide
agctacgtgctgacacagcctccatccgtgtctgtggctccaggacagaccgccagaatcacatgcggcggcaacaacatcggcagcaagagcgtgcactggtatcagcagccacctggacaggctccagtggtggtggtgtacgacgacagcgatagacctagcggcatccccgagagattcagcggcagcaattccggcaataccgccacactgaccatcagcagagtggaagctggcgacgaggccgtgtactactgccaagtgtgggacagcagcagcgatcacgtggtgtttggcggcggaacaaagctgacagtgcttggcggaggcggaagtggaggcggaggatctggcggcggaggctctcaactccagctgcaagagtctggccctggcctggtcaagcctagcgaaacactgagcctgacctgtaccgtgtctggcggctctatcagctccggcagctatttctggggctggatcagacaacctcctggcaaaggactggaatggatcggctccatctactacagcggcagcacctactacaaccccagcctgaagtccagagtgaccatctccgtggacaccagcaagaaccagttctccctgaagctgagcagcgtgacagccgccgataccgccgtgtattattgtgccagacatgacggcgctgtggccggcctgtttgattattggggacagggcaccctggtcaccgtgtcatctgct

SEQ ID NO: 723 - DNA, 735 bp, Artificial Sequence
  Synthetic Polynucleotide
agctacgtgctgacacagcctccatccgtgtctgtggctccaggacagaccgccagaatcacatgcggcggcaacaacatcggcagcaagagcgtgcactggtatcagcagccacctggacaggctccagtggtggtggtgtacgacgacagcgatagacctagcggcatccccgagagattcagcggcagcaattccggcaataccgccacactgaccatcagcagagtggaagctggcgacgaggccgtgtactactgccaagtgtgggacagcagcagcgatcacgtggtgtttggcggcggaacaaagctgacagtgcttggcggaggcggaagtggaggcggaggatctggcggcggaggctctcaactccagctgcaagagtctggccctggcctggtcaagcctagcgaaacactgagcctgacctgtaccgtgtctggcggctctatcagctccggcagctatttctggggctggatcagacaacctcctggcaaaggactggaatggatcggctccatctactacagcggcatcagctactacaaccccagcctgaagtccagagtgaccatctccgtggacaccagcaagaaccagttctccctgaagctgagcagcgtgacagccgccgataccgccgtgtattattgtgccagacatgacggcgctgtggccggcctgtttgattattggggacagggcaccctggtcaccgtgtcatctgct

SEQ ID NO: 724 - DNA, 735 bp, Artificial Sequence
  Synthetic Polynucleotide
agctacgtgctgacacagcctccatccgtgtctgtggctccaggacagaccgccagaatcacatgcggcggcaacaacatcggcagcaagagcgtgcactggtatcagcagccacctggacaggctccagtggtggtggtgtacgacgacagcgatagacctagcggcatccccgagagattcagcggcagcaattccggcaataccgccacactgaccatcagcagagtggaagctggcgacgaggccgtgtactactgccaagtgtgggacagcagcagcgatcacgtggtgtttggcggcggaacaaagctgacagtgcttggcggaggcggaagtggaggcggaggatctggcggcggaggctctcaactccagctgcaagagtctggccctggcctggtcaagcctagcgaaacactgagcctgacctgtaccgtgtctggcggctctatcagctccggcagctatttctggggctggatcagacaacctcctggcaaaggactggaatggatcggctccatctactacagcggcatcacctactacaaccccggcctgaagtccagagtgaccatctccgtggacaccagcaagaaccagttctccctgaagctgagcagcgtgacagccgccgataccgccgtgtattattgtgccagacatgacggcgctgtggccggcctgtttgattattggggacagggcaccctggtcaccgtgtcatctgct

SEQ ID NO: 725 - DNA, 735 bp, Artificial Sequence
  Synthetic Polynucleotide
agctacgtgctgacacagcctccatccgtgtctgtggctccaggacagaccgccagaatcacatgcggcggcaacaacatcggcagcaagagcgtgcactggtatcagcagccacctggacaggctccagtggtggtggtgtacgacgacagcgatagacctagcggcatccccgagagattcagcggcagcaattccggcaataccgccacactgaccatcagcagagtggaagctggcgacgaggccgtgtactactgccaagtgtgggacagcagcagcgatcacgtggtgtttggcggcggaacaaagctgacagtgcttggcggaggcggaagtggaggcggaggatctggcggcggaggctctcaactccagctgcaagagtctggccctggcctggtcaagcctagcgaaacactgagcctgacctgtaccgtgtctggcggctctatcagctccggcagctatttctggggctggatcagacaacctcctggcaaaggactggaatggatcggctccatctactacagcggcatcacctactacaaccccaccctgaagtccagagtgaccatctccgtggacaccagcaagaaccagttctccctgaagctgagcagcgtgacagccgccgataccgccgtgtattattgtgccagacatgacggcgctgtggccggcctgtttgattattggggacagggcaccctggtcaccgtgtcatctgct

SEQ ID NO: 726 - DNA, 735 bp, Artificial Sequence
  Synthetic Polynucleotide
agctacgtgctgacacagcctccatccgtgtctgtggctccaggacagaccgccagaatcacatgcggcggcaagaacatcggcagcaagagcgtgcactggtatcagcagccacctggacaggctccagtggtggtggtgtacgacgacagcgatagacctagcggcatccccgagagattcagcggcagcaattccggcaataccgccacactgaccatcagcagagtggaagctggcgacgaggccgtgtactactgccaagtgtgggacagcagcagcgatcacgtggtgtttggcggcggaacaaagctgacagtgcttggcggaggcggaagtggaggcggaggatctggcggcggaggctctcaactccagctgcaagagtctggccctggcctggtcaagcctagcgaaacactgagcctgacctgtaccgtgtctggcggctctatcagctccggcagctatttctggggctggatcagacaacctcctggcaaaggactggaatggatcggctccatctactacagcggcatcacctactacaaccccagcctgaagtccagagtgaccatctccgtggacaccagcaagaaccagttctccctgaagctgagcagcgtgacagccgccgataccgccgtgtattattgtgccagacatgacggcgctgtggccggcctgtttgattattggggacagggcaccctggtcaccgtgtcatctgct

SEQ ID NO: 727 - DNA, 735 bp, Artificial Sequence
  Synthetic Polynucleotide
agctacgtgctgacacagcctccatccgtgtctgtggctccaggacagaccgccagaatcacatgcggcggcaacaacctcggcagcaagagcgtgcactggtatcagcagccacctggacaggctccagtggtggtggtgtacgacgacagcgatagacctagcggcatccccgagagattcagcggcagcaattccggcaataccgccacactgaccatcagcagagtggaagctggcgacgaggccgtgtactactgccaagtgtgggacagcagcagcgatcacgtggtgtttggcggcggaacaaagctgacagtgcttggcggaggcggaagtggaggcggaggatctggcggcggaggctctcaactccagctgcaagagtctggccctggcctggtcaagcctagcgaaacactgagcctgacctgtaccgtgtctggcggctctatcagctccggcagctatttctggggctggatcagacaacctcctggcaaaggactggaatggatcggctccatctactacagcggcatcacctactacaaccccagcctgaagtccagagtgaccatctccgtggacaccagcaagaaccagttctccctgaagctgagcagcgtgacagccgccgataccgccgtgtattattgtgccagacatgacggcgctgtggccggcctgtttgattattggggacagggcaccctggtcaccgtgtcatctgct

SEQ ID NO: 728 - DNA, 735 bp, Artificial Sequence
  Synthetic Polynucleotide
agctacgtgctgacacagcctccatccgtgtctgtggctccaggacagaccgccagaatcacatgcggcggcaacaacatcggcggcaagagcgtgcactggtatcagcagccacctggacaggctccagtggtggtggtgtacgacgacagcgatagacctagcggcatccccgagagattcagcggcagcaattccggcaataccgccacactgaccatcagcagagtggaagctggcgacgaggccgtgtactactgccaagtgtgggacagcagcagcgatcacgtggtgtttggcggcggaacaaagctgacagtgcttggcggaggcggaagtggaggcggaggatctggcggcggaggctctcaactccagctgcaagagtctggccctggcctggtcaagcctagcgaaacactgagcctgacctgtaccgtgtctggcggctctatcagctccggcagctatttctggggctggatcagacaacctcctggcaaaggactggaatggatcggctccatctactacagcggcatcacctactacaaccccagcctgaagtccagagtgaccatctccgtggacaccagcaagaaccagttctccctgaagctgagcagcgtgacagccgccgataccgccgtgtattattgtgccagacatgacggcgctgtggccggcctgtttgattattggggacagggcaccctggtcaccgtgtcatctgct

SEQ ID NO: 729 - DNA, 735 bp, Artificial Sequence
  Synthetic Polynucleotide
agctacgtgctgacacagcctccatccgtgtctgtggctccaggacagaccgccagaatcacatgcggcggcaacaacatcggcagcaagaccgtgcactggtatcagcagccacctggacaggctccagtggtggtggtgtacgacgacagcgatagacctagcggcatccccgagagattcagcggcagcaattccggcaataccgccacactgaccatcagcagagtggaagctggcgacgaggccgtgtactactgccaagtgtgggacagcagcagcgatcacgtggtgtttggcggcggaacaaagctgacagtgcttggcggaggcggaagtggaggcggaggatctggcggcggaggctctcaactccagctgcaagagtctggccctggcctggtcaagcctagcgaaacactgagcctgacctgtaccgtgtctggcggctctatcagctccggcagctatttctggggctggatcagacaacctcctggcaaaggactggaatggatcggctccatctactacagcggcatcacctactacaaccccagcctgaagtccagagtgaccatctccgtggacaccagcaagaaccagttctccctgaagctgagcagcgtgacagccgccgataccgccgtgtattattgtgccagacatgacggcgctgtggccggcctgtttgattattggggacagggcaccctggtcaccgtgtcatctgct

SEQ ID NO: 730 - DNA, 735 bp, Artificial Sequence
  Synthetic Polynucleotide
agctacgtgctgacacagcctccatccgtgtctgtggctccaggacagaccgccagaatcacatgcggcggcaagaacatcggcagcaagagcgtgcactggtatcagcagccacctggacaggctccagtggtggtggtgtacgacgacagcgatagacctagcggcatccccgagagattcagcggcagcaattccggcaataccgccacactgaccatcagcagagtggaagctggcgacgaggccgtgtactactgccaagtgtgggacagcagcagcgatcacgtggtgtttggcggcggaacaaagctgacagtgcttggcggaggcggaagtggaggcggaggatctggcggcggaggctctcaactccagctgcaagagtctggccctggcctggtcaagcctagcgaaacactgagcctgacctgtaccgtgtctggcggctctatcagctccagcagctatttctggggctggatcagacaacctcctggcaaaggactggaatggatcggctccatctactacagcggcatcacctactacaaccccagcctgaagtccagagtgaccatctccgtggacaccagcaagaaccagttctccctgaagctgagcagcgtgacagccgccgataccgccgtgtattattgtgccagacatgacggcgctgtggccggcctgtttgattattggggacagggcaccctggtcaccgtgtcatctgct

SEQ ID NO: 731 - DNA, 735 bp, Artificial Sequence
  Synthetic Polynucleotide
agctacgtgctgacacagcctccatccgtgtctgtggctccaggacagaccgccagaatcacatgcggcggcaacaacctcggcagcaagagcgtgcactggtatcagcagccacctggacaggctccagtggtggtggtgtacgacgacagcgatagacctagcggcatccccgagagattcagcggcagcaattccggcaataccgccacactgaccatcagcagagtggaagctggcgacgaggccgtgtactactgccaagtgtgggacagcagcagcgatcacgtggtgtttggcggcggaacaaagctgacagtgcttggcggaggcggaagtggaggcggaggatctggcggcggaggctctcaactccagctgcaagagtctggccctggcctggtcaagcctagcgaaacactgagcctgacctgtaccgtgtctggcggctctatcagctccagcagctatttctggggctggatcagacaacctcctggcaaaggactggaatggatcggctccatctactacagcggcatcacctactacaaccccagcctgaagtccagagtgaccatctccgtggacaccagcaagaaccagttctccctgaagctgagcagcgtgacagccgccgataccgccgtgtattattgtgccagacatgacggcgctgtggccggcctgtttgattattggggacagggcaccctggtcaccgtgtcatctgct

SEQ ID NO: 732 - DNA, 735 bp, Artificial Sequence
  Synthetic Polynucleotide
agctacgtgctgacacagcctccatccgtgtctgtggctccaggacagaccgccagaatcacatgcggcggcaacaacatcggcggcaagagcgtgcactggtatcagcagccacctggacaggctccagtggtggtggtgtacgacgacagcgatagacctagcggcatccccgagagattcagcggcagcaattccggcaataccgccacactgaccatcagcagagtggaagctggcgacgaggccgtgtactactgccaagtgtgggacagcagcagcgatcacgtggtgtttggcggcggaacaaagctgacagtgcttggcggaggcggaagtggaggcggaggatctggcggcggaggctctcaactccagctgcaagagtctggccctggcctggtcaagcctagcgaaacactgagcctgacctgtaccgtgtctggcggctctatcagctccagcagctatttctggggctggatcagacaacctcctggcaaaggactggaatggatcggctccatctactacagcggcatcacctactacaaccccagcctgaagtccagagtgaccatctccgtggacaccagcaagaaccagttctccctgaagctgagcagcgtgacagccgccgataccgccgtgtattattgtgccagacatgacggcgctgtggccggcctgtttgattattggggacagggcaccctggtcaccgtgtcatctgct

SEQ ID NO: 733 - DNA, 726 bp, Artificial Sequence
  Synthetic Polynucleotide
gagatcgtgctgacacagtctcccgccacactgtcactgtctccaggcgaaagagccacactgagctgtagagccagccagagcgtgtcctcttacctggcctggtatcagcagaagcctggacaggctccccggctgctgatctacgatgccagcaatagagccacaggcatccccgccagattttctggctctggcagcggcaccgatttcaccctgaccataagcagcctggaacctgaggacttcgccgtgtactactgccagcagagaagcaactggcccctgacctttggacagggcaccaaggtggaaatcaaaggcggaggcggaagtggaggcggaggatctggcggcggaggctctcaagttcagctggttcagagcggagccgaagtgaagaaacctggcagcagcgtgaaggtgtcctgcaaagcaagcggcggcacctttagcacctacgccatccactgggttcgacaggcaccaggacaaggactggaatggatgggcagaatcatccccatcgagggcagagcctactacgcccagaaattccagggcagagtgaccatcaccgccgacgagtctacaagcaccgcctacatggaactgagcagcctgagaagcgaggataccgctgtgtactattgcgccagaggccggtacagctacagatattggttcgactactggggccagggcaccctggttacagtctcttct

SEQ ID NO: 734 - DNA, 750 bp, Artificial Sequence
  Synthetic Polynucleotide
gacatcgtgatgacacagagccctgatagcctggccgtgtctctgggagagagagccaccatcaactgcaagagcagccagagcgtgctgtactccagcaacaacaagaactacctggcctggtatcagcagaagcccggccagcctcctaagctgctgatctactgggccagcaccagagaaagcggcgtgcccgatagattttctggcagcggctctggcaccgacttcaccctgacaattagcagcctccaggccgaggatgtggccgtgtactactgccagcagtattacagcacccctctgaccttcggccagggcaccaaggtggaaatcaaaggcggaggcggaagtggaggcggaggatctggcggcggaggctctgaagttcagctggttcagagcggagccgaagtgaagaagccaggcgagagcctgaagattagctgcaaaggctccggctacagcttcaccagctactggatcggctgggtccgacagatgcctggcaaaggactggaatggatgggcatcatctaccccggcgacagcgacaccagatacagccctagctttcagggccaagtgaccatcagcgccgacaagagcatcagcacagcctacctccagtggtcctctctgaaggccagcgataccgccatgtactattgcgccagagatgtcggcagatgggctcctggcggcttcctggattattggggacagggcacactggtcaccgtgtctagt

SEQ ID NO: 735 - DNA, 723 bp, Artificial Sequence
  Synthetic Polynucleotide
gacatccagatgacacagagccctagcagcctgtctgccagcgtgggagacagagtgaccatcacctgtagagccagccagagcatcaacaagtggctgaactggtatcagcagaagcccggcaaggcccctaagctgctgatctatgccgccagctctctccagagcggagtgcctagcagattttctggcagcggctccggcaccgatttcaccctgacaatatccagcctccagcctgaggacttcgccacctactactgccagcaggactacaacttcccctacaccttcggccagggcaccaaggtggaaatcaaaagaggcggaggcggaagtggaggcggaggatctggcggcggaggctctcaagttcagctggttcagagcggcgctgaagtgaagaaacctggcagcagcgtgaaggtgtcctgcaaagcaagcggcggcacctttagcagctacggcatctcttgggtccgacaggctcctggacaaggactggaatggatgggctggatcagcgccatcttcggcacagccaattacgcccagaaattccagggccgcgtgacaatcacagccgacgagtctacaagcaccgcctacatggaactgagcagcctgagaagcgaggacaccgccgtgtactattgtgccagaggcgtggcctcctggtatctggattattggggccagggaaccctggtcaccgtgtcatct

SEQ ID NO: 736 - DNA, 723 bp, Artificial Sequence
  Synthetic Polynucleotide
cagatcgtgctgtctcagtctcctgccatcctgagtgcctctccaggcgagaaagtgaccatgacctgtagagccagcagcagcgtgtcctacatccactggttccagcagaagcctggcagcagccctaagccttggatctacgccaccagcaatctggcctctggcgtgccagtcagattttctggcagcggctctggcaccagctacagcctgacaatcagcagagtggaagccgaggatgccgccacctactactgtcagcagtggacctccaatcctcctacctttggcggaggcaccaagctggaaatcaaaggcggaggcggaagtggaggcggaggatctggcggcggaggctctcaggttcagctgcaacagcctggcgctgagcttgtgaaacctggcgcttccgtgaagatgagctgcaaggccagcggctacaccttcaccagctataacatgcactgggtcaagcagaccccaggcagaggactggaatggatcggagccatctatcccggcaacggcgacacctcctacaaccagaagttcaagggcaaagccacactgaccgccgacaagagcagcagcacagcctacatgcagctgagcagcctgaccagcgaagatagcgccgtgtactactgcgcccggtctacctattatggcggcgactggtacttcaacgtgtggggagctggcaccaccgtgacagtttct

SEQ ID NO: 737 - DNA, 723 bp, Artificial Sequence
  Synthetic Polynucleotide
gatattcagctgacccagagccacaagtttctgagcaccagcgtgggcgacagagtgtccatcacctgtaaagccagccaggacgtgtacaacgccgtggcctggtatcagcagaagcctggacagagccccaagctgctgatctacagcgccagcagcagatacacaggcgtgcccagcagattcaccggctctggatctggccccgacttcacctttaccatcagctctgtgcaggccgaggacctggccgtgtacttttgtcagcagcacttcagaacccctttcaccttcggcagcggcaccaagctggaaatcaagggcggaggcggaagtggaggcggaggatctggcggcggaggctctcaggttcagctccagcagtctggacccgagctgaagaaacctggcgagacagtgaagatcagctgcaaggccagcggctaccccttcaccaactacggcatgaactgggtcaagcaggcccctggacagggcctgaaatggatgggctggatcaataccagcaccggcgagagcaccttcgccgacgatttcaagggcagattcgacttcagcctggaaaccagcgccaacaccgcctacctccagatcaacaacctgaagtccgaggatatggctacctacttctgcgccagatgggaagtgtaccacggctacgtgccatattggggccagggcacaaccgtgacagtctcttct

SEQ ID NO: 738 - DNA, 720 bp, Artificial Sequence
  Synthetic Polynucleotide
gacatccagctgacacagagcccttctagcctgtctgccagcgtgggcgacagagtgaccatcacctgtaaagccagccaggacgtgggcacaagcgtggcatggtatcagcagaagcctggcaaggcccctaagctgctgatctactggaccagcaccagacacacaggcgtgcccagcagattttctggcagcggctctggcaccgacttcaccttcacaatatccagcctccagcctgaggacattgccacctactactgccagcagtacagcctgtaccgctctttcggccagggcaccaaggtggaaatcaaaggcggaggcggaagtggaggcggaggatctggcggcggaggctctgaagtgcagctggttgaatcaggtggcggcgttgtgcagcctggcagaagtctgagactgagctgtagcgccagcggcttcgatttcaccacctactggatgagctgggtccgacaggcccctggcaaaggactggaatggatcggcgagattcaccccgacagcagcaccatcaattacgcccctagcctgaaggacagattcaccatcagccgggacaacgccaagaacaccctgttcctccagatggactccctgaggccagaggataccggcgtgtacttttgcgccagcctgtatttcggcttcccttggtttgcctactggggccagggaacccctgtgacagttagctct

SEQ ID NO: 739 - DNA, 732 bp, Artificial Sequence
  Synthetic Polynucleotide
gacatccagctgacacagagcccttctagcctgtctgccagcgtgggcgacagagtgaccatcacctgtagcacaagcagcagcgtgtcctacatgcactggtatcagcagaagcccggcaaggcccctaagctgctgatctacagcaccagcaatctggcctctggcgtgcccagcagattttctggctctggcagcggcaccgacttcaccttcacaatatccagcctccagcctgaggacattgccacctactactgccaccagtggtctagctaccccacattcggccagggcaccaaggtggaaatcaaaggcggaggcggaagtggaggcggaggatctggcggcggaggctctggagtgcattctcaggttcagctgcaagagtctggccctggacttgtgcggcctagccaaacactgagcctgacctgtaccgtgtccggcttcacaatcagctccggctacagctggcactgggtccgacaaccacctggcagaggactggaatggatcggctacatccagtacagcggcatcaccaactacaaccccagcctgaagtcccgcgtgaccatgctggtggacacctccaagaaccagttcagcctgagactgagcagcgtgacagccgccgatacagccgtgtactactgcgccagagaggactacgactaccactggtacttcgacgtgtggggccagggaaccaccgtgacagtttcttct

SEQ ID NO: 740 - DNA, 732 bp, Artificial Sequence
  Synthetic Polynucleotide
gacatccagatgacacagagccctagcagcctgtctgccagcgtgggagacagagtgaccatcacctgtagagccagccaggacgtgaacacagccgtggcttggtatcagcagaagcctggcaaggcccctaagctgctgatctacagcgccagctttctgtacagcggcgtgcccagcagattcagcggaagcagaagcggcaccgacttcaccctgacaatatccagcctccagcctgaggacttcgccacctactactgccagcaggcttacaccacacctccaacattcggccagggcaccaaggtggaaatcaagagaacaggcggaggcggaagtggaggcggaggatctggcggcggaggctctgaagtgcagctggttgaatcaggtggcggcctggttcaacctggcggatctctgagactgagctgtgccgccagcggcttcaacatcaaggacacctacatccactgggtccgacaggcccctggcaaaggacttgaatgggtcgccagaatctaccccaccaacggctacaccagatacgccgactctgtgaagggcagattcaccatcagcgccgacaccagcaagaacaccgcctacctccagatgaactccctgagagccgaggacaccgccgtgtactactgtagcagatggggcggagccggagcctacgctatggatgtttggggccagggaaccctggtcaccgtgtcatct

SEQ ID NO: 741 - DNA, 741 bp, Artificial Sequence
  Synthetic Polynucleotide
gagatcgtgctgacacagagccctggcacactgtcactgtctccaggcgaaagagccacactgagctgtagagccagccagagcgtgtccagcgattacctggcttggtatcagcagaagcccggacaggctcccagactgctgatctacggtgcctctagcagagccacaggcatccccgatagattttctggcagcggctccggcaccgacttcaccctgacaattagcagactgcccgaggacttcgccgtgtactactgccagcagtacgtgtcctactggacctttggcggaggcaccaaggtggaaatcaaaagaacagtggctgccggcggaggcggaagtggaggcggaggatctggcggcggaggctctcaggtgcagctggttgaatctggtggcggagttgtgcagcctggcagaagcctgagactgtcttgtgccgccagcggcttcacctttagcagctatgccatgcactgggtccgacaggcccctggcaaaggacttgaatgggtcgccgtgatctcctacgacggcagcaacaagtattacgccgacagcgtgaagggcagattcaccatcagccgggacaacagcaagaacaccctgtacctccagatgaacagcctgagagccgaggacaccgccgtgtactactgtgccaaagaggccccttactacgccaaggactacatggacgtgtggggcaagggcaccaccgtgacagtttcttct

SEQ ID NO: 742 - DNA, 738 bp, Artificial Sequence
  Synthetic Polynucleotide
agctacgagctgatccagcctccttctgccgctgtgacactgggcaataccgtgtctctgacctgtgtgggagatgagctgcccaagagatacgcctactggtatcagcagaagcccgaccagagcatcgtgcgcgtgatctacgaagatagcgtgcggcctcctggcatcagcgatagattttctggcagcagcagcggcaccaccgccacactgacaattagagatgcccagaacgaggacgaggccgactactactgtcagagcacctacggcgacgacaagctgtacatctttggcggaggcaccaagctgacagtgcttggaggcggaggcggaagtggaggcggaggatctggcggcggaggctctgaagttcagctggttgaaacaggtggcggcctggtgcagcctggcaaatctctggaactgacctgcgccaccagcggcttcacctttaataccgcctggatgcactgggtccgacagagccccgataagcggctggaatggatcgccagaatcaaggacaccagcaacaactacgccaccgactacgtggaatccatgaagggcagattcaccatcagccgggacgacagcaagggctccgtgaacctccagatgaacagcctgaaagaagaggacaccgccacctactactgcaccaccgacttctacgacggcacctactattggaactactggggccagggcgtgatggtcacagtgtcatct

SEQ ID NO: 743 - DNA, 750 bp, Artificial Sequence
  Synthetic Polynucleotide
agcgtgatcgagctgacacagagccccaagttcatgagcaccagcgtgggcgacagagtgaacgtgacatacaaggccagccagaacgtgggcaccaacgtggcatggttccagcagaagcctggacagagccctaaggtgctgatctacagcgccagctacagatacagcggcgtgcccgatagattcacaggctctggcagcggcaccgacttcaccctgacaatcagcaacgtgcagagcgaggacctggccgagtatttctgccagcagtaccacacataccctctgacctttggcggaggcaccaagctggaaatcaagagaggcggaggcggaagtggaggcggaggatctggcggcggaggctctagaatggctcaggttcagctgcaacagagcggagccgaacttgctagacctggcgcttccgtgaagatgagctgtaaagccagcggctacaccttcaccacctacaccatccactgggtccgaagaaggccaggccacgaccttgagtggatcggctacatcaaccccagcagcggctgctccgactacaaccagaacttcaagggcaagaccacactgaccgccgacaagagcagcaacaccgcctacatgcagctcaacagcctgaccagcgaggacagcgccgtgtactattgtgccagaagggccgactacggcaactacgagtacacttggtttgcctactggggccagggcaccaccgtgacagtttcttct

SEQ ID NO: 744 - DNA, 723 bp, Artificial Sequence
  Synthetic Polynucleotide
gacatccagatgacacagagccctagcagcgtgtccgcctctgtgggagacagagtgaccatcacctgtagagccagccagagcgtgtccagctacctgaactggtatcagcagaagcccggcaaggcccctaagctgctgatctatgctgccagctctctgcagtctggcgtgcccagcagattttctggcagcggctctggcaccgacttcaccctgaccatatctagcctgcagcctgaggacttcgccacctactactgccagcagagctacagcaccccttggacctttggacagggcaccaagctggaaatcaagagaggcggaggcggaagtggaggcggaggatctggcggcggaggctctgaagtgcagctggttgaatcaggtggcggcctggttcagcctggcagaagtctgagactgagctgtgccgccagcggcttcaccttcgacgattacggaatgcactgggtccgacaggcccctggcaaaggacttgaatgggtgtccggcatcagctggaacagcggcagcatcggctatgccgatagcgccaagggcagattcaccatcagccgggacaacagcaagaacaccctgtacctgcagatgaacagcctgagagccgaggacaccgccgtgtactactgtgccaagaggggcaacagcaacagcttcgactattggggccagggcaccctggtcacagtctcttct

SEQ ID NO: 745 - DNA, 744 bp, Artificial Sequence
  Synthetic Polynucleotide
cagtctgctctgacccagcctagatccgtgtctggctctcctggacagagcgtgaccatcagctgtaccggcacctcttctgacgtgggcagctacaactacgtgtcctggtatcagcagagccccggcaaggcccctaagctgatgatctacgacgtgtccaacagacccagcggcgtgtccaatagattctccggcagcaagagcggcaacaccgccagcctgacaatctctggactccagtctgaggacgaggccgactactactgtaccagctacggcagctacgacatccccgtgatttttggcggaggcaccaaggtggaaatcaaaggcggaggcggaagtggaggcggaggatctggcggcggaggctctcagatgcagctggtgcagtctggggccgaagtgaagaaacctggcagcagcgtgaaggtgtcctgcaaagcaagcggcggcacctttagctcctacgccatctcttgggtccgacaggctccaggacaaggactggaatggatgggcggcatcatccccatcttcggcacagccaattacgcccagaaattccagggcagagtgacaatcaccgccgacaagagcaccagcaccgcctacatggaactgagcagcctgagaagcgacgacaccgccgtgtactactgcgccagagatgaactgtgggccaccaactactactacatggacgtgtggggcaagggcaccctggtcacagtttcttct

SEQ ID NO: 746 - DNA, 723 bp, Artificial Sequence
  Synthetic Polynucleotide
gacgtggtcatgacacagagcccttctagcctgtctgccagcgtgggcgacagagtgaccatcacctgtaaagccagccagagcgtgtccagctacctgaactggtatcagcagaagcccggcaaggcccctaagctgctgatctatgctgccagcagcctggaaacaggcgtgcccagcagattttctggcagcggctctggcaccgacttcaccctgacaatatccagcctccagcctgaggacttcgccacctactactgtcagcagagctacagcaccccttggacctttggccagggcaccaaggtggaaatcaagagaggcggaggcggaagtggaggcggaggatctggcggcggaggctctgaagttcagctggttgaatctggcggcggactcgttagacctggcggatctctgagactgagctgtgccgccagcggcttcaccttcgatgattacggcatgagctgggtccgacaggcccctggaaaaggactggaatgggtgtccggcatcagctggaatagcggctctatcggctacgccgacagcgtgaagggcagattcaccatcagccgggacaacgccaagaacagcctgtacctccagatgaactccctgagagccgaggacacagccctgtactactgtgccaagcggggcaacagcaacagcttcgattattggggccagggaaccaccgtgaccgtgtcatct

SEQ ID NO: 747 - DNA, 723 bp, Artificial Sequence
  Synthetic Polynucleotide
gacatccagatgacacagagccctagcagcgtgtccgcctctgtgggagacagagtgaccatcacctgtagagccagccagagcatcagcagctacctgaactggtatcagcagaagcccggcaaggcccctaaactgctgatctatgccgccagctctctccagagcggagtgcctagcagattttctggcagcggctccggcaccgatttcaccctgacaatatccagcctccagcctgaggacttcgccacctactactgccagcagagctacagcaccccttggacctttggacagggcaccaaggtggaaatcaagagaggcggaggcggaagtggaggcggaggatctggcggcggaggctctgaagtgcagctggttgaatcaggtggcggcctggttcagcctggcagaagtctgagactgagctgtgccgcctccggcttcaccttcgatgattacgccatgcactgggtccgacaggcccctggaaaaggactggaatgggtgtccggcatcagctggaatagcggctctatcggctacgccgattccgccaagggcagattcaccatcagccgggacaacagcaagaacaccctgtacctccagatgaactccctgagagccgaggacaccgccgtgtactactgtgccaagaggggcaacagcaacagcttcgactattggggccagggcaccctggtcacagtctcttct

SEQ ID NO: 748 - DNA, 723 bp, Artificial Sequence
  Synthetic Polynucleotide
gacacagtgctgacacagtctccagctctggctgtgtctcctggcgagagagtgaccatctcttgcaaggccagcgagagcgtgtccaccagaatgcactggtacagacagaagcccggccagcagccaaagctgctgatctacaagaccagcaacctggcctctggcgtgccagccagattttctggctctggcagcggcaccgacttcaccctgaccattgatcccgtggaagccgacgacaccgccacctacttttgtcagcagtcctggaacggccctctgacatttggaagcggcaccaagctggaaatcaagagaggcggaggcggaagtggaggcggaggatctggcggcggaggctctcaggtgcagctgaaagagtctggccctggactggtgcagcctagccaaacactgagcctgacctgtaccgtgtctggcctgtctctgaccagcaatggcgtgtcctggatcagacagcctcctggcaaaggactggaatggctgggcgtgatctggtccaatggcggcacagactacaacagcgccatcaagagccggctgagcttcagcagagacaccagcaagagccaggtgttcctgaagatgaacagcctccagaccgaggataccgccatgtacttttgcgccagacctcggtacaactccggctacttcttcgactattggggccagggcgtgatggtcaccgttagctct

SEQ ID NO: 749 - DNA, 759 bp, Artificial Sequence
  Synthetic Polynucleotide
gacctggtcatgacacagagcccttttagcctggccgtgtccgagggcgagatggtcacaatcaagtgcaagagcagccagagcctgctgagcagcagacaccagaagaactttctggcctggtacagacagaagcccggacagtctcccaagctgctgatctaccacgccagcacaagacagagcggcgtgcccgatagattcatcggctctggcagcggcaccgacttcaccctgacaatctctgatgtgcaggccgaggacctggccgactactattgtctccagcactacacaagcccctacacctttggagccggcaccaagctggaactgaaaagaggcggaggcggaagtggaggcggaggatctggcggcggaggctctcaagtgcagctgaaagagtctggccccggactggttcagcctagccaaacactgagcctgacctgtaccgtgtccggctttagcctgaccagctaccacgtgcactgggtccgacaacctccaggcaaaggactggaatggatgggcgtgatgtggagcgacggcgacaccctgtataacagcgccctgaagtcccggctgagcatcagcagagataccagcaagagccaggtgctgctccagatggatagcctccagagcgaggataccgccacctactactgtgccagactccaggtgttcggctaccccggcatcagagactacgtgatggatgcctggggacagggcgcttctgtgacagtctcttct

SEQ ID NO: 750 - DNA, 762 bp, Artificial Sequence
  Synthetic Polynucleotide
gacatccagctgactcagagccctagctttctgagcgccagcgtgggcgacagagtgaccattacatgtagagccagccaggacatcagcagctacctggcctggtatcagcagaagcctggcaacgcccctaaactgctgatctacgccgccagcctgctgcaatctggcgtgccaagcagattcagcgcctttggcagcggcaccgagttcaccctgacaatatctagcctccagccagaggacttcgccacctactactgccagcacctgaagtcttaccctctgttcaccttcggacccggcaccaaggtggacatcaaaagaggcggaggcggaagtggaggcggaggatctggcggcggaggctctgaagttcagctggttgagtctggcggcagagtcgttagacctggcggaagcctgagactgtcttgtgccgccagcggcttcacctttgacgactacggcatgagctgggtccgacagcctcctggaaagggcctcgaatttgtgtccggcctgaactggaacggcgacatcaccgcctttaccgacagcgtgaagggcagattcaccatcagccgggacaacgtgaagtccagcctgtacctccagatgaacagcctgagagccgacgacaccgccttctactactgtgccagagtgcggacctggggcgattacacaacaggcgaggaaatcatcaacagctggtacttcgacctgtggggcagaggcacactggtcacagtctcttct

SEQ ID NO: 751 - DNA, 726 bp, Artificial Sequence
  Synthetic Polynucleotide
gaactccagatgacacagagccctagcagcctgtctgccagcgtgggagacagagtggctatcacctgtagagccagccagagcatcagcagccacctgaactggtatcagcagaagcctggcaaggcccctaagctgctgatctatgccgccagctctctccagagcggagtgcctagcagattttctggcagcggctccggcaccgatttcaccctgacaatatccagcctccagcctgaggacttcgccacctactactgccagcagagctacagcaccccttacacattcggccagggcaccaagctggaaatcaaaggcggaggcggaagtggaggcggaggatctggcggcggaggctctgaagtgcagctggttgaatcaggtggcggcctggttcaacctggcggatctctgagactgagctgtgccgcctccggcttcacctttagcagctactggatgagctgggtccgacaggcccctggcaaaggacttgagtgggtcgccaacatcaagcaggacggcagcgagaagtattacgtggacagcgtgaagggcagattcaccatcagccgggacaacgccaagaacagcctgtacctgcggatgaactccctgagagccgaggataccgccgtgtactattgtgccagagcctggggctacagctcctactacttcgactattggggccagggaaccctggtcaccgtttctcca

SEQ ID NO: 752 - DNA, 714 bp, Artificial Sequence
  Synthetic Polynucleotide
gacatcgtgatgacccagagccacaagttcatgagcaccagcgtgggcgacagagtgtccatcatctgcaaggccagccaggatgtgggcacagccgtggattggtatcagcagaagcctggacagagccccaagctgctgatctactgggccagcacaagacacaccggcgtgcccgatagattcacaggctctggcagcggcaccgatttcaccctggccatcacaaacgtgcagagcgaggacctggccgactacttctgccagcagtacaacagctaccctctgacctttggagccggcaccaagctggaaatcaagagaggcggaggcggaagtggaggcggaggatctggcggcggaggctctgaagttcagctgcaacagtctggccccgagctggttaagcctggaacaagcgtgcggatctcctgcaagaccagcggctacaccttcaccgagtacaccatccactgggtcaagcagagccacggcaagagcctggaatggatcggcaacatcaaccccaacaacggcggcaccacctacaaccagaagttcgaggacaaggccacactgaccgtggacaagagcagcagcaccgcctacatggaactgagaagcctgaccagcgaggacagcgccgtgtactattgtgccgccggatggaacttcgactactggggccagggaacaaccctgaccgttagctct

SEQ ID NO: 753 - DNA, 714 bp, Artificial Sequence
  Synthetic Polynucleotide
gacatccagatgacacagagccctagcagcctgtctgccagcgtgggagacagagtgaccatcacatgcaaggccagccaggatgtgggcacagccgtggattggtatcagcagaagcctggcaaggcccctaagctgctgatctactgggccagcacaagacacacaggcgtgcccagcagattttctggcagcggctctggcaccgacttcaccctgacaatatccagcctccagcctgaggacttcgccacctactactgccagcagtacaacagctaccctctgaccttcggccagggcaccaaggtggaaatcaaaagaggcggaggcggaagtggaggcggaggatctggcggcggaggctctgaagtgcagctggttgaatcaggtggcggcctggttcaacctggcggatctctgagactgagctgtgccgccagcggctacacctttaccgagtacacaatccactgggtccgacaggcccctggcaaaggacttgagtgggtcgccaacatcaaccccaacaatggcggcaccacctacaaccagaagttcgaggacagattcaccatcagccgggacaacagcaagaacaccctgtacctccagatgaactccctgagagccgaggacaccgccgtgtactattgtgccagaggctggaacttcgactactggggccagggaacactggtcaccgttagctct

SEQ ID NO: 754 - DNA, 720 bp, Artificial Sequence
  Synthetic Polynucleotide
gacatccagatgacacagagccctagcagcctgtctgccagcgtgggagacagagtgaccatcacatgcaaggccagccaggatgtgggcacagccgtggattggtatcagcagaagcctggcaaggcccctaagctgctgatctcttgggccagcacaagacacacaggcgtgcccagcagattttctggcagcggctctggcaccgacttcaccctgacaatatccagcctccagcctgaggacttcgccacctacttttgccagcagtacaacagctaccctctgaccttcggccagggcaccaaggtggaaatcaagagaacagttggcggaggcggaagtggaggcggaggatctggcggcggaggctctcaagttcagctggttcagagcggagccgaagtgaagaaacctggcgagagcgtgaaggtgtcctgcaaagccagcggctacacctttaccgagtacaccatccactgggtccgacaggctccaggacaaggactggaatggatgggcaacatcaaccccaacaacggcggcaccacctacaaccagaaattcgaggatcgcgtgacaatcaccgccgacaagagcaccagcaccgcctacatggaactgagcagcctgagaagcgaggacaccgccgtgtactattgtgccagaggctggaacttcgactactggggccagggaaccaccgtgacagtctcttct

SEQ ID NO: 755 - DNA, 714 bp, Artificial Sequence
  Synthetic Polynucleotide
gacatccagatgacacagagccctagcagcctgtctgccagcgtgggagacagagtgaccatcacatgcaaggccagccaggatgtgggcacagccgtggattggtatcagcagaagcctggcaaggcccctaagctgctgatctactgggccagcacaagacacacaggcgtgcccagcagattttctggcagcggctctggcaccgacttcaccctgacaatatccagcctccagcctgaggacttcgccacctactactgccagcagtacaacagctaccctctgaccttcggccagggcaccaaggtggaaatcaaaagaggcggaggcggaagtggaggcggaggatctggcggcggaggctctgaagttcagctgcaacagtctggccccgagctggttaagcctggaacaagcgtgcggatctcctgcaagaccagcggctacaccttcaccgagtacaccatccactgggtcaagcagagccacggcaagagcctggaatggatcggcaacatcaaccccaacaacggcggcaccacctacaaccagaagttcgaggacaaggccacactgaccgtggacaagagcagcagcaccgcctacatggaactgagaagcctgaccagcgaggacagcgccgtgtactattgtgccgccggatggaacttcgactactggggccagggaacaaccctgaccgttagctct

SEQ ID NO: 756 - DNA, 714 bp, Artificial Sequence
  Synthetic Polynucleotide
gacatcgtgatgacccagagccacaagttcatgagcaccagcgtgggcgacagagtgtccatcatctgcaaggccagccaggatgtgggcacagccgtggattggtatcagcagaagcctggacagagccccaagctgctgatctactgggccagcacaagacacaccggcgtgcccgatagattcacaggctctggcagcggcaccgatttcaccctggccatcacaaacgtgcagagcgaggacctggccgactacttctgccagcagtacaacagctaccctctgacctttggagccggcaccaagctggaaatcaagagaggcggaggcggaagtggaggcggaggatctggcggcggaggctctgaagtgcagctggttgaatcaggtggcggcctggttcaacctggcggatctctgagactgagctgtgccgccagcggctacacctttaccgagtacacaatccactgggtccgacaggcccctggcaaaggacttgagtgggtcgccaacatcaaccccaacaatggcggcaccacctacaaccagaagttcgaggacagattcaccatcagccgggacaacagcaagaacaccctgtacctccagatgaactccctgagagccgaggacaccgccgtgtactattgtgccagaggctggaacttcgactactggggccagggaacactggtcaccgttagctct

SEQ ID NO: 757 - DNA, 732 bp, Artificial Sequence
  Synthetic Polynucleotide
gagatcgtgctgacacagtctcccgccacactgtcactgtctccaggcgaaagagccacactgagctgtagcgccaccagcagcgtgtcctacatccactggtatcagcagaagcccggacaggcccctagactgctgatctacagcaccagcaatctggcctctggcatccccgccagattttctggctctggaagcggcaccgacttcaccctgacaatcggcagactggaacccgaggacttcgccgtgtactactgccagcagagaagcagcagccccttcacctttggacagggcaccaaggtggaaatcaagagaggcggaggcggaagtggaggcggaggatctggcggcggaggctctgaagtgcagctggttgagtctggcggcggactggttaagcctgagggaagcctgagactgtcttgtgccgccagcggcttcaccttcagcagatacggcatgagctgggtccgacaggctcctggcaaaggactggaatgggtgtccacaatttccggcggaggcacctacatctactaccccgatagcgtgaagggcagattcaccatctccagagacaacgccaagaacagcctgttcctccagatgaactccctgagagccgaggacacagccgtgtattattgcgctcgggacaactacggcagaaactacgactacggcatggactactggggccagggcacactggttaccgttagctct

SEQ ID NO: 758 - DNA, 729 bp, Artificial Sequence
  Synthetic Polynucleotide
cagatcgtgctgacacagagccctgccatcatgagtgcctctccaggcgaggaagtgaccctgacctgtagcgccaccagcagcgtgtcctacatccactggtttcagcagaggcccggcacaagccctaagctgtggatctacagcaccagcaatctggcctctggcgtgccagtgcggtttagcggatctggctacggcaccagctacagcctgaccatcagcagaatggaagccgaggatgccgccacctactactgccagcagagaagcagcagccccttcacatttggcagcggcaccaagctggaaatcaaaggcggaggcggaagtggaggcggaggatctggcggcggaggctctgaagtgaaggtggtggaatctggcggcgacctggttaagcctggcggatctctgaagctgagctgtgtggtgtccggcttcaccttcagcagatacggcatgagctgggtccgacagacccctggcaaaagactggaatgggtcgccacaatttccggcggaggcacctacatctactaccccgatagcgtgaagggcagattcaccatctccagagacaacgccaagaacaccctgtacctccagatgagcagcctgaagtctgaggacaccgccatgtaccactgcaccagggacaactacggcagaaactacgactacggcatggactactggggccagggcacaagcgtgacagtctcttct

SEQ ID NO: 759 - DNA, 747 bp, Artificial Sequence
  Synthetic Polynucleotide
gacatcgtgctgacacagagccctgcttctctggccgtttctcctggacagagggccaccatcacatgcagagccagcaagagcgtgtccaccagcggctacagctacatgcactggtatcagcagaagcccggccagcctcctaagctgctgatctacctggcctccaacctggaaagcggagtgcctgccagattttctggcagcggctctggcaccgacttcaccctgacaatcaaccccgtggaagccaacgacaccgccaactactactgccagcacagcagagagctgcccttcacatttggcggaggcaccaaggtggaaatcaagagaacaggcggaggcggaagtggaggcggaggatctggcggcggaggctctgaagtgcagctggttgagtctggcggcggacttgtgaaacctggcggaagcctgagactgagctgtgccgcttccggctttacctttagcggctacgccatgagctgggtccgacaggctcctggcaaaggactggaatgggtgtccacaatcagcagcggcggcacctacatctactaccccgatagcgtgaaaggccggttcaccatcagccgggacaacgccaagaacagcctgtacctccagatgaactccctgagagccgaggacaccgccgtgtactattgtgccagactcggcggcgacaattactacgagtatttcgacgtgtggggcaagggcaccaccgtgacagtttcttct

SEQ ID NO: 760 - DNA, 720 bp, Artificial Sequence
  Synthetic Polynucleotide
gacatccagatgacacagagccctagcagcctgtccgtgtccgtgggagacagagtgaccatcacatgcaaggccagccagaacgtgcggacagtggtggcttggtatcagcagaagcctggactggcccctaagacactgatctacctggcctccaacagacacaccggcgtgccaagcagattttctggcagcggctctggcaccgacttcaccttcacaatatccagcctccagcctgaggacattgccacctacttttgccagcagcactggtcttaccctctgacctttggacagggcaccaaggtggaagtgaagagaggcggaggcggaagtggaggcggaggatctggcggcggaggctctgaagttcagctgcttgaatctggcggcggactggttcaacctggcggatctctgagactgagctgtgccgcctctggcttcgccttcagcacctacgatatgagctgggtccgacaggcccctggcaaaggacttgaatgggtcgccacaatcagcagcggcggcagctacacctactacctggatagcgtgaagggcagattcaccatcagccgggacagcagcaagaacaccctgtacctccagatgaactccctccaggccgaggactccgccatctactattgtgcccctaccaccgtggtgcctttcgcctattggggacagggaaccctggtcaccgttagctct

SEQ ID NO: 761 - DNA, 732 bp, Artificial Sequence
  Synthetic Polynucleotide
gacattcagatgacacagagccctagcagcctgagcgcctctgtgggagacagagtgaccatcacatgcaagagcagccagagcctgctgtactccagcaatcagaagaactacctggcctggttccagcagaagcctggcaaggctcctaagctgctgatctactgggccagcaccagagaaagcggcgtgccaagcagattttctggcagcggctctggcaccgacttcaccctgacaatatccagcctccagcctgaggacttcgccacctacttttgccaccagtacctgagcagctacacattcggacagggcaccaaggtggaaatcaagcggggcggaggcggaagtggaggcggaggatctggcggcggaggctctgaggtgcagctggttgaatctggcggaggactggttcagcctggcggatctctgagactgtcttgtgccgccagcggctacaccttcaccagctattggctgcactgggtccgacaggcccctggcaaaggacttgagtgggtcggatatatcaggcccagcaccggctacacagagtacaaccagaagttcaaggaccgcttcaccatcagcgccgacaccagcaagaataccgcctacctccagatgaacagcctgagagccgaggacaccgccgtgtactactgtgccagatccagatggctgctggactattggggccagggcacactggttacagttagctct

SEQ ID NO: 762 - DNA, 729 bp, Artificial Sequence
  Synthetic Polynucleotide
gacattcagatgacacagagccctagcagcctgagcgcctctgtgggagacagagtgaccatcacatgcaagagcagccagagcgtgctgtactccagcaatcagaagaactacctggcctggttccagcagaagcctggcaaggctcctaagctgctgatctactgggccagcaccagagaaagcggcgtgccaagcagattttctggcagcggctctggcaccgacttcaccctgacaatatccagcctccagcctgaggacttcgccacctacttttgccaccagtacctgagcagctacacattcggacagggcaccaaggtggaaatcaagcggggcggaggcggaagtggaggcggaggatctggcggcggaggctctgaggtgcagctggttgaatctggcggaggactggttcagcctggcggatctctgagactgtcttgtgccgccagcggcttcaccttcaccacctattggatgcactgggtccgacaggcccctggcaaaggacttgagtgggtcggatatatcaggcccagcaccggctacacagagtacaaccagaagttcaaggaccgcttcaccatcagcgccgacaccagcaagaataccgcctacctccagatgaacagcctgagagccgaggacaccgccgtgtactactgtgccagatccagatggctgctggactattggggccagggcacactggttacagtttct

SEQ ID NO: 763 - DNA, 729 bp, Artificial Sequence
  Synthetic Polynucleotide
gaggtgcagctggttgaatctggcggaggactggttcagcctggcggatctctgagactgtcttgtgccgccagcggctacaccttcaccacctattggatgcactgggtccgacaggcccctggcaaaggacttgagtgggtcggatatatcaggcccagcaccggctacacagagtacaaccagaagttcaaggaccgcttcaccatcagcgccgacaccagcaagaataccgcctacctccagatgaacagcctgagagccgaggacaccgccgtgtactactgtgccagatccagatggctgctggactattggggccagggcacactggttacagtttctggcggaggcggaagtggaggcggaggatctggcggcggaggctctgacattcagatgacacagagccctagcagcctgagcgcctctgtgggagacagagtgaccatcacatgcaagagcagccagagcctgctgtactccagcaatcagaagaactacctggcctggttccagcagaagcctggcaaggctcctaagctgctgatctactgggccagcaccagagaaagcggcgtgccaagcagattttctggcagcggctctggcaccgacttcaccctgacaatatccagcctccagcctgaggacttcgccacctacttttgccaccagtacctgagcagctacacattcggacagggcaccaaggtggaaatcaagcgg

SEQ ID NO: 764 - DNA, 720 bp, Artificial Sequence
  Synthetic Polynucleotide
gacatccagatgacacagagccctagcagcctgtctgccagcgtgggagacagagtgaccatcacctgtagagccagccaggacatcagcaactacctgaactggtatcagcagaagcccggcaaggcccctaagctgctgatctactacaccagcagactgcacagcggcgtgcccagcagattttctggctctggcagcggcaccgacttcaccctgacaatatctagcctccagcctgaggacttcgccacctactattgccagcagggcaacaccctgccttacacatttggacagggcaccaaggtggaaatcaagagaggcggaggcggaagtggaggcggaggatctggcggcggaggctctgaagtgcagctggttgaatcaggtggcggcctggttcaacctggcggatctctgagactgagctgtgccgccagcggctacaccttcagcgactactttatgagctgggtccgacaggcccctggcaaaggacttgaatgggtcgccaccatcagcaatggcggcacctacacttactaccccgacagcgtgaagggcagattcaccatctccagagacaacagcaagaacaccctgtacctccagatgaactccctgagagccgaggacaccgccgtgtactactgcgccagattcgacggctacatcttcgactattggggccagggcaccctggtcacagtctcttct

SEQ ID NO: 765 - DNA, 720 bp, Artificial Sequence
  Synthetic Polynucleotide
gacatccagatgacacagagccctagcagcctgtctgccagcgtgggagacagagtgaccatcacctgtagagccagccaggacatcagcagctacctgaactggtatcagcagaagcccggcaaggcccctaagctgctgatctactacaccagcagactgcacagcggcgtgcccagcagattttctggctctggcagcggcaccgacttcaccctgacaatatctagcctccagcctgaggacttcgccacctactattgccagcagggcaacaccctgccttacacatttggacagggcaccaaggtggaaatcaagagaggcggaggcggaagtggaggcggaggatctggcggcggaggctctgaagtgcagctggttgaatcaggtggcggcctggttcaacctggcggatctctgagactgagctgtgccgccagcggcttcaccttcagcgactactttatgagctgggtccgacaggcccctggcaaaggacttgaatgggtcgccaccatcagcaatggcggcacctacacttactaccccgacagcgtgaagggcagattcaccatctccagagacaacagcaagaacaccctgtacctccagatgaactccctgagagccgaggacaccgccgtgtactactgcgccagattcgacggctacatcttcgactattggggccagggcaccctggtcacagtctcttct

SEQ ID NO: 766 - DNA, 720 bp, Artificial Sequence
  Synthetic Polynucleotide
gacatccagatgacacagagccctagcagcctgtctgccagcgtgggagacagagtgaccatcacctgtagagccagccaggacatcagcaactacctgaactggtatcagcagaagcccggcaaggcccctaagctgctgatctactacaccagcagactgcacagcggcgtgcccagcagattttctggctctggcagcggcaccgacttcaccctgacaatatctagcctccagcctgaggacttcgccacctactattgccagcagggcaacaccctgccttggacatttggacagggcaccaaggtggaaatcaagagaggcggaggcggaagtggaggcggaggatctggcggcggaggctctgaagtgcagctggttgaatcaggtggcggcctggttcaacctggcggatctctgagactgagctgtgccgccagcggcttcaccttcagcgactactttatgagctgggtccgacaggcccctggcaaaggacttgaatgggtcgccaccatcagcaatggcggcacctacacttactaccccgacagcgtgaagggcagattcaccatctccagagacaacagcaagaacaccctgtacctccagatgaactccctgagagccgaggacaccgccgtgtactactgcgccagattcgacggctacatcttcgactattggggccagggcaccctggtcacagtctcttct

SEQ ID NO: 767 - DNA, 735 bp, Artificial Sequence
  Synthetic Polynucleotide
agctacgtgctgacacagcctccatccgtgtctgtggctccaggacagaccgccagaatcacatgcggcggcaacaacatcggcagcaagaccgtgcactggtatcagcagccacctggacaggctccagtggtggtggtgtacgacgacagcgatagacctagcggcatccccgagagattcagcggcagcaattccggcaataccgccacactgaccatcagcagagtggaagctggcgacgaggccgtgtactactgccaagtgtgggacagcagcagcgatcacgtggtgtttggcggcggaacaaagctgacagtgcttggcggaggcggaagtggaggcggaggatctggcggcggaggctctcaactccagctgcaagagtctggccctggcctggtcaagcctagcgaaacactgagcctgacctgtaccgtgtctggcggctctatcagctccagcagctatttctggggctggatcagacaacctcctggcaaaggactggaatggatcggctccatctactacagcggcatcacctactacaaccccagcctgaagtccagagtgaccatctccgtggacaccagcaagaaccagttctccctgaagctgagcagcgtgacagccgccgataccgccgtgtattattgtgccagacatgacggcgctgtggccggcctgtttgattattggggacagggcaccctggtcaccgtgtcatctgct

SEQ ID NO: 768 - DNA, 735 bp, Artificial Sequence
  Synthetic Polynucleotide
agctacgtgctgacacagcctccatccgtgtctgtggctccaggacagaccgccagaatcacatgcggcggcaagaacatcggcagcaagagcgtgcactggtatcagcagccacctggacaggctccagtggtggtggtgtacgacgacagcgatagacctagcggcatccccgagagattcagcggcagcaattccggcaataccgccacactgaccatcagcagagtggaagctggcgacgaggccgtgtactactgccaagtgtgggacagcagcagcgatcacgtggtgtttggcggcggaacaaagctgacagtgcttggcggaggcggaagtggaggcggaggatctggcggcggaggctctcaactccagctgcaagagtctggccctggcctggtcaagcctagcgaaacactgagcctgacctgtaccgtgtctggcggctctatcagctccggcagctatatctggggctggatcagacaacctcctggcaaaggactggaatggatcggctccatctactacagcggcatcacctactacaaccccagcctgaagtccagagtgaccatctccgtggacaccagcaagaaccagttctccctgaagctgagcagcgtgacagccgccgataccgccgtgtattattgtgccagacatgacggcgctgtggccggcctgtttgattattggggacagggcaccctggtcaccgtgtcatctgct

SEQ ID NO: 769 - DNA, 735 bp, Artificial Sequence
  Synthetic Polynucleotide
agctacgtgctgacacagcctccatccgtgtctgtggctccaggacagaccgccagaatcacatgcggcggcaagaacatcggcagcaagagcgtgcactggtatcagcagccacctggacaggctccagtggtggtggtgtacgacgacagcgatagacctagcggcatccccgagagattcagcggcagcaattccggcaataccgccacactgaccatcagcagagtggaagctggcgacgaggccgtgtactactgccaagtgtgggacagcagcagcgatcacgtggtgtttggcggcggaacaaagctgacagtgcttggcggaggcggaagtggaggcggaggatctggcggcggaggctctcaactccagctgcaagagtctggccctggcctggtcaagcctagcgaaacactgagcctgacctgtaccgtgtctggcggctctatcagctccggcagctatttctggggctggatcagacaacctcctggcaaaggactggaatggatcggctccatctactacagcggcatcacctactacaaccccagcctgaagtccagagtgaccatctccgtggacaccagcaagaaccagttctccctgaagctgagcagcgtgacagccgccgataccgccgtgtattattgtgccagacatgacggcgctatggccggcctgtttgattattggggacagggcaccctggtcaccgtgtcatctgct

SEQ ID NO: 770 - DNA, 735 bp, Artificial Sequence
  Synthetic Polynucleotide
agctacgtgctgacacagcctccatccgtgtctgtggctccaggacagaccgccagaatcacatgcggcggcaagaacatcggcagcaagagcgtgcactggtatcagcagccacctggacaggctccagtggtggtggtgtacgacgacagcgatagacctagcggcatccccgagagattcagcggcagcaattccggcaataccgccacactgaccatcagcagagtggaagctggcgacgaggccgtgtactactgccaagtgtgggacagcagcagcgatcacgtggtgtttggcggcggaacaaagctgacagtgcttggcggaggcggaagtggaggcggaggatctggcggcggaggctctcaactccagctgcaagagtctggccctggcctggtcaagcctagcgaaacactgagcctgacctgtaccgtgtctggcggctctatcagctccggcagctatttctggggctggatcagacaacctcctggcaaaggactggaatggatcggctccatctactacagcggcagcacctactacaaccccagcctgaagtccagagtgaccatctccgtggacaccagcaagaaccagttctccctgaagctgagcagcgtgacagccgccgataccgccgtgtattattgtgccagacatgacggcgctgtggccggcctgtttgattattggggacagggcaccctggtcaccgtgtcatctgct

SEQ ID NO: 771 - DNA, 735 bp, Artificial Sequence
  Synthetic Polynucleotide
agctacgtgctgacacagcctccatccgtgtctgtggctccaggacagaccgccagaatcacatgcggcggcaagaacatcggcagcaagagcgtgcactggtatcagcagccacctggacaggctccagtggtggtggtgtacgacgacagcgatagacctagcggcatccccgagagattcagcggcagcaattccggcaataccgccacactgaccatcagcagagtggaagctggcgacgaggccgtgtactactgccaagtgtgggacagcagcagcgatcacgtggtgtttggcggcggaacaaagctgacagtgcttggcggaggcggaagtggaggcggaggatctggcggcggaggctctcaactccagctgcaagagtctggccctggcctggtcaagcctagcgaaacactgagcctgacctgtaccgtgtctggcggctctatcagctccggcagctatttctggggctggatcagacaacctcctggcaaaggactggaatggatcggctccatctactacagcggcatcagctactacaaccccagcctgaagtccagagtgaccatctccgtggacaccagcaagaaccagttctccctgaagctgagcagcgtgacagccgccgataccgccgtgtattattgtgccagacatgacggcgctgtggccggcctgtttgattattggggacagggcaccctggtcaccgtgtcatctgct

SEQ ID NO: 772 - DNA, 735 bp, Artificial Sequence
  Synthetic Polynucleotide
agctacgtgctgacacagcctccatccgtgtctgtggctccaggacagaccgccagaatcacatgcggcggcaagaacatcggcagcaagagcgtgcactggtatcagcagccacctggacaggctccagtggtggtggtgtacgacgacagcgatagacctagcggcatccccgagagattcagcggcagcaattccggcaataccgccacactgaccatcagcagagtggaagctggcgacgaggccgtgtactactgccaagtgtgggacagcagcagcgatcacgtggtgtttggcggcggaacaaagctgacagtgcttggcggaggcggaagtggaggcggaggatctggcggcggaggctctcaactccagctgcaagagtctggccctggcctggtcaagcctagcgaaacactgagcctgacctgtaccgtgtctggcggctctatcagctccggcagctatttctggggctggatcagacaacctcctggcaaaggactggaatggatcggctccatctactacagcggcatcacctactacaaccccggcctgaagtccagagtgaccatctccgtggacaccagcaagaaccagttctccctgaagctgagcagcgtgacagccgccgataccgccgtgtattattgtgccagacatgacggcgctgtggccggcctgtttgattattggggacagggcaccctggtcaccgtgtcatctgct

SEQ ID NO: 773 - DNA, 735 bp, Artificial Sequence
  Synthetic Polynucleotide
agctacgtgctgacacagcctccatccgtgtctgtggctccaggacagaccgccagaatcacatgcggcggcaagaacatcggcagcaagagcgtgcactggtatcagcagccacctggacaggctccagtggtggtggtgtacgacgacagcgatagacctagcggcatccccgagagattcagcggcagcaattccggcaataccgccacactgaccatcagcagagtggaagctggcgacgaggccgtgtactactgccaagtgtgggacagcagcagcgatcacgtggtgtttggcggcggaacaaagctgacagtgcttggcggaggcggaagtggaggcggaggatctggcggcggaggctctcaactccagctgcaagagtctggccctggcctggtcaagcctagcgaaacactgagcctgacctgtaccgtgtctggcggctctatcagctccggcagctatttctggggctggatcagacaacctcctggcaaaggactggaatggatcggctccatctactacagcggcatcacctactacaaccccaccctgaagtccagagtgaccatctccgtggacaccagcaagaaccagttctccctgaagctgagcagcgtgacagccgccgataccgccgtgtattattgtgccagacatgacggcgctgtggccggcctgtttgattattggggacagggcaccctggtcaccgtgtcatctgct

SEQ ID NO: 774 - DNA, 735 bp, Artificial Sequence; identical to SEQ ID NO: 731
  Synthetic Polynucleotide

SEQ ID NO: 775 - DNA, 735 bp, Artificial Sequence
  Synthetic Polynucleotide
agctacgtgctgacacagcctccatccgtgtctgtggctccaggacagaccgccagaatcacatgcggcggcaacaacctcggcagcaagagcgtgcactggtatcagcagccacctggacaggctccagtggtggtggtgtacgacgacagcgatagacctagcggcatccccgagagattcagcggcagcaattccggcaataccgccacactgaccatcagcagagtggaagctggcgacgaggccgtgtactactgccaagtgtgggacagcagcagcgatcacgtggtgtttggcggcggaacaaagctgacagtgcttggcggaggcggaagtggaggcggaggatctggcggcggaggctctcaactccagctgcaagagtctggccctggcctggtcaagcctagcgaaacactgagcctgacctgtaccgtgtctggcggctctatcagctccggcagctatatctggggctggatcagacaacctcctggcaaaggactggaatggatcggctccatctactacagcggcatcacctactacaaccccagcctgaagtccagagtgaccatctccgtggacaccagcaagaaccagttctccctgaagctgagcagcgtgacagccgccgataccgccgtgtattattgtgccagacatgacggcgctgtggccggcctgtttgattattggggacagggcaccctggtcaccgtgtcatctgct

SEQ ID NO: 776 - DNA, 735 bp, Artificial Sequence
  Synthetic Polynucleotide
agctacgtgctgacacagcctccatccgtgtctgtggctccaggacagaccgccagaatcacatgcggcggcaacaacctcggcagcaagagcgtgcactggtatcagcagccacctggacaggctccagtggtggtggtgtacgacgacagcgatagacctagcggcatccccgagagattcagcggcagcaattccggcaataccgccacactgaccatcagcagagtggaagctggcgacgaggccgtgtactactgccaagtgtgggacagcagcagcgatcacgtggtgtttggcggcggaacaaagctgacagtgcttggcggaggcggaagtggaggcggaggatctggcggcggaggctctcaactccagctgcaagagtctggccctggcctggtcaagcctagcgaaacactgagcctgacctgtaccgtgtctggcggctctatcagctccggcagctatttctggggctggatcagacaacctcctggcaaaggactggaatggatcggctccatctactacagcggcatcacctactacaaccccagcctgaagtccagagtgaccatctccgtggacaccagcaagaaccagttctccctgaagctgagcagcgtgacagccgccgataccgccgtgtattattgtgccagacatgacggcgctatggccggcctgtttgattattggggacagggcaccctggtcaccgtgtcatctgct

SEQ ID NO: 777 - DNA, 735 bp, Artificial Sequence
  Synthetic Polynucleotide
agctacgtgctgacacagcctccatccgtgtctgtggctccaggacagaccgccagaatcacatgcggcggcaacaacctcggcagcaagagcgtgcactggtatcagcagccacctggacaggctccagtggtggtggtgtacgacgacagcgatagacctagcggcatccccgagagattcagcggcagcaattccggcaataccgccacactgaccatcagcagagtggaagctggcgacgaggccgtgtactactgccaagtgtgggacagcagcagcgatcacgtggtgtttggcggcggaacaaagctgacagtgcttggcggaggcggaagtggaggcggaggatctggcggcggaggctctcaactccagctgcaagagtctggccctggcctggtcaagcctagcgaaacactgagcctgacctgtaccgtgtctggcggctctatcagctccggcagctatttctggggctggatcagacaacctcctggcaaaggactggaatggatcggctccatctactacagcggcagcacctactacaaccccagcctgaagtccagagtgaccatctccgtggacaccagcaagaaccagttctccctgaagctgagcagcgtgacagccgccgataccgccgtgtattattgtgccagacatgacggcgctgtggccggcctgtttgattattggggacagggcaccctggtcaccgtgtcatctgct

SEQ ID NO: 778 - DNA, 735 bp, Artificial Sequence
  Synthetic Polynucleotide
agctacgtgctgacacagcctccatccgtgtctgtggctccaggacagaccgccagaatcacatgcggcggcaacaacctcggcagcaagagcgtgcactggtatcagcagccacctggacaggctccagtggtggtggtgtacgacgacagcgatagacctagcggcatccccgagagattcagcggcagcaattccggcaataccgccacactgaccatcagcagagtggaagctggcgacgaggccgtgtactactgccaagtgtgggacagcagcagcgatcacgtggtgtttggcggcggaacaaagctgacagtgcttggcggaggcggaagtggaggcggaggatctggcggcggaggctctcaactccagctgcaagagtctggccctggcctggtcaagcctagcgaaacactgagcctgacctgtaccgtgtctggcggctctatcagctccggcagctatttctggggctggatcagacaacctcctggcaaaggactggaatggatcggctccatctactacagcggcatcagctactacaaccccagcctgaagtccagagtgaccatctccgtggacaccagcaagaaccagttctccctgaagctgagcagcgtgacagccgccgataccgccgtgtattattgtgccagacatgacggcgctgtggccggcctgtttgattattggggacagggcaccctggtcaccgtgtcatctgct

SEQ ID NO: 779 - DNA, 735 bp, Artificial Sequence
  Synthetic Polynucleotide
agctacgtgctgacacagcctccatccgtgtctgtggctccaggacagaccgccagaatcacatgcggcggcaacaacctcggcagcaagagcgtgcactggtatcagcagccacctggacaggctccagtggtggtggtgtacgacgacagcgatagacctagcggcatccccgagagattcagcggcagcaattccggcaataccgccacactgaccatcagcagagtggaagctggcgacgaggccgtgtactactgccaagtgtgggacagcagcagcgatcacgtggtgtttggcggcggaacaaagctgacagtgcttggcggaggcggaagtggaggcggaggatctggcggcggaggctctcaactccagctgcaagagtctggccctggcctggtcaagcctagcgaaacactgagcctgacctgtaccgtgtctggcggctctatcagctccggcagctatttctggggctggatcagacaacctcctggcaaaggactggaatggatcggctccatctactacagcggcatcacctactacaaccccggcctgaagtccagagtgaccatctccgtggacaccagcaagaaccagttctccctgaagctgagcagcgtgacagccgccgataccgccgtgtattattgtgccagacatgacggcgctgtggccggcctgtttgattattggggacagggcaccctggtcaccgtgtcatctgct

SEQ ID NO: 780 - DNA, 735 bp, Artificial Sequence
  Synthetic Polynucleotide
agctacgtgctgacacagcctccatccgtgtctgtggctccaggacagaccgccagaatcacatgcggcggcaacaacctcggcagcaagagcgtgcactggtatcagcagccacctggacaggctccagtggtggtggtgtacgacgacagcgatagacctagcggcatccccgagagattcagcggcagcaattccggcaataccgccacactgaccatcagcagagtggaagctggcgacgaggccgtgtactactgccaagtgtgggacagcagcagcgatcacgtggtgtttggcggcggaacaaagctgacagtgcttggcggaggcggaagtggaggcggaggatctggcggcggaggctctcaactccagctgcaagagtctggccctggcctggtcaagcctagcgaaacactgagcctgacctgtaccgtgtctggcggctctatcagctccggcagctatttctggggctggatcagacaacctcctggcaaaggactggaatggatcggctccatctactacagcggcatcacctactacaaccccaccctgaagtccagagtgaccatctccgtggacaccagcaagaaccagttctccctgaagctgagcagcgtgacagccgccgataccgccgtgtattattgtgccagacatgacggcgctgtggccggcctgtttgattattggggacagggcaccctggtcaccgtgtcatctgct

SEQ ID NO: 781 - DNA, 735 bp, Artificial Sequence; identical to SEQ ID NO: 732
  Synthetic Polynucleotide

SEQ ID NO: 782 - DNA, 735 bp, Artificial Sequence
  Synthetic Polynucleotide
agctacgtgctgacacagcctccatccgtgtctgtggctccaggacagaccgccagaatcacatgcggcggcaacaacatcggcggcaagagcgtgcactggtatcagcagccacctggacaggctccagtggtggtggtgtacgacgacagcgatagacctagcggcatccccgagagattcagcggcagcaattccggcaataccgccacactgaccatcagcagagtggaagctggcgacgaggccgtgtactactgccaagtgtgggacagcagcagcgatcacgtggtgtttggcggcggaacaaagctgacagtgcttggcggaggcggaagtggaggcggaggatctggcggcggaggctctcaactccagctgcaagagtctggccctggcctggtcaagcctagcgaaacactgagcctgacctgtaccgtgtctggcggctctatcagctccggcagctatatctggggctggatcagacaacctcctggcaaaggactggaatggatcggctccatctactacagcggcatcacctactacaaccccagcctgaagtccagagtgaccatctccgtggacaccagcaagaaccagttctccctgaagctgagcagcgtgacagccgccgataccgccgtgtattattgtgccagacatgacggcgctgtggccggcctgtttgattattggggacagggcaccctggtcaccgtgtcatctgct

SEQ ID NO: 783 - DNA, 735 bp, Artificial Sequence
  Synthetic Polynucleotide
agctacgtgctgacacagcctccatccgtgtctgtggctccaggacagaccgccagaatcacatgcggcggcaacaacatcggcggcaagagcgtgcactggtatcagcagccacctggacaggctccagtggtggtggtgtacgacgacagcgatagacctagcggcatccccgagagattcagcggcagcaattccggcaataccgccacactgaccatcagcagagtggaagctggcgacgaggccgtgtactactgccaagtgtgggacagcagcagcgatcacgtggtgtttggcggcggaacaaagctgacagtgcttggcggaggcggaagtggaggcggaggatctggcggcggaggctctcaactccagctgcaagagtctggccctggcctggtcaagcctagcgaaacactgagcctgacctgtaccgtgtctggcggctctatcagctccggcagctatttctggggctggatcagacaacctcctggcaaaggactggaatggatcggctccatctactacagcggcatcacctactacaaccccagcctgaagtccagagtgaccatctccgtggacaccagcaagaaccagttctccctgaagctgagcagcgtgacagccgccgataccgccgtgtattattgtgccagacatgacggcgctatggccggcctgtttgattattggggacagggcaccctggtcaccgtgtcatctgct

SEQ ID NO: 784 - DNA, 735 bp, Artificial Sequence
  Synthetic Polynucleotide
agctacgtgctgacacagcctccatccgtgtctgtggctccaggacagaccgccagaatcacatgcggcggcaacaacatcggcggcaagagcgtgcactggtatcagcagccacctggacaggctccagtggtggtggtgtacgacgacagcgatagacctagcggcatccccgagagattcagcggcagcaattccggcaataccgccacactgaccatcagcagagtggaagctggcgacgaggccgtgtactactgccaagtgtgggacagcagcagcgatcacgtggtgtttggcggcggaacaaagctgacagtgcttggcggaggcggaagtggaggcggaggatctggcggcggaggctctcaactccagctgcaagagtctggccctggcctggtcaagcctagcgaaacactgagcctgacctgtaccgtgtctggcggctctatcagctccggcagctatttctggggctggatcagacaacctcctggcaaaggactggaatggatcggctccatctactacagcggcagcacctactacaaccccagcctgaagtccagagtgaccatctccgtggacaccagcaagaaccagttctccctgaagctgagcagcgtgacagccgccgataccgccgtgtattattgtgccagacatgacggcgctgtggccggcctgtttgattattggggacagggcaccctggtcaccgtgtcatctgct

SEQ ID NO: 785 - DNA, 735 bp, Artificial Sequence
  Synthetic Polynucleotide
agctacgtgctgacacagcctccatccgtgtctgtggctccaggacagaccgccagaatcacatgcggcggcaacaacatcggcggcaagagcgtgcactggtatcagcagccacctggacaggctccagtggtggtggtgtacgacgacagcgatagacctagcggcatccccgagagattcagcggcagcaattccggcaataccgccacactgaccatcagcagagtggaagctggcgacgaggccgtgtactactgccaagtgtgggacagcagcagcgatcacgtggtgtttggcggcggaacaaagctgacagtgcttggcggaggcggaagtggaggcggaggatctggcggcggaggctctcaactccagctgcaagagtctggccctggcctggtcaagcctagcgaaacactgagcctgacctgtaccgtgtctggcggctctatcagctccggcagctatttctggggctggatcagacaacctcctggcaaaggactggaatggatcggctccatctactacagcggcatcagctactacaaccccagcctgaagtccagagtgaccatctccgtggacaccagcaagaaccagttctccctgaagctgagcagcgtgacagccgccgataccgccgtgtattattgtgccagacatgacggcgctgtggccggcctgtttgattattggggacagggcaccctggtcaccgtgtcatctgct

SEQ ID NO: 786 - DNA, 735 bp, Artificial Sequence
  Synthetic Polynucleotide
agctacgtgctgacacagcctccatccgtgtctgtggctccaggacagaccgccagaatcacatgcggcggcaacaacatcggcggcaagagcgtgcactggtatcagcagccacctggacaggctccagtggtggtggtgtacgacgacagcgatagacctagcggcatccccgagagattcagcggcagcaattccggcaataccgccacactgaccatcagcagagtggaagctggcgacgaggccgtgtactactgccaagtgtgggacagcagcagcgatcacgtggtgtttggcggcggaacaaagctgacagtgcttggcggaggcggaagtggaggcggaggatctggcggcggaggctctcaactccagctgcaagagtctggccctggcctggtcaagcctagcgaaacactgagcctgacctgtaccgtgtctggcggctctatcagctccggcagctatttctggggctggatcagacaacctcctggcaaaggactggaatggatcggctccatctactacagcggcatcacctactacaaccccggcctgaagtccagagtgaccatctccgtggacaccagcaagaaccagttctccctgaagctgagcagcgtgacagccgccgataccgccgtgtattattgtgccagacatgacggcgctgtggccggcctgtttgattattggggacagggcaccctggtcaccgtgtcatctgct

SEQ ID NO: 787 - DNA, 735 bp, Artificial Sequence
  Synthetic Polynucleotide
agctacgtgctgacacagcctccatccgtgtctgtggctccaggacagaccgccagaatcacatgcggcggcaacaacatcggcggcaagagcgtgcactggtatcagcagccacctggacaggctccagtggtggtggtgtacgacgacagcgatagacctagcggcatccccgagagattcagcggcagcaattccggcaataccgccacactgaccatcagcagagtggaagctggcgacgaggccgtgtactactgccaagtgtgggacagcagcagcgatcacgtggtgtttggcggcggaacaaagctgacagtgcttggcggaggcggaagtggaggcggaggatctggcggcggaggctctcaactccagctgcaagagtctggccctggcctggtcaagcctagcgaaacactgagcctgacctgtaccgtgtctggcggctctatcagctccggcagctatttctggggctggatcagacaacctcctggcaaaggactggaatggatcggctccatctactacagcggcatcacctactacaaccccaccctgaagtccagagtgaccatctccgtggacaccagcaagaaccagttctccctgaagctgagcagcgtgacagccgccgataccgccgtgtattattgtgccagacatgacggcgctgtggccggcctgtttgattattggggacagggcaccctggtcaccgtgtcatctgct

SEQ ID NO: 788 - DNA, 735 bp, Artificial Sequence; identical to SEQ ID NO: 767
  Synthetic Polynucleotide

SEQ ID NO: 789 - DNA, 735 bp, Artificial Sequence
  Synthetic Polynucleotide
agctacgtgctgacacagcctccatccgtgtctgtggctccaggacagaccgccagaatcacatgcggcggcaacaacatcggcagcaagaccgtgcactggtatcagcagccacctggacaggctccagtggtggtggtgtacgacgacagcgatagacctagcggcatccccgagagattcagcggcagcaattccggcaataccgccacactgaccatcagcagagtggaagctggcgacgaggccgtgtactactgccaagtgtgggacagcagcagcgatcacgtggtgtttggcggcggaacaaagctgacagtgcttggcggaggcggaagtggaggcggaggatctggcggcggaggctctcaactccagctgcaagagtctggccctggcctggtcaagcctagcgaaacactgagcctgacctgtaccgtgtctggcggctctatcagctccggcagctatatctggggctggatcagacaacctcctggcaaaggactggaatggatcggctccatctactacagcggcatcacctactacaaccccagcctgaagtccagagtgaccatctccgtggacaccagcaagaaccagttctccctgaagctgagcagcgtgacagccgccgataccgccgtgtattattgtgccagacatgacggcgctgtggccggcctgtttgattattggggacagggcaccctggtcaccgtgtcatctgct

SEQ ID NO: 790 - DNA, 735 bp, Artificial Sequence
  Synthetic Polynucleotide
agctacgtgctgacacagcctccatccgtgtctgtggctccaggacagaccgccagaatcacatgcggcggcaacaacatcggcagcaagaccgtgcactggtatcagcagccacctggacaggctccagtggtggtggtgtacgacgacagcgatagacctagcggcatccccgagagattcagcggcagcaattccggcaataccgccacactgaccatcagcagagtggaagctggcgacgaggccgtgtactactgccaagtgtgggacagcagcagcgatcacgtggtgtttggcggcggaacaaagctgacagtgcttggcggaggcggaagtggaggcggaggatctggcggcggaggctctcaactccagctgcaagagtctggccctggcctggtcaagcctagcgaaacactgagcctgacctgtaccgtgtctggcggctctatcagctccggcagctatttctggggctggatcagacaacctcctggcaaaggactggaatggatcggctccatctactacagcggcatcacctactacaaccccagcctgaagtccagagtgaccatctccgtggacaccagcaagaaccagttctccctgaagctgagcagcgtgacagccgccgataccgccgtgtattattgtgccagacatgacggcgctatggccggcctgtttgattattggggacagggcaccctggtcaccgtgtcatctgct

SEQ ID NO: 791 - DNA, 735 bp, Artificial Sequence
  Synthetic Polynucleotide
agctacgtgctgacacagcctccatccgtgtctgtggctccaggacagaccgccagaatcacatgcggcggcaacaacatcggcagcaagaccgtgcactggtatcagcagccacctggacaggctccagtggtggtggtgtacgacgacagcgatagacctagcggcatccccgagagattcagcggcagcaattccggcaataccgccacactgaccatcagcagagtggaagctggcgacgaggccgtgtactactgccaagtgtgggacagcagcagcgatcacgtggtgtttggcggcggaacaaagctgacagtgcttggcggaggcggaagtggaggcggaggatctggcggcggaggctctcaactccagctgcaagagtctggccctggcctggtcaagcctagcgaaacactgagcctgacctgtaccgtgtctggcggctctatcagctccggcagctatttctggggctggatcagacaacctcctggcaaaggactggaatggatcggctccatctactacagcggcagcacctactacaaccccagcctgaagtccagagtgaccatctccgtggacaccagcaagaaccagttctccctgaagctgagcagcgtgacagccgccgataccgccgtgtattattgtgccagacatgacggcgctgtggccggcctgtttgattattggggacagggcaccctggtcaccgtgtcatctgct

SEQ ID NO: 792 - DNA, 735 bp, Artificial Sequence
  Synthetic Polynucleotide
agctacgtgctgacacagcctccatccgtgtctgtggctccaggacagaccgccagaatcacatgcggcggcaacaacatcggcagcaagaccgtgcactggtatcagcagccacctggacaggctccagtggtggtggtgtacgacgacagcgatagacctagcggcatccccgagagattcagcggcagcaattccggcaataccgccacactgaccatcagcagagtggaagctggcgacgaggccgtgtactactgccaagtgtgggacagcagcagcgatcacgtggtgtttggcggcggaacaaagctgacagtgcttggcggaggcggaagtggaggcggaggatctggcggcggaggctctcaactccagctgcaagagtctggccctggcctggtcaagcctagcgaaacactgagcctgacctgtaccgtgtctggcggctctatcagctccggcagctatttctggggctggatcagacaacctcctggcaaaggactggaatggatcggctccatctactacagcggcatcagctactacaaccccagcctgaagtccagagtgaccatctccgtggacaccagcaagaaccagttctccctgaagctgagcagcgtgacagccgccgataccgccgtgtattattgtgccagacatgacggcgctgtggccggcctgtttgattattggggacagggcaccctggtcaccgtgtcatctgct

SEQ ID NO: 793 - DNA, 735 bp, Artificial Sequence
  Synthetic Polynucleotide
agctacgtgctgacacagcctccatccgtgtctgtggctccaggacagaccgccagaatcacatgcggcggcaacaacatcggcagcaagaccgtgcactggtatcagcagccacctggacaggctccagtggtggtggtgtacgacgacagcgatagacctagcggcatccccgagagattcagcggcagcaattccggcaataccgccacactgaccatcagcagagtggaagctggcgacgaggccgtgtactactgccaagtgtgggacagcagcagcgatcacgtggtgtttggcggcggaacaaagctgacagtgcttggcggaggcggaagtggaggcggaggatctggcggcggaggctctcaactccagctgcaagagtctggccctggcctggtcaagcctagcgaaacactgagcctgacctgtaccgtgtctggcggctctatcagctccggcagctatttctggggctggatcagacaacctcctggcaaaggactggaatggatcggctccatctactacagcggcatcacctactacaaccccggcctgaagtccagagtgaccatctccgtggacaccagcaagaaccagttctccctgaagctgagcagcgtgacagccgccgataccgccgtgtattattgtgccagacatgacggcgctgtggccggcctgtttgattattggggacagggcaccctggtcaccgtgtcatctgct

SEQ ID NO: 794 - DNA, 735 bp, Artificial Sequence
  Synthetic Polynucleotide
agctacgtgctgacacagcctccatccgtgtctgtggctccaggacagaccgccagaatcacatgcggcggcaacaacatcggcagcaagaccgtgcactggtatcagcagccacctggacaggctccagtggtggtggtgtacgacgacagcgatagacctagcggcatccccgagagattcagcggcagcaattccggcaataccgccacactgaccatcagcagagtggaagctggcgacgaggccgtgtactactgccaagtgtgggacagcagcagcgatcacgtggtgtttggcggcggaacaaagctgacagtgcttggcggaggcggaagtggaggcggaggatctggcggcggaggctctcaactccagctgcaagagtctggccctggcctggtcaagcctagcgaaacactgagcctgacctgtaccgtgtctggcggctctatcagctccggcagctatttctggggctggatcagacaacctcctggcaaaggactggaatggatcggctccatctactacagcggcatcacctactacaaccccaccctgaagtccagagtgaccatctccgtggacaccagcaagaaccagttctccctgaagctgagcagcgtgacagccgccgataccgccgtgtattattgtgccagacatgacggcgctgtggccggcctgtttgattattggggacagggcaccctggtcaccgtgtcatctgct

SEQ ID NO: 795 - DNA, 714 bp, Artificial Sequence; identical to SEQ ID NO: 753
  Synthetic Polynucleotide

SEQ ID NO: 796 - DNA, 714 bp, Artificial Sequence
  Synthetic Polynucleotide
gacatccagatgacacagagccctagcagcctgtctgccagcgtgggagacagagtgaccatcacatgcaaggccagccaggatgtgggcacagccgtggattggtatcagcagaagcctggcaaggcccctaagctgctgatctactgggccagcacaagacacacaggcgtgcccagcagattttctggcagcggctctggcaccgacttcaccctgacaatatccagcctccagcctgaggacttcgccacctactactgccagcagtacaacagctaccctctgaccttcggccagggcaccaaggtggaaatcaaaagaggcggaggcggaagtggaggcggaggatctggcggcggaggctctcaagttcagctggttcagagcggagccgaagtgaagaaacctggcgagagcgtgaaggtgtcctgcaaagccagcggctacacctttaccgagtacaccatccactgggtccgacaggctccaggacaaggactggaatggatgggcaacatcaaccccaacaacggcggcaccacctacaaccagaaattcgaggatcgcgtgacaatcaccgccgacaagagcaccagcaccgcctacatggaactgagcagcctgagaagcgaggacaccgccgtgtactattgtgccagaggctggaacttcgactactggggccagggaaccaccgtgacagtctcttct

SEQ ID NO: 797 - DNA, 714 bp, Artificial Sequence; identical to SEQ ID NO: 752
  Synthetic Polynucleotide

SEQ ID NO: 798 - DNA, 714 bp, Artificial Sequence
  Synthetic Polynucleotide
gacatcgtgatgacccagagccacaagttcatgagcaccagcgtgggcgacagagtgtccatcatctgcaaggccagccaggatgtgggcacagccgtggattggtatcagcagaagcctggacagagccccaagctgctgatctactgggccagcacaagacacaccggcgtgcccgatagattcacaggctctggcagcggcaccgatttcaccctggccatcacaaacgtgcagagcgaggacctggccgactacttctgccagcagtacaacagctaccctctgacctttggagccggcaccaagctggaaatcaagagaggcggaggcggaagtggaggcggaggatctggcggcggaggctctcaagttcagctggttcagagcggagccgaagtgaagaaacctggcgagagcgtgaaggtgtcctgcaaagccagcggctacacctttaccgagtacaccatccactgggtccgacaggctccaggacaaggactggaatggatgggcaacatcaaccccaacaacggcggcaccacctacaaccagaaattcgaggatcgcgtgacaatcaccgccgacaagagcaccagcaccgcctacatggaactgagcagcctgagaagcgaggacaccgccgtgtactattgtgccagaggctggaacttcgactactggggccagggaaccaccgtgacagtctcttct

SEQ ID NO: 799 - DNA, 720 bp, Artificial Sequence
  Synthetic Polynucleotide
gacatccagatgacacagagccctagcagcctgtctgccagcgtgggagacagagtgaccatcacatgcaaggccagccaggatgtgggcacagccgtggattggtatcagcagaagcctggcaaggcccctaagctgctgatctcttgggccagcacaagacacacaggcgtgcccagcagattttctggcagcggctctggcaccgacttcaccctgacaatatccagcctccagcctgaggacttcgccacctacttttgccagcagtacaacagctaccctctgaccttcggccagggcaccaaggtggaaatcaagagaacagttggcggaggcggaagtggaggcggaggatctggcggcggaggctctgaagtgcagctggttgaatcaggtggcggcctggttcaacctggcggatctctgagactgagctgtgccgccagcggctacacctttaccgagtacacaatccactgggtccgacaggcccctggcaaaggacttgagtgggtcgccaacatcaaccccaacaatggcggcaccacctacaaccagaagttcgaggacagattcaccatcagccgggacaacagcaagaacaccctgtacctccagatgaactccctgagagccgaggacaccgccgtgtactattgtgccagaggctggaacttcgactactggggccagggaacactggtcaccgttagctct

SEQ ID NO: 800 - DNA, 720 bp, Artificial Sequence
  Synthetic Polynucleotide
gacatccagatgacacagagccctagcagcctgtctgccagcgtgggagacagagtgaccatcacatgcaaggccagccaggatgtgggcacagccgtggattggtatcagcagaagcctggcaaggcccctaagctgctgatctcttgggccagcacaagacacacaggcgtgcccagcagattttctggcagcggctctggcaccgacttcaccctgacaatatccagcctccagcctgaggacttcgccacctacttttgccagcagtacaacagctaccctctgaccttcggccagggcaccaaggtggaaatcaagagaacagttggcggaggcggaagtggaggcggaggatctggcggcggaggctctgaagttcagctgcaacagtctggccccgagctggttaagcctggaacaagcgtgcggatctcctgcaagaccagcggctacaccttcaccgagtacaccatccactgggtcaagcagagccacggcaagagcctggaatggatcggcaacatcaaccccaacaacggcggcaccacctacaaccagaagttcgaggacaaggccacactgaccgtggacaagagcagcagcaccgcctacatggaactgagaagcctgaccagcgaggacagcgccgtgtactattgtgccgccggatggaacttcgactactggggccagggaacaaccctgaccgttagctct

SEQ ID NO: 801 - DNA, 720 bp, Artificial Sequence; identical to SEQ ID NO: 754
  Synthetic Polynucleotide

SEQ ID NO: 802 - DNA, 732 bp, Artificial Sequence; identical to SEQ ID NO: 761
  Synthetic Polynucleotide

SEQ ID NO: 803 - DNA, 729 bp, Artificial Sequence
  Synthetic Polynucleotide
gacattcagatgacacagagccctagcagcctgagcgcctctgtgggagacagagtgaccatcacatgcaagagcagccagagcctgctgtactccagcaatcagaagaactacctggcctggttccagcagaagcctggcaaggctcctaagctgctgatctactgggccagcaccagagaaagcggcgtgccaagcagattttctggcagcggctctggcaccgacttcaccctgacaatatccagcctccagcctgaggacttcgccacctacttttgccaccagtacctgagcagctacacattcggacagggcaccaaggtggaaatcaagcggggcggaggcggaagtggaggcggaggatctggcggcggaggctctgaggtgcagctggttgaatctggcggaggactggttcagcctggcggatctctgagactgtcttgtgccgccagcggcttcaccttcaccacctattggatgcactgggtccgacaggcccctggcaaaggacttgagtgggtcggatatatcaggcccagcaccggctacacagagtacaaccagaagttcaaggaccgcttcaccatcagcgccgacaccagcaagaataccgcctacctccagatgaacagcctgagagccgaggacaccgccgtgtactactgtgccagatccagatggctgctggactattggggccagggcacactggttacagtttct

SEQ ID NO: 804 - DNA, 723 bp, Artificial Sequence
  Synthetic Polynucleotide
gacattcagatgacacagagccctagcagcctgagcgcctctgtgggagacagagtgaccatcacatgcaagagcagccagagcctgctgtactccagcaatcagaagaactacctggcctggttccagcagaagcctggcaaggctcctaagctgctgatctactgggccagcaccagagaaagcggcgtgccaagcagattttctggcagcggctctggcaccgacttcaccctgacaatatccagcctccagcctgaggacttcgccacctacttttgccaccagtacctgagcagctacacattcggacagggcaccaaggtggaaatcaagcggggcggaggcggaagtggaggcggaggatctggcggcggaggctctgacattcagatgacacagagccctagcagcctgagcgcctctgtgggagacagagtgaccatcacatgcaagagcagccagagcctgctgtactccagcaatcagaagaactacctggcctggttccagcagaagcctggcaaggctcctaagctgctgatctactgggccagcaccagagaaagcggcgtgccaagcagattttctggcagcggctctggcaccgacttcaccctgacaatatccagcctccagcctgaggacttcgccacctacttttgccaccagtacctgagcagctacacattcggacagggcaccaaggtggaaatcaagcgg

SEQ ID NO: 805 - DNA, 720 bp, Artificial Sequence; identical to SEQ ID NO: 764
  Synthetic Polynucleotide

SEQ ID NO: 806 - DNA, 720 bp, Artificial Sequence; identical to SEQ ID NO: 678
  Synthetic Polynucleotide

SEQ ID NO: 807 - DNA, 720 bp, Artificial Sequence
  Synthetic Polynucleotide
gacatccagatgacacagagccctagcagcctgtctgccagcgtgggagacagagtgaccatcacctgtagagccagccaggacatcagcagctacctgaactggtatcagcagaagcccggcaaggcccctaagctgctgatctactacaccagcagactgcacagcggcgtgcccagcagattttctggctctggcagcggcaccgacttcaccctgacaatatctagcctccagcctgaggacttcgccacctactattgccagcagggcaacaccctgccttacacatttggacagggcaccaaggtggaaatcaagagaggcggaggcggaagtggaggcggaggatctggcggcggaggctctgaagtgcagctggttgaatcaggtggcggcctggttcaacctggcggatctctgagactgagctgtgccgccagcggctacaccttcagcgactactttatgagctgggtccgacaggcccctggcaaaggacttgaatgggtcgccaccatcagcaatggcggcacctacacttactaccccgacagcgtgaagggcagattcaccatctccagagacaacagcaagaacaccctgtacctccagatgaactccctgagagccgaggacaccgccgtgtactactgcgccagattcgacggctacatcttcgactattggggccagggcaccctggtcacagtctcttct

SEQ ID NO: 808 - DNA, 720 bp, Artificial Sequence; identical to SEQ ID NO: 765
  Synthetic Polynucleotide

SEQ ID NO: 809 - DNA, 720 bp, Artificial Sequence
  Synthetic Polynucleotide
gacatccagatgacacagagccctagcagcctgtctgccagcgtgggagacagagtgaccatcacctgtagagccagccaggacatcagcaactacctgaactggtatcagcagaagcccggcaaggcccctaagctgctgatctactacaccagcagactgcacagcggcgtgcccagcagattttctggctctggcagcggcaccgacttcaccctgacaatatctagcctccagcctgaggacttcgccacctactattgccagcagggcaacaccctgccttggacatttggacagggcaccaaggtggaaatcaagagaggcggaggcggaagtggaggcggaggatctggcggcggaggctctgaagtgcagctggttgaatcaggtggcggcctggttcaacctggcggatctctgagactgagctgtgccgccagcggctacaccttcagcgactactttatgagctgggtccgacaggcccctggcaaaggacttgaatgggtcgccaccatcagcaatggcggcacctacacttactaccccgacagcgtgaagggcagattcaccatctccagagacaacagcaagaacaccctgtacctccagatgaactccctgagagccgaggacaccgccgtgtactactgcgccagattcgacggctacatcttcgactattggggccagggcaccctggtcacagtctcttct

SEQ ID NO: 810 - DNA, 720 bp, Artificial Sequence; identical to SEQ ID NO: 766
  Synthetic Polynucleotide

SEQ ID NO: 811 - DNA, 32 bp, Artificial Sequence; identical to SEQ ID NO: 283
  Synthetic Polynucleotide
  misc_feature (30)..(32): n is a, c, g, or t

SEQ ID NO: 812 - DNA, 32 bp, Artificial Sequence; identical to SEQ ID NO: 283
  Synthetic Polynucleotide
  misc_feature (30)..(32): n is a, c, g, or t

SEQ ID NO: 813 - DNA, 32 bp, Artificial Sequence; identical to SEQ ID NO: 283
  Synthetic Polynucleotide
  misc_feature (30)..(32): n is a, c, g, or t

SEQ ID NO: 814 - DNA, 32 bp, Artificial Sequence; identical to SEQ ID NO: 283
  Synthetic Polynucleotide
  misc_feature (30)..(32): n is a, c, g, or t

SEQ ID NO: 815 - DNA, 32 bp, Artificial Sequence; identical to SEQ ID NO: 283
  Synthetic Polynucleotide
  misc_feature (30)..(32): n is a, c, g, or t

SEQ ID NO: 816 - DNA, 801 bp, Artificial Sequence
  Synthetic Polynucleotide
atggccttaccagtgaccgccttgctcctgccgctggccttgctgctccacgccgccaggccggaggtgcagctggttgaatctggcggaggactggttcagcctggcggatctctgagactgtcttgtgccgccagcggcttcaacatcaaggatacctgtatcggctgggttcgcagagcccctggcaaagaggaagaactggtcgccaaaatctgcaagtacagcggccacaccagatacgccgacagcgtgaagggcagattcaccatcagcgccgacaccagcaagaacaccgcctacctccagatgaacagcctgagagccgaggacaccgccgtgtactattgtgccgctgtgtccgtcagagatgggcactacaattactggggccagggcaccaccgtgaccgtttcttcaggcggaggaagcggcggaggatctgaagtgcaactggtggaaagcggaggcggacttgttcaaccaggcggaagcctgagactgagctgtgccgcttccggctttaatatcaaagacacatgcatcggatgggttcgccgcgctccagggaaagaagaggaactggttgccgacatctgtccctacaagggcagcacaagatatgccgactccgtgaaaggccggtttaccatctctgccgacacctctaagaatacggcctatctgcaaatgaactctctgcgggccgaagatacagccgtgtattactgcgccatcgtgtctgccagagatggctactataactattggggacagggaaccacagtcacagtgtcctct

SEQ ID NO: 817 - DNA, 420 bp, Artificial Sequence
  Synthetic Polynucleotide
atggccttaccagtgaccgccttgctcctgccgctggccttgctgctccacgccgccaggccggaggtgcagctggttgaatctggcggaggactggttcagcctggcggatctctgagactgtcttgtgccgccagcggcttcaacatcaaggatacctgtatcggctgggttcgcagagcccctggcaaagaggaagaactggtcgccaaaatctgcaagtacagcggccacaccagatacgccgacagcgtgaagggcagattcaccatcagcgccgacaccagcaagaacaccgcctacctccagatgaacagcctgagagccgaggacaccgccgtgtactattgtgccgctgtgtccgtcagagatgggcactacaattactggggccagggcaccaccgtgaccgtttcttca

SEQ ID NO: 818 - DNA, 801 bp, Artificial Sequence
  Synthetic Polynucleotide
atggccttaccagtgaccgccttgctcctgccgctggccttgctgctccacgccgccaggccggaggtgcagctggttgaatctggcggaggactggttcagcctggcggatctctgagactgtcctgcacattttccggcggcaccttcagcagctacacaatgggctggttcagacaggcccctggcaaagaacgggaatttgtggccgaagtccgatggggcggagtgaccacatacagcaacagcctgaaggacagattcagcatcagcgaggacagcgtgaagaacgccgtgtacctccagatgaactccctgaagcctgaggacacagccgtgtactattgtgccgctgtgcggcagatgtacatgaccgtggtgcctgattattggggccagggcacactggtcacagtgtctagcagcggcggaggcggatctttcgaacagctccagttgcaagagagcggccctggcttggtaaaaccttccgagacccttagcctcacatgcacggttagtgggggcagcatttcctcaggtgattactattggggatggattcggcaacccccgggtaaaggattggagtggattggtcatatttattatagtggagcgacgtactacaacccaagtctcaaatccagggttacaatatccgtcgatacgagcaggaaccaattcagcttgaaactttctagtgtcaccgcagcagacacagccgtctattactgtacgcgggatgactccagtaattggcggtcccgagggcaagggacactggtcacggtctcctca

SEQ ID NO: 819 - DNA, 423 bp, Artificial Sequence
  Synthetic Polynucleotide
atggccttaccagtgaccgccttgctcctgccgctggccttgctgctccacgccgccaggccggaggtgcagctggttgaatctggcggaggactggttcagcctggcggatctctgagactgtcctgcacattttccggcggcaccttcagcagctacacaatgggctggttcagacaggcccctggcaaagaacgggaatttgtggccgaagtccgatggggcggagtgaccacatacagcaacagcctgaaggacagattcagcatcagcgaggacagcgtgaagaacgccgtgtacctccagatgaactccctgaagcctgaggacacagccgtgtactattgtgccgctgtgcggcagatgtacatgaccgtggtgcctgattattggggccagggcacactggtcacagtgtctagc

SEQ ID NO: 820 - DNA, 837 bp, Artificial Sequence
  Synthetic Polynucleotide
atggccttaccagtgaccgccttgctcctgccgctggccttgctgctccacgccgccaggccggaggtgcagctggttgaatctggtggcggagttgtgcagcctggcagaagcctgagactgtcttgtgccgccagcggctttagcttcagcggctatggaatgcactgggtccgacaggcccctggcaaaggacttgagtgggtcgcctacatcagctacgacggcagcaacaagtattacgccgacagcgtgaagggcagattcaccatcagccgggacaacagcaagaacaccctgtacctccagatgaacagcctgagagccgaggacaccgccgtgtactactgcgccaaagatcctgcctggggactgagactgggcgagagcagcagctacgatttcgacatctggggccagggcacaatggtcacagtttctagcggatccggcggaggcggaagtggaggcggaggatctggcggcggaggctctttcgaagttcagctgctggaatctggcggaggactcgttcaacctggcggctctctgagactgagctgtgccgcttctggcttcagcttctctagctacgccctgagctgggttcgacaagctcccggaaagggccttgaatgggtgtccagcatcggcgagaatgacggcaccacagactatgccgatgccgtgaaaggccggtttaccatcagcagagacaattccaagaacacgctctatctgcaaatgaactccctgcgcgtggaagatacagccgtgtattattgcgtgaaggacggcgtgcactggggacagggaaccctggttacagtgtctagc

SEQ ID NO: 821 - DNA, 444 bp, Artificial Sequence
  Synthetic Polynucleotide
atggccttaccagtgaccgccttgctcctgccgctggccttgctgctccacgccgccaggccggaggtgcagctggttgaatctggtggcggagttgtgcagcctggcagaagcctgagactgtcttgtgccgccagcggctttagcttcagcggctatggaatgcactgggtccgacaggcccctggcaaaggacttgagtgggtcgcctacatcagctacgacggcagcaacaagtattacgccgacagcgtgaagggcagattcaccatcagccgggacaacagcaagaacaccctgtacctccagatgaacagcctgagagccgaggacaccgccgtgtactactgcgccaaagatcctgcctggggactgagactgggcgagagcagcagctacgatttcgacatctggggccagggcacaatggtcacagtttctagc

SEQ ID NO: 822 - DNA, 816 bp, Artificial Sequence
  Synthetic Polynucleotide
atggactggatttggcgcatccttttccttgtcggcgctgctaccggcgcccattccgaggttcagctgcttgagtctggcggaggactggttcaacctggcggaagcctgagactgtcttgtgccgcttccggcttcagcttcagcagctatgccctgagctgggtccgacaggctcctggcaaaggactggaatgggtgtccagcatcggcgagaatgacggcaccaccgattatgccgatgccgtgaagggcagattcaccatctctcgggacaacagcaagaacaccctgtacctccagatgaacagcctcagagtggaagataccgccgtgtactactgcgtgaaggacggcgttcactggggccagggaacactggttacagtgtctagcggatccggcggaggcggaagtggaggcggaggatctttcgaagttcagttggtagagtctggaggcggagtggtacaaccggggcggtctcttagacttagttgcgcagcaagcggtttctctttctctggctatgggatgcactgggtgagacaggcccctgggaaaggactggagtgggtggcctacatttcatacgacgggagtaataaatactatgcagactccgttaagggcaggttcacgatctctcgggacaattccaagaatacattgtatcttcagatgaatagtctccgagctgaagacacggcggtttactactgcgctaaagacccggcctggggacttcgacttggagagagttctagctacgattttgacatttggggacaagggacaatggtcactgtctcaagt

SEQ ID NO: 823 - DNA, 396 bp, Artificial Sequence
  Synthetic Polynucleotide
atggactggatttggcgcatccttttccttgtcggcgctgctaccggcgcccattccgaggttcagctgcttgagtctggcggaggactggttcaacctggcggaagcctgagactgtcttgtgccgcttccggcttcagcttcagcagctatgccctgagctgggtccgacaggctcctggcaaaggactggaatgggtgtccagcatcggcgagaatgacggcaccaccgattatgccgatgccgtgaagggcagattcaccatctctcgggacaacagcaagaacaccctgtacctccagatgaacagcctcagagtggaagataccgccgtgtactactgcgtgaaggacggcgttcactggggccagggaacactggttacagtgtctagc

SEQ ID NO: 824 - DNA, 435 bp, Artificial Sequence
  Synthetic Polynucleotide
atggccttaccagtgaccgccttgctcctgccgctggccttgctgctccacgccgccaggccgcagctgcaactgcaagagtctggccccggactggtcaagccttctgaaacactggccctgacctgcaatgtgtccggcggctctatcagcagcagctcctattactggggctggatcagacagcctccaggcaagagactggaatggatcggcagcatctactacagcggcagcacatacttcaaccccagcctgaagtccagagtgaccatcagcgtggacacctccaagaaccagttctccctgaagctgagcagcgtgacagccgccgatacagccgtgtattactgtgctggcggcgactactatggccccgttggacaatggcccagcgattacagaggacagggaacccttgtgaccgtgtcctct

SEQ ID NO: 825 - DNA, 825 bp, Artificial Sequence
  Synthetic Polynucleotide
atggactggatttggcgcatccttttccttgtcggcgctgctaccggcgcccattcccagctccagctgcaagagtctggacctggcctggtcaagcctagcgagacactgagcctgacctgtacagttagcggcggctctgtgtccagcagcagctattactggggctggatcagacagcctcctggcaagagactggaactgatcggcagcatctactacggcggctccacctacttcaaccccagcctgaaaagcagagtgaccatcagcgtggacaccagcaagaaccagttcagcctgaagctgagcagcgtgacagccgccgatacagccgtgtactattgtgccggcggagacacatacggccctgttggacaatggcccagcgactatagaggccagggcacactggtcacagtgtctagcggtggcggaggaagtggcggcggatctttcgaagttcagctgcttgaaagcggtggcggcctggttcaacctggcggatctctgagactgagctgtgccgccagcggcttcatcttctccatctacgccatgtcctgggtccgacaggcccctggaaaaggactggaatgggtgtccggcatctctggcagcggcgtgaacacctactacgccgattctgtgaagggccgcttcatcatcagccgggacaacagcagaaacaccgtgtacctccagatgaacagcctgagagccgatgacaccgccgtgtaccactgcgccaatggcaaaggctgggacggcaacacttggtacgaggattacagaggacagggaaccctcgtgaccgtgtctagt

SEQ ID NO: 826 - DNA, 429 bp, Artificial Sequence
  Synthetic Polynucleotide
atggactggatttggcgcatccttttccttgtcggcgctgctaccggcgcccattcccagctccagctgcaagagtctggacctggcctggtcaagcctagcgagacactgagcctgacctgtacagttagcggcggctctgtgtccagcagcagctattactggggctggatcagacagcctcctggcaagagactggaactgatcggcagcatctactacggcggctccacctacttcaaccccagcctgaaaagcagagtgaccatcagcgtggacaccagcaagaaccagttcagcctgaagctgagcagcgtgacagccgccgatacagccgtgtactattgtgccggcggagacacatacggccctgttggacaatggcccagcgactatagaggccagggcacactggtcacagtgtctagc

SEQ ID NO: 827 - DNA, 426 bp, Artificial Sequence
  Synthetic Polynucleotide
atggccttaccagtgaccgccttgctcctgccgctggccttgctgctccacgccgccaggccggaggttcagctgcttgagtctggcggaggactggttcaacctggcggaagcctgagactgtcttgtgccgccagcggcttcacctttagcagctacgccatgagctgggtccgacaggctcctggcaaaggactggaatgggtgtccagcatcagcggcagcggcgactacatctactacgccgatagcgtgaagggcagattcaccatcagccgggacatcagcaagaacaccctgtacctccagatgaacagcctgagagccgaggacaccgccgtgtactactgtgccaaagaaggcaccggcgctaacagcagcctggccgattatagaggccagggcacactggtcaccgtgtctagt

SEQ ID NO: 828 - DNA, 417 bp, Artificial Sequence
  Synthetic Polynucleotide
atggccttaccagtgaccgccttgctcctgccgctggccttgctgctccacgccgccaggccgcaggtgcagctggttgaatctggcggaggactggttcagcctggcggatctctgagactgtcttgtgccgccagcggcttcaccttcaccaatcacgccatgagctgggtccgacaggcccctggaaaaggactggaactggtgtctagcatcagcggcaacggcagaaccacctactacgccgatagcgtgaagggcagattcaccatcagccgggacatcagcaagaacaccctggacctccagatgaacagcctgagagccgaggataccgccgtgtactactgtgccaaggatggcggagagacactggtggatagcagaggccagggcacactggtcacagtgtcatct

SEQ ID NO: 829 - DNA, 801 bp, Artificial Sequence
  Synthetic Polynucleotide
atggccttaccagtgaccgccttgctcctgccgctggccttgctgctccacgccgccaggccgcagctccagctgcaagagtctggacctggcctggtcaagcctagcgagacactgagcctgacctgtaccgtgtccggcgatagcatcagcagcggcgattactactggggctggatcagacagcctcctggcaaaggactggaatggatcggccacatctactacagcggcgtgacctactacaaccccagcctgaagtccagagtgaccatcagcgtggacaccagccggaaccagttctccctgaagctgtctagcgtgacagccgccgataccgccgtgtactactgcaccagagaggacagcagcaactggcggagtagaggccagggaacactggtcacagttagctctctcgagagcggcggaggcggatctttcgaagtgcagctgcttgaaagtggcggcggactgattcagcctggcggatctctgagactgagctgtgccgccagcggcttcaccttttctagccacgccatgacctgggtccgacaggcacctggaaaagggcttgaatgggtgtccgccatcagcggctctggcgattacacacactacgccgacagcgtgaagggcagattcaccatcagcagagacaacagcaagaacaccgtgtacctccagatgaacagcctgagagccgaggacagcgccgtgtattattgcgccaaggatgaggatggcggcagcctgcttggacacagaggacaaggcaccctggtcaccgtttcttcc

SEQ ID NO: 830 - DNA, 381 bp, Artificial Sequence
  Synthetic Polynucleotide
gaggtgcagctggttgaatctggtggcggagttgtgcagcctggcagaagcctgagactgtcttgtgccgccagcggctttagcttcagcggctatggaatgcactgggtccgacaggcccctggcaaaggacttgagtgggtcgcctacatcagctacgacggcagcaacaagtattacgccgacagcgtgaagggcagattcaccatcagccgggacaacagcaagaacaccctgtacctccagatgaacagcctgagagccgaggacaccgccgtgtactactgcgccaaagatcctgcctggggactgagactgggcgagagcagcagctacgatttcgacatctggggccagggcacaatggtcacagtttctagc

SEQ ID NO: 831 - DNA, 339 bp, Artificial Sequence
  Synthetic Polynucleotide
gaagttcagctgctggaatctggcggaggactcgttcaacctggcggctctctgagactgagctgtgccgcttctggcttcagcttctctagctacgccctgagctgggttcgacaagctcccggaaagggccttgaatgggtgtccagcatcggcgagaatgacggcaccacagactatgccgatgccgtgaaaggccggtttaccatcagcagagacaattccaagaacacgctctatctgcaaatgaactccctgcgcgtggaagatacagccgtgtattattgcgtgaaggacggcgtgcactggggacagggaaccctggttacagtgtctagc

SEQ ID NO: 832 - DNA, 339 bp, Artificial Sequence
  Synthetic Polynucleotide
gaggttcagctgcttgagtctggcggaggactggttcaacctggcggaagcctgagactgtcttgtgccgcttccggcttcagcttcagcagctatgccctgagctgggtccgacaggctcctggcaaaggactggaatgggtgtccagcatcggcgagaatgacggcaccaccgattatgccgatgccgtgaagggcagattcaccatctctcgggacaacagcaagaacaccctgtacctccagatgaacagcctcagagtggaagataccgccgtgtactactgcgtgaaggacggcgttcactggggccagggaacactggttacagtgtctagc

SEQ ID NO: 833 - DNA, 381 bp, Artificial Sequence
  Synthetic Polynucleotide
gaagttcagttggtagagtctggaggcggagtggtacaaccggggcggtctcttagacttagttgcgcagcaagcggtttctctttctctggctatgggatgcactgggtgagacaggcccctgggaaaggactggagtgggtggcctacatttcatacgacgggagtaataaatactatgcagactccgttaagggcaggttcacgatctctcgggacaattccaagaatacattgtatcttcagatgaatagtctccgagctgaagacacggcggtttactactgcgctaaagacccggcctggggacttcgacttggagagagttctagctacgattttgacatttggggacaagggacaatggtcactgtctcaagt

SEQ ID NO: 834 - DNA, 369 bp, Artificial Sequence
  Synthetic Polynucleotide
caggtccagctcgtcgagtccggcggcggcctcgtccaggccggcgactccgtcaccctctcctgcaccgcctccggccgcaccttctcctcctacgccctcgcctggttccgccagcgccccggcaaggagcgcgagttcgtcgccggcctccgctggggcggccccaccaactacgccgactccgtcaaggaccgcttcaccatctccggcgactccgccaagcacaccatgtacctccagatgaactccctcaagcccgaggacaccgccgtctactactgcggctacaaccccggcggctgggccgtcccctcccagtacgagtacgactcctggggccagggcacccaggtcaccgtctcctcc

SEQ ID NO: 835 - DNA, 354 bp, Artificial Sequence
  Synthetic Polynucleotide
caggttcagctgcaagagtctggcggaggacttgctcaagctggcggaagcctgagactgtcttgtgccgcctctggcagaaccttcagcatgggctggtttagacaggcccctggcaaagagagagagttcgtcgccgccatcacatacagcggcggcagcccttactacgcctcttctgtcagaggccggttcaccatcagccgggacaacgccaagaacaccgtgtacctccagatgaacagcctgaagccagaggacaccgccgtgtactactgtgccgccaatccaacctacggcagcgactggaatgccgagaattggggccagggcacccaagtgacagtgtctagt

SEQ ID NO: 836 - DNA, 348 bp, Artificial Sequence
  Synthetic Polynucleotide
gaagtgcagctggttgaatctggcggaggactggttcagcctggcggatctctgagactgtcttgtgccgccagcggcttcagcttcagcgacttttggatgagctgggtccgacaggcccctggcaaaggacttgaatgggtcgccacaatcagccaggccggcagcgagaaggactacgtggactctgtgaagggcagattcaccatcagccgggacaacgccaagaagtccctgtacctccagatgaacagcctgagagccgaggacaccgccgtgtactattgtgcctctggcgtgtacagcttcgactacagaggccagggcaccctggtcacagtctcttct

SEQ ID NO: 837 - DNA, 348 bp, Artificial Sequence
  Synthetic Polynucleotide
gaagtgcagctggttgaatctggcggaggactggttcagcctggcggatctctgagactgtcttgtgccgccagcggcttcaccttcagcaactactggatgagctgggtccgacaggcccctggaaagggacaagaatgggtcgccaccatcaaccaggacggcagcgacaaggattacgtggacagcgtgaagggcagattcaccatcagccgggacaacgccaagaagtccctgtacctccagatgaacagcctgagagccgaggacaccgccgtgtactattgtgcctctggcgtgtacagcttcgactacagaggccagggcaccctggtcacagtctcttct

SEQ ID NO: 838 - DNA, 348 bp, Artificial Sequence
  Synthetic Polynucleotide
gaagtgcagctggttgaatctggcggaggactggttcagcctggcggatctctgagactgtcttgtgccgccagcggcatcgacttcagcagatactggatgagctgggtccgacaggcccctggcaaaggacttgaatgggtcgccacaatcagccaggccggcagcgagaaggactacgtggactctgtgaagggcagattcaccatcagccgggacaacgccaagaagtccctgtacctccagatgaacagcctgagagccgaggacaccgccgtgtactattgtgcctctggcgtgtacagcttcgactacagaggccagggcaccctggtcacagtctcttct

SEQ ID NO: 839 - DNA, 348 bp, Artificial Sequence
  Synthetic Polynucleotide
gaagtgcagctggttgaatctggcggaggactggttcagcctggcggatctctgagactgtcttgtgccgccagcggcatcgacttcagcagatactggatgagctgggtccgacaggcccctggaaagggacaagaatgggtcgccaccatcaaccaggacggcagcgacaaggattacgtggacagcgtgaagggcagattcaccatcagccgggacaacgccaagaagtccctgtacctccagatgaacagcctgagagccgaggacaccgccgtgtactattgtgcctctggcgtgtacagcttcgactacagaggccagggcaccctggtcacagtctcttct

SEQ ID NO: 840 - DNA, 360 bp, Artificial Sequence
  Synthetic Polynucleotide
gaggtgcagctggttgaatctggcggaggactggttcagcctggcggatctctgagactgtcctgcacattttccggcggcaccttcagcagctacacaatgggctggttcagacaggcccctggcaaagaacgggaatttgtggccgaagtccgatggggcggagtgaccacatacagcaacagcctgaaggacagattcagcatcagcgaggacagcgtgaagaacgccgtgtacctccagatgaactccctgaagcctgaggacacagccgtgtactattgtgccgctgtgcggcagatgtacatgaccgtggtgcctgattattggggccagggcacactggtcacagtgtctagc

SEQ ID NO: 841 - DNA, 354 bp, Artificial Sequence
  Synthetic Polynucleotide
gaagtgcagctggttgaatctggcggaggactggttcaggctggcggatctctgagactgtcttgtgccgccagcggcagaacctttagcatgggctggtttagacaggcccctggcaaagagagagagttcgtcgccgccatcacatactctggcggcagcccttactacgccgactctgtgaagggcagattcaccatcagccgggacaacgccaagaacaccgtgtacctccagatgaacagcctgaagcctgaggacaccgccgtgtactactgcgccgccaatccaacatacggcagcgactggaacgccgagaattggggccagggaacccaagtgacagtgtctagc

SEQ ID NO: 842 - DNA, 354 bp, Artificial Sequence
  Synthetic Polynucleotide
cagctccagttgcaagagagcggccctggcttggtaaaaccttccgagacccttagcctcacatgcacggttagtgggggcagcatttcctcaggtgattactattggggatggattcggcaacccccgggtaaaggattggagtggattggtcatatttattatagtggagcgacgtactacaacccaagtctcaaatccagggttacaatatccgtcgatacgagcaggaaccaattcagcttgaaactttctagtgtcaccgcagcagacacagccgtctattactgtacgcgggatgactccagtaattggcggtcccgagggcaagggacactggtcacggtctcctca

SEQ ID NO: 843 - DNA, 354 bp, Artificial Sequence
  Synthetic Polynucleotide
cagctccagctgcaagagtctggacctggcctggtcaagcctagcgagacactgagcctgacctgtaccgtgtccggcgatagcatcagcagcggcgattactactggggctggatcagacagcctcctggcaaaggactggaatggatcggccacatctactacagcggcgtgacctactacaaccccagcctgaagtccagagtgaccatcagcgtggacaccagccggaaccagttctccctgaagctgtctagcgtgacagccgccgataccgccgtgtactactgcaccagagaggacagcagcaactggcggagtagaggccagggaacactggtcacagttagctct

SEQ ID NO: 844 - DNA, 354 bp, Artificial Sequence
  Synthetic Polynucleotide
caactgcaactgcaagagtctggccctggcctggtcaagccttctgaaaccctgagcctgacctgtaccgtgtccggcggctctatcagcagcggcgattactactggggctggatcagacagcctccaggcaagggactcgaatggatcggcagcatcagctacagcggctccacctactacaacccaagcctgaagtccagagtgaccatcagcgtggacaccagcagaaaccagttctccctgaagctgagcagcgtgacagccgccgatacagccgtgtattattgcaccagagaggacagcagcaactggcggagtagaggacagggcacactggtcacagtgtcctct

SEQ ID NO: 845 - DNA, 372 bp, Artificial Sequence
  Synthetic Polynucleotide
cagctgcaactgcaagagtctggccccggactggtcaagccttctgaaacactggccctgacctgcaatgtgtccggcggctctatcagcagcagctcctattactggggctggatcagacagcctccaggcaagagactggaatggatcggcagcatctactacagcggcagcacatacttcaaccccagcctgaagtccagagtgaccatcagcgtggacacctccaagaaccagttctccctgaagctgagcagcgtgacagccgccgatacagccgtgtattactgtgctggcggcgactactatggccccgttggacaatggcccagcgattacagaggacagggaacccttgtgaccgtgtcctct

SEQ ID NO: 846 - DNA, 390 bp, Artificial Sequence
  Synthetic Polynucleotide
gaagttcagctgcttgagtctggcggaggactggttcaacctggcggaagcctgagactgtcttgtgccgccagcggcttcatcttcagcagctacgccatgagctgggtccgacaggctcctggaaagggccaagaatgggtttccggcgttagcggcacaggcgtgaacacctactacgccgatagcgtgaagggcagattcaccatcagccgggacaacagcaagaacaccctgtacctccagatgaacagcctgagagccgaggacaccgccgtgtactattgtgcctctggcaaaggctgggacagcggctcttggtacgaggactatagaggccagggcaccctggtcacagtttcttcaacgcgtcctcgactgtgccttcta

SEQ ID NO: 847 - DNA, 372 bp, Artificial Sequence
  Synthetic Polynucleotide
cagctccagctgcaagagtctggacctggcctggtcaagcctagcgagacactgagcctgacctgtacagttagcggcggctctgtgtccagcagcagctattactggggctggatcagacagcctcctggcaagagactggaactgatcggcagcatctactacggcggctccacctacttcaaccccagcctgaaaagcagagtgaccatcagcgtggacaccagcaagaaccagttcagcctgaagctgagcagcgtgacagccgccgatacagccgtgtactattgtgccggcggagacacatacggccctgttggacaatggcccagcgactatagaggccagggcacactggtcacagtgtctagc

SEQ ID NO: 848 - DNA, 366 bp, Artificial Sequence
  Synthetic Polynucleotide
gaagttcagctgcttgaaagcggtggcggcctggttcaacctggcggatctctgagactgagctgtgccgccagcggcttcatcttctccatctacgccatgtcctgggtccgacaggcccctggaaaaggactggaatgggtgtccggcatctctggcagcggcgtgaacacctactacgccgattctgtgaagggccgcttcatcatcagccgggacaacagcagaaacaccgtgtacctccagatgaacagcctgagagccgatgacaccgccgtgtaccactgcgccaatggcaaaggctgggacggcaacacttggtacgaggattacagaggacagggaaccctcgtgaccgtgtctagt

SEQ ID NO: 849 - DNA, 351 bp, Artificial Sequence
  Synthetic Polynucleotide
gaagtgcaggttttggagtctggcggaggactggttcagcctggcggatctctgagactgtcttgtgccgccagcggcttcaccttcagcaactttgccatgagctgggtccgacaggcccctggcaaaggacttgaatgggtgtccacaatcagcggcagcgccggcacaacagattacgccgattctgtgaagggcagattcaccatcagccgggacaacagcaagaaaaccctgtacctccagatgaacagcctgcgcgtggaagataccgccgtgtactactgtgccgatggcagaggccccttcttcgattatcgcggccagggcacactggtcaccgtttcttct

SEQ ID NO: 850 - DNA, 357 bp, Artificial Sequence
  Synthetic Polynucleotide
gaggtgcagctggttgaatctggcggaggactggttcagcctggcggatctctgagactgtcttgtgccgccagcggcttcaacatcaaggatacctgtatcggctgggttcgcagagcccctggcaaagaggaagaactggtcgccaaaatctgcaagtacagcggccacaccagatacgccgacagcgtgaagggcagattcaccatcagcgccgacaccagcaagaacaccgcctacctccagatgaacagcctgagagccgaggacaccgccgtgtactattgtgccgctgtgtccgtcagagatgggcactacaattactggggccagggcaccaccgtgaccgtttcttca

SEQ ID NO: 851 - DNA, 357 bp, Artificial Sequence
  Synthetic Polynucleotide
gaagtgcaactggtggaaagcggaggcggacttgttcaaccaggcggaagcctgagactgagctgtgccgcttccggctttaatatcaaagacacatgcatcggatgggttcgccgcgctccagggaaagaagaggaactggttgccgacatctgtccctacaagggcagcacaagatatgccgactccgtgaaaggccggtttaccatctctgccgacacctctaagaatacggcctatctgcaaatgaactctctgcgggccgaagatacagccgtgtattactgcgccatcgtgtctgccagagatggctactataactattggggacagggaaccacagtcacagtgtcctct

SEQ ID NO: 852 - DNA, 357 bp, Artificial Sequence
  Synthetic Polynucleotide
gaagtgcagctgcttgagtctggcggaggactggttcaacctggcggaagcctgagactgtcttgtgccgccagcggcttcacctttagcagctacgccatgagctgggtccgacaggctcctggcaaaggactggaatgggtgtccgccatcacaggctctggcggcagcacatattacgccgactctgtgaagggcagattcaccatcagccgggacaacagcaagaacaccctgtacctccagatgaacagcctgagagccgaggacaccgccgtgtactactgtgccaaggatgaggatggcggctctctgctgggacacagaggacagggaacactggtcaccgtgtctagc

SEQ ID NO: 853 - DNA, 357 bp, Artificial Sequence
  Synthetic Polynucleotide
gaagtgcagctgcttgagtctggcggcggactgattcaacctggcggaagcctgagactgagctgtgccgcttccggcttcacctttagcagccacgccatgacctgggtccgacaggctcctggaaaaggactggaatgggtgtccgccatcagcagcggcggcagctacacatattacgccgacagcgtgaagggcagattcaccatctccagagacaacagcaagaacaccctgtacctccagatgaacagcctgagagccgaggacaccgccgtgtactactgtgccaaggatgaggatggcggctctctgctgggacacagaggacagggaacactggtcaccgtgtctagc

SEQ ID NO: 854 - DNA, 357 bp, Artificial Sequence
  Synthetic Polynucleotide
gaagtgcagctggttgaatctggcggaggactggttcagcctggcggatctctgagactgtcttgtgccgccagcggcttcagcttcagcgacttttggatgagctgggtccgacaggcccctggcaaaggacttgaatgggtgtccgccatcagcggcagcggcgattatacacactacgccgacagcgtgaagggcagattcaccatcagccgggacaacagcaagaacaccgtgtacctccagatgaacagcctgagagccgaggacagcgccgtgtactactgtgccaaggatgaggatggcggctctctgctgggacacagaggacagggaacactggtcaccgtgtctagc

SEQ ID NO: 855 - DNA, 363 bp, Artificial Sequence
  Synthetic Polynucleotide
gaagtgcagctgcttgagtctggcggaggactggttcaacctggcggaagcctgagactgtcttgtgccgcctctggcttcgccttcagcatctacgatatgagctgggtccgacaggcccctggcaaaggacttgaatgggtgtccagcatcagcggcagcggcgactacatctactacgccgatagcgtgaagggcagattcaccatcagccgggacatcagcaagaacaccctgtacctccagatgaacagcctgagagccgaggacaccgccgtgtactactgtgccaaagaaggcaccggcgctaacagcagcctggccgattatagaggccagggcacactggtcaccgtgtctagt

SEQ ID NO: 856 - DNA, 363 bp, Artificial Sequence
  Synthetic Polynucleotide
gaggttcagctgcttgagtctggcggaggactggttcaacctggcggaagcctgagactgtcttgtgccgccagcggcttcacctttagcagctacgccatgagctgggtccgacaggctcctggcaaaggactggaatgggtgtccagcatcagcggcagcggcgactacatctactacgccgatagcgtgaagggcagattcaccatcagccgggacatcagcaagaacaccctgtacctccagatgaacagcctgagagccgaggacaccgccgtgtactactgtgccaaagaaggcaccggcgctaacagcagcctggccgattatagaggccagggcacactggtcaccgtgtctagt

SEQ ID NO: 857 - DNA, 354 bp, Artificial Sequence
  Synthetic Polynucleotide
caggtgcagctggttgaatctggcggaggactggttcagcctggcggatctctgagactgtcttgtgccgccagcggcttcaccttcaccaatcacgccatgagctgggtccgacaggcccctggaaaaggactggaactggtgtctagcatcagcggcaacggcagaaccacctactacgccgatagcgtgaagggcagattcaccatcagccgggacatcagcaagaacaccctggacctccagatgaacagcctgagagccgaggataccgccgtgtactactgtgccaaggatggcggagagacactggtggatagcagaggccagggcacactggtcacagtgtcatct

SEQ ID NO: 858 - DNA, 357 bp, Artificial Sequence
  Synthetic Polynucleotide
gaagtgcagctgcttgaaagtggcggcggactgattcagcctggcggatctctgagactgagctgtgccgccagcggcttcaccttttctagccacgccatgacctgggtccgacaggcacctggaaaagggcttgaatgggtgtccgccatcagcggctctggcgattacacacactacgccgacagcgtgaagggcagattcaccatcagcagagacaacagcaagaacaccgtgtacctccagatgaacagcctgagagccgaggacagcgccgtgtattattgcgccaaggatgaggatggcggcagcctgcttggacacagaggacaaggcaccctggtcaccgtttcttcc

SEQ ID NO: 859 - DNA, 360 bp, Artificial Sequence
  Synthetic Polynucleotide
caggttcagctgcaagagtctggcggaggactggttcaggctggcgatagcctgagactgtcttgtgccgcttctggcagagccgtgtccagcctgtttatgggctggtttcggagagcccctggcaaagagagagaactggttgccgccatcagccggtacagcctgtacacctactacgccgacagcgtgaagggcagattcaccatcagcgccgacaacgccaagaacgccgtgtacctccagatgaacagcctgaagcctgaggacacagccgtgtactactgcgccagcaaacttgagtacaccagcaacgactacgacagctggggccagggaacccaagtgacagtctcttct

SEQ ID NO: 860 - DNA, 360 bp, Artificial Sequence
  Synthetic Polynucleotide
gaagttcagctgcaagagtctggcggaggactggttcaacctggcggaagcctgagactgtcttgtgccgcctctggcagaaccttcagcagcctgttcatgggctggttcagacaggcccctggcaaagagagagaactggtcgccgccatcagccggtacagcctgtacacctactacgccgacagcgtgaagggcagattcaccatcagcgccgacaacgccaagaacgccgtgtacctccagatgaacagcctgaagccagaggacacagccgtgtactactgcgccagcaaacttgagtacaccagcaacgactacgacagctggggccagggaacccaagtgacagtctcttct

SEQ ID NO: 861 - DNA, 360 bp, Artificial Sequence
  Synthetic Polynucleotide
gaagttcagctgcaagagtctggcggaggactggttcaacctggcggaagcctgagactgtcttgtgccgcctctggcagaaccttcagcagcctgtttatgggctgggtccgacaggcccctggcaaaggactggaactggtgtctgccatcagccggtacagcctgtacacctactacgccgacagcgtgaagggcagattcaccatcagcagagacaacgccaagaacaccctgtacctccagatgaacagcctgcggcctgaggataccgccgtgtactactgcgccagcaaacttgagtacaccagcaacgactacgacagctggggccagggaacactggtcacagtctcttct

SEQ ID NO: 862 - DNA, 384 bp, Artificial Sequence
  Synthetic Polynucleotide
gaagtgcagctggttgaatctggcggaggactggttcagcctggcggatctctgagactgagctgtgaagccagcggcttcgccagcgacgattacatcatcggctggttcagacaggcccctggcaaagagagagagggcgtcagctgcatcagctctaagtacgccaacaccgtgtacaccgacagcgtgaagggcagattcagactgagcagaggcaccgccaagaataccgtgtacctccagatgagcgccctgaagcctgaggataccgccgtgtactactgcgctatggacagccgcagagtgacatgccctgagatcagcaccatgcaccggaacttcgattcttggggccagggcacactggtcacagtgtcatct

SEQ ID NO: 863 - DNA, 384 bp, Artificial Sequence
  Synthetic Polynucleotide
gaagtgcagctggttgaatctggcggaggactggttcagcctggcggatctctgagactgtcttgtgccgcctctggcttcgccagcgactactatatcatcggctggttcagacaggcccctggcaaagagagagagggcgtcagctgtatcagcagcagatacgccaacaccaactacgccgacagcgtgaagggcagattcaccatcagccgggacaacgccaagaacaccgtgtacctccagatgaacagcctgaagcctgaggacaccgccgtgtactactgtgccgccgacaccagaagatacacctgtcctgacattgccaccatgcaccggaacttcgattcttggggccagggcacactggtcaccgtttcttct

SEQ ID NO: 864 - DNA, 372 bp, Artificial Sequence
  Synthetic Polynucleotide
gaagtgcaactggtggaatctggaggctctctggtgcagccagggggaagcctgagactgtcttgtgccgcttccggcttcaccttcgacgactacgccatgagctgggtgcgccaggtgccaggcaaaggcctggaatgggtgtccagcatcaactggagcggcacccacaccgattacgccgactccgtgaaaggcagattcacaatcagcagaaacaacgccaacaataccctgtacctgcagatgaactccctgaagtctgaggatacagcagtgtattattgcgccaagaactggcgggacgccggcaccacttggtttgagaaaagcggctctgccggacagggaacccaagtgacagtgtcctcc

SEQ ID NO: 865 - DNA, 354 bp, Artificial Sequence
  Synthetic Polynucleotide
gaggtgcaactggtggaaagcggcggaggcctggtgcaggctggcggatctctgagactgagctgtgccgccagcggcatcaccttcagcatcaacacaatgggctggtacagacaggcccctggcaagcagagggaactggtggccctgatctccagcatcggcgacacctactacgccgacagcgtgaagggccggttcaccatcagccgggacaacgccaagaacaccgtgtacctccagatgaacagcctgaagcccgaggacaccgccgtgtactactgcaagcggttcagaacagccgcccagggcaccgattattggggccagggaacacaagtgaccgtgtcctct

SEQ ID NO: 866 - DNA, 357 bp, Artificial Sequence
  Synthetic Polynucleotide
gaagtgcaactggtggaatctgggggcggactggtgcagccaggcggaagtctgaggctgtcttgtgccgcctccggcagcatcttcggcttcaacgacatggcctggtatcggcaggctcccggaaaacagcgcgagctggtggctctgattagcagagtgggcgtgaccagcagcgccgactctgtgaagggcagattcacaatctccagagtgaacgccaaggatacagtgtacctccagatgaactctctgaaacctgaggatacagcagtgtactattgctacatggaccagcggctggacggcagcacactggcctactggggacagggaactcaagtgacagtgtctagc

SEQ ID NO: 867 - DNA, 360 bp, Artificial Sequence
  Synthetic Polynucleotide
gacgtgcaactcgtggaatccggcggaggcctggtgcagcctggcggatctctgagactgagctgtgccgccagcggctctatcggcggactgaatgccatggcctggtacagacaggcccctggcaaagaacgggaactggtggccggcatctttggcgtgggcagcaccagatacgccgacagcgtgaagggccggttcaccatcagccgggacaacagcaagaacaccgtgtacctgcagatgaacagcctgcggcccgaggataccgccgtgtactactgcagaatgtccagcgtgaccagaggctccagcgactactggggccagggaacacttgtgaccgtgtccagtctcgag

SEQ ID NO: 868 - DNA, 375 bp, Artificial Sequence
  Synthetic Polynucleotide
gaagtgcaactggtggagtccggcggtggactggtacagcctgggggttcactgcgcctgtcctgcgccgccagcggaagaacctattacctcaatgctatgggttggttccgccaggccccaggaaaggagcgcgagttcgtggcggctattgactggtccgaggggaacaaggactatgctgattccgtgaagggcaggtttaccatcagccgggataattcaaaaaatactgtttatttgcagatgaactctcttagaccagaagacactgctgtctattactgcgccgctgacacccctccttggggaccactgatttatatcgaaagctatgattcctgggggcagggcacactcgtcaccgtgagtagc

SEQ ID NO: 869 - DNA, 369 bp, Artificial Sequence
  Synthetic Polynucleotide
gaggtgcaactggtggaatccgggggaggcagcgtgcaggctgggggatcactgagactgtcttgtgctgcctccggcgacacctacggcagctattggatgggatggtttcggcaggctcccggaaaagaacgggaaggcgtggccgccatcaacagaggcggcggatacaccgtgtacgccgactctgtgaagggcagattcacaatctccagagacacagccaagaatactgtgtacctgcagatgaactccctgcgccccgacgataccgccgactattattgcgccgcttccggcgtgctgggcggcctgcatgaggactggttcaattattggggacagggaacacttgtgacagtgtccagc

SEQ ID NO: 870 - DNA, 366 bp, Artificial Sequence
  Synthetic Polynucleotide
gttcagctcgtggaaagcggtggcggaagtgtgcaggccggaggcagtttgcgcctgagctgcgctgcttccggcgatacatacgggtcttactggatgggctggtttaggcaggcacctggacaagaaagagaagctgtggccgctattaacaggggaggtggctataccgtttatgctgattccgtgaagggccgattcacaatctcccgggataacgccaaaaacactctgtacctgcagatgaactcccttaggcccgatgacacagccgattactattgtgcggcctccggcgtgctgggtggtctgcatgaggattggttcaactactgggggcaaggcaccctcgtaaccgtgagtagc

SEQ ID NO: 871 - DNA, 372 bp, Artificial Sequence
  Synthetic Polynucleotide
gaggtgcaactggtggaaagcggcggaggctctgtgcagacaggcggctctctgagactgacctgtgccgccagcggcagaaccagcagatcctatggcatgggctggttcagacaggcccctggcaaagaacgcgagttcgtgtccggcatctcttggagaggcgacagcaccggctacgccgatagcgtgaagggccggttcaccatcagccgggacaacgccaagaacaccgtggacctgcagatgaacagcctgaagcccgaggacaccgccatctactactgtgccgctgccgccggatctgcttggtacggcacactgtacgagtacgactactggggccagggcacccttgtgaccgtgtcatct

SEQ ID NO: 872 - DNA, 372 bp, Artificial Sequence
  Synthetic Polynucleotide
gaggtgcagctcgtagaatctggaggtggttccgtgcaagccggaggatcattgcgactgacctgcgcagcgagcggatctacttctcgctcttacggtatgggatggttcagacaggctcctgggaaagagcgcgagttcgtttcaggcatctcctggaggggggacagcaccggctacgcagatagcgtgaagggcaggttcacgatcagccgagacaacgccaaaaacaccgtcgatctgcaaatgaatagtctgaagcccgaagatactgcgatctactactgtgccgccgcagcagggtccacctggtacggcacactctacgagtacgactactgggggcagggaaccctggtaaccgtgtcctct

SEQ ID NO: 873 - DNA, 375 bp, Artificial Sequence
  Synthetic Polynucleotide
gatgttcagttggtggagtctggtggcggtttggtgcagccaggtggctccctgcgactcagttgtgcagcctccgggttcattctggattactacgctattggttggtttcgacaggcccccggaaaggagagagagggcgtgctctgcattgatgccagcgacgacattacctactacgccgattctgtgaagggccgcttcaccatcagtagagacaatagcaagaatacagtctacctgcagatgaactccctgcgcccagaagacactgccgtctactactgtgctacccctatcgggctttcttcctcttgccttctcgaatatgactacgattactgggggcaggggacgctggtcaccgtgtctagc

SEQ ID NO: 874 - DNA, 378 bp, Artificial Sequence
  Synthetic Polynucleotide
gaggtgcaactggtggaaagcggcggaggactggtgcaggctggcgatagcctgagactgagctgtgccgcctccggcagagccttcagcagatatgccatgggctggttcagacaggcccctggcaaagaacgcgagttcgtggccgccatcggctggggacctagcaagaccaactacgccgacagcgtgaagggccggttcaccatcagccgggacaacgccaagaacaccgtgtacctgcagatgaacaccctgaagcccgaggacaccgccgtgtactcttgcgccgccaagttcgtgaacaccgacagcacctggtcccgcagcgagatgtacacctattggggccagggcaccctcgtgaccgtgtctagt

SEQ ID NO: 875 - DNA, 366 bp, Artificial Sequence
  Synthetic Polynucleotide
gaggtgcagctggtagaatccggcgggggacttgtacaggctggtggtagtctgagactgagctgtgtggcctccggcatcagcagcagcaagcggaacatgggatggtataggcaagcccctggtaagcagagggaatccgtggctacaatcagcagcggcggcaacaaggactacaccgacgccgtgaaggacaggttcaccatctccagggacaccaccaagaacaccgtgtacctgcagatgaactccctcaagcccgaggacaccgccgtgtactactgcaagatcgaggccggcacaggctgggccaccagaagaggctacacatactgggggcagggaacactggtgaccgtgagctcc

SEQ ID NO: 876 - DNA, 336 bp, Artificial Sequence
  Synthetic Polynucleotide
caggtgcaactggtgcagtctggcggagggctggtgcagccagggggatctctgagactgagctgtgccgccagcgacttcgacttcgccgcctacgagatgagctgggtgcgccaggctcctggacagggactggaatgggtggccatcatcagccacgacggcatcgacaagtattacaccgacagcgtgaagggccggttcaccatcagccgggacaacagcaagaacaccctgtacctgcagatgaataccctgcgggccgaggacaccgccacctactattgcctgagactgggagccgtgggccagggcacacttgtgacagtgtctagc

SEQ ID NO: 877 - DNA, 360 bp, Artificial Sequence
  Synthetic Polynucleotide
caggtgcaactggtgcagagcggaggcggactggtgcagcctgggggcagtctgaggctgtcttgtgccgcctccgatttcgccttcgatgattacgagatgtcttgggtgcggcaggccccaggcaaagccctggaatggatcggcgacatcaaccacagcggcaccaccatctacaaccccagcctgaagtccagagtgaccatctccagagacaactccaagaatactctgtacctgcagatgaacacactgagagccgaagatacagccatctactactgcgccagaccccactacggcgactacagcgacgccttcgacatctggggccagggaaccatggtcaccgtgtcctct

SEQ ID NO: 878 - DNA, 345 bp, Artificial Sequence
  Synthetic Polynucleotide
gaggtgcagctcgtggaatcaggcggaggtcttgtacagccaggaaattctcttcggctgtcttgcgccgcgagcgggttcaccttcagcagcttcggaatgagctgggtaagacaggcaccggggaaaggcctggagtgggtgagctcaatcagtgggagcgggtcagataccctgtacgcggattccgtgaagggcagattcacaatctctcgggacaatgctaagacaacactttaccttcagatgaactctctgcgacccgaggataccgctgtctactactgtacaataggaggttctctgtccagaagttctcaagggacactggtgaccgtctccagc

SEQ ID NO: 879 - DNA, 348 bp, Artificial Sequence
  Synthetic Polynucleotide
gaagttcaactggtggaatccggtggaggactggtgcaagcgggcggctcactgcgccttagctgtgctgccagcggcagtatcttcagcggcaatgtaatgggttggtacaggcgacaagccccaggcaaggagcgagagtgggtagccgcgattgcaagtgggggcagcatctactacagagattctgtgaaaggccgcttcactattagtcgggacaacgcaaaaaacacggtgtatctccaaatgaacagcttgaagccagaggacactgctgtctactattgtaacagtcatcccccaactctcccctattgggggctgggcactcaggtcaccgtgagttcc

SEQ ID NO: 880 - DNA, 378 bp, Artificial Sequence
  Synthetic Polynucleotide
gaagtgcaactggtggaatctggagggggaagcgtgcaggcaggcggatctctgagactgtcctgcaccacatctggcagagccctgaatatgtacgtgatgggatggtttcggcaggctcccggcaacgagcgggaatttgtggccgctacaagcagcagcggcggcagcacaagctaccccgattctgtgaagggcagattcacaatctcccgcgataatgccaagaatactgtgtacctgcagatgaatagtctgaagcctgaagatacagccgcctacagatgtgccgccagcccctacgtgtccacccccaccatgaacatcctggaagagtacagatactggggcctgggaacacaagtgacagtgtccagc

SEQ ID NO: 881 - DNA, 363 bp, Artificial Sequence
  Synthetic Polynucleotide
gaggttcagttggtcgaatcaggcgggggcctcgtccaacccggcggaagcctgcggctgtcttgcgcagcaagtggtagtgtgttcaagatcaacgttatggcctggtatcgccaggctccgggaaaagggagagagctggttgcggggatcattagcggtggctccaccagctacgctgacagtgtgaagggaaggttcactatatcacgcgacaacgcaaagaatacattgtacctccagatgaatagcttgcggcccgaagacacggcagtctactattgtgcctttatcacaacagagagcgactatgacctgggccgccggtattgggggcagggaacccttgtgaccgtttcatcc

SEQ ID NO: 882 - DNA, 798 bp, Artificial Sequence
  Synthetic Polynucleotide
gaggtgcaactggtggaaagcggcggaggctctgtgcagacaggcggctctctgagactgacctgtgccgccagcggcagaaccagcagatcctatggcatgggctggttcagacaggcccctggcaaagaacgcgagttcgtgtccggcatctcttggagaggcgacagcaccggctacgccgatagcgtgaagggccggttcaccatcagccgggacaacgccaagaacaccgtggacctgcagatgaacagcctgaagcccgaggacaccgccatctactactgtgccgctgccgccggatctgcttggtacggcacactgtacgagtacgactactggggccagggcacccttgtgaccgtgtcatctctcgagggcggaggcggaagtggaggcggaggatctggcggcggaggctctttcgaagaggtgcaactggtggaatccgggggaggcagcgtgcaggctgggggatcactgagactgtcttgtgctgcctccggcgacacctacggcagctattggatgggatggtttcggcaggctcccggaaaagaacgggaaggcgtggccgccatcaacagaggcggcggatacaccgtgtacgccgactctgtgaagggcagattcacaatctccagagacacagccaagaatactgtgtacctgcagatgaactccctgcgccccgacgataccgccgactattattgcgccgcttccggcgtgctgggcggcctgcatgaggactggttcaattattggggacagggaacacttgtgacagtgtccagc

SEQ ID NO: 883 - DNA, 855 bp, Artificial Sequence
  Synthetic Polynucleotide
gaggtgcagctcgtagaatctggaggtggttccgtgcaagccggaggatcattgcgactgacctgcgcagcgagcggatctacttctcgctcttacggtatgggatggttcagacaggctcctgggaaagagcgcgagttcgtttcaggcatctcctggaggggggacagcaccggctacgcagatagcgtgaagggcaggttcacgatcagccgagacaacgccaaaaacaccgtcgatctgcaaatgaatagtctgaagcccgaagatactgcgatctactactgtgccgccgcagcagggtccacctggtacggcacactctacgagtacgactactgggggcagggaaccctggtaaccgtgtcctctctcgagggaggaggcggctccgggggaggcggaagtggaggcggaggatctgggtctggaggaagcggatctggaggctcagggtcagggggctcaggcagtggaggctctttcgaagttcagctcgtggaaagcggtggcggaagtgtgcaggccggaggcagtttgcgcctgagctgcgctgcttccggcgatacatacgggtcttactggatgggctggtttaggcaggcacctggacaagaaagagaagctgtggccgctattaacaggggaggtggctataccgtttatgctgattccgtgaagggccgattcacaatctcccgggataacgccaaaaacactctgtacctgcagatgaactcccttaggcccgatgacacagccgattactattgtgcggcctccggcgtgctgggtggtctgcatgaggattggttcaactactgggggcaaggcaccctcgtaaccgtgagtagc

SEQ ID NO: 884 - DNA, 825 bp, Artificial Sequence
  Synthetic Polynucleotide
gaggtgcaactggtggaaagcggcggaggcctggtgcaggctggcggatctctgagactgagctgtgccgccagcggcatcaccttcagcatcaacacaatgggctggtacagacaggcccctggcaagcagagggaactggtggccctgatctccagcatcggcgacacctactacgccgacagcgtgaagggccggttcaccatcagccgggacaacgccaagaacaccgtgtacctccagatgaacagcctgaagcccgaggacaccgccgtgtactactgcaagcggttcagaacagccgcccagggcaccgattattggggccagggaacacaagtgaccgtgtcctctctcgagggaggaggcggctccgggggaggcggaagtggaggcggaggatctgggtctggaggaagcggatctggaggctcagggtcagggggctcaggcagtggaggctctttcgaagtgcaactggtggaatctgggggcggactggtgcagccaggcggaagtctgaggctgtcttgtgccgcctccggcagcatcttcggcttcaacgacatggcctggtatcggcaggctcccggaaaacagcgcgagctggtggctctgattagcagagtgggcgtgaccagcagcgccgactctgtgaagggcagattcacaatctccagagtgaacgccaaggatacagtgtacctccagatgaactctctgaaacctgaggatacagcagtgtactattgctacatggaccagcggctggacggcagcacactggcctactggggacagggaactcaagtgacagtgtctagc

SEQ ID NO: 885 - DNA, 726 bp, Artificial Sequence; identical to SEQ ID NO: 585
  Synthetic Polynucleotide

SEQ ID NO: 886 - DNA, 840 bp, Artificial Sequence
  Synthetic Polynucleotide
gacgtgcaactcgtggaatccggcggaggcctggtgcagcctggcggatctctgagactgagctgtgccgccagcggctctatcggcggactgaatgccatggcctggtacagacaggcccctggcaaagaacgggaactggtggccggcatctttggcgtgggcagcaccagatacgccgacagcgtgaagggccggttcaccatcagccgggacaacagcaagaacaccgtgtacctgcagatgaacagcctgcggcccgaggataccgccgtgtactactgcagaatgtccagcgtgaccagaggctccagcgactactggggccagggaacacttgtgaccgtgtccagtctcgagggaggaggcggctccgggggaggcggaagtggaggcggaggatctgggtctggaggaagcggatctggaggctcagggtcagggggctcaggcagtggaggctctttcgaagtgcaactggtggaatctggaggctctctggtgcagccagggggaagcctgagactgtcttgtgccgcttccggcttcaccttcgacgactacgccatgagctgggtgcgccaggtgccaggcaaaggcctggaatgggtgtccagcatcaactggagcggcacccacaccgattacgccgactccgtgaaaggcagattcacaatcagcagaaacaacgccaacaataccctgtacctgcagatgaactccctgaagtctgaggatacagcagtgtattattgcgccaagaactggcgggacgccggcaccacttggtttgagaaaagcggctctgccggacagggaacccaagtgacagtgtcctcc

SEQ ID NO: 887 - DNA, 864 bp, Artificial Sequence
  Synthetic Polynucleotide
gatgttcagttggtggagtctggtggcggtttggtgcagccaggtggctccctgcgactcagttgtgcagcctccgggttcattctggattactacgctattggttggtttcgacaggcccccggaaaggagagagagggcgtgctctgcattgatgccagcgacgacattacctactacgccgattctgtgaagggccgcttcaccatcagtagagacaatagcaagaatacagtctacctgcagatgaactccctgcgcccagaagacactgccgtctactactgtgctacccctatcgggctttcttcctcttgccttctcgaatatgactacgattactgggggcaggggacgctggtcaccgtgtctagcctcgagggaggtagcggctccgggggaggcggaagtggaggcggaggatctgggtctggaggaagcggatctggaggctcagggtcagggggctcaggcagtggaggctctttcgaagtgcaactggtggagtccggcggtggactggtacagcctgggggttcactgcgcctgtcctgcgccgccagcggaagaacctattacctcaatgctatgggttggttccgccaggccccaggaaaggagcgcgagttcgtggcggctattgactggtccgaggggaacaaggactatgctgattccgtgaagggcaggtttaccatcagccgggataattcaaaaaatactgtttatttgcagatgaactctcttagaccagaagacactgctgtctattactgcgccgctgacacccctccttggggaccactgatttatatcgaaagctatgattcctgggggcagggcacactcgtcaccgtgagtagc

SEQ ID NO: 888 - DNA, 813 bp, Artificial Sequence
  Synthetic Polynucleotide
caggtgcaactggtgcagtctggcggagggctggtgcagccagggggatctctgagactgagctgtgccgccagcgacttcgacttcgccgcctacgagatgagctgggtgcgccaggctcctggacagggactggaatgggtggccatcatcagccacgacggcatcgacaagtattacaccgacagcgtgaagggccggttcaccatcagccgggacaacagcaagaacaccctgtacctgcagatgaataccctgcgggccgaggacaccgccacctactattgcctgagactgggagccgtgggccagggcacacttgtgacagtgtctagcctcgagggaggaggcggctccgggggaggcggaagtggaggcggaggatctgggtctggaggaagcggatctggaggctcagggtcagggggctcaggcagtggaggcagcttcgaacaggtgcaactggtgcagagcggaggcggactggtgcagcctgggggcagtctgaggctgtcttgtgccgcctccgatttcgccttcgatgattacgagatgtcttgggtgcggcaggccccaggcaaagccctggaatggatcggcgacatcaaccacagcggcaccaccatctacaaccccagcctgaagtccagagtgaccatctccagagacaactccaagaatactctgtacctgcagatgaacacactgagagccgaagatacagccatctactactgcgccagaccccactacggcgactacagcgacgccttcgacatctggggccagggaaccatggtcaccgtgtcctct

SEQ ID NO: 889 - DNA, 357 bp, Artificial Sequence
  Synthetic Polynucleotide
caagtgaagctggaagagtctggcggaggactggtgcaggctggaagaagcctgagactgtcttgtgccgccagcgagcacacctttagctctcacgtgatgggctggttcagacaggcccctggcaaagaaagggaaagcgtggccgttatcggctggcgggatattagcaccagctacgccgatagcgtgaagggcagattcaccatcagccgggacaacgccaagaaaaccctgtacctccagatgaacagcctgaagccagaggacaccgccgtgtactactgcgccgccagaagaattgacgccgccgactttgattcttggggccagggaacccaagtgaccgtttctagc

SEQ ID NO: 890 - DNA, 354 bp, Artificial Sequence
  Synthetic Polynucleotide
gaagtgcaactggttgaatccggtggcggcctggtgcaagcaggcggatctctcagacttagctgtgccgcctccggcagaaccttcacaatgggatggtttaggcaggctccagggaaagagagagagttcgtcgccgccatctctctgtctcccacactggcctactacgccgagtctgtgaaaggccggttcaccatctccagagataatgccaagaacaccgtggtgctgcaaatgaactctctgaaacccgaggatacagccctgtactattgtgccgctgaccggaagtccgtgatgagcatcagacccgattactggggacagggcacacaagtcacagtgtcctct

SEQ ID NO: 891 - DNA, 756 bp, Artificial Sequence
  Synthetic Polynucleotide
caagtgaagctggaagagtctggcggaggactggtgcaggctggaagaagcctgagactgtcttgtgccgccagcgagcacacctttagctctcacgtgatgggctggttcagacaggcccctggcaaagaaagggaaagcgtggccgttatcggctggcgggatattagcaccagctacgccgatagcgtgaagggcagattcaccatcagccgggacaacgccaagaaaaccctgtacctccagatgaacagcctgaagccagaggacaccgccgtgtactactgcgccgccagaagaattgacgccgccgactttgattcttggggccagggaacccaagtgaccgtttctagcggaggcggtggaagtggcggcggtggttcaggcggcggaggatctgaagtgcaactggttgaatccggtggcggcctggtgcaagcaggcggatctctcagacttagctgtgccgcctccggcagaaccttcacaatgggatggtttaggcaggctccagggaaagagagagagttcgtcgccgccatctctctgtctcccacactggcctactacgccgagtctgtgaaaggccggttcaccatctccagagataatgccaagaacaccgtggtgctgcaaatgaactctctgaaacccgaggatacagccctgtactattgtgccgctgaccggaagtccgtgatgagcatcagacccgattactggggacagggcacacaagtcacagtgtcctct

SEQ ID NO: 892 - DNA, 348 bp, Artificial Sequence
  Synthetic Polynucleotide
gaggtgcaactggttgagtctggcggaggactggttcaggcaggcggatctctgagactgagctgtatcgccaccggcaaggtgttcagcatctacgacatgggctggtacagacaggcccctggcaagcagagagagctggttgccgagatcacaagcagcggcaccacacactacgacgacttcgtgtccggcagattcaccatcagccgggacaacgccaagaacaccgtgtacctccagatgaacaccctgaaggccgaggacaccgccgtgtactactgtagagccaaccacgtgttcggcggcagctattggggacagggaacccaagtgacagtgtctagt

SEQ ID NO: 893 - DNA, 366 bp, Artificial Sequence
  Synthetic Polynucleotide
caggtgcagcttgttgaaagcggaggtggcctggttcaacctggcggaagcctgagactgtcctgtgaagccagcggctttaccctggactactacgccatcggctggtttagacaagctcccggcaaagagagagagggcgtcatctgcatcagcagatccgacggcagcacctactatgccgacagcgtgaagggacgcttcaccatctccagagacaatgccaaaaagacggtctacctgcaaatgatctccctcaagcctgaggataccgccgcctactattgtgccgctggcgctgattgcagcggctacctgagagactacgagttcagaggccagggcacacaagtgaccgtcagctct

SEQ ID NO: 894 - DNA, 735 bp, Artificial Sequence
  Synthetic Polynucleotide
gaggtgcaactggttgagtctggcggaggactggttcaggcaggcggatctctgagactgagctgtatcgccaccggcaaggtgttcagcatctacgacatgggctggtacagacaggcccctggcaagcagagagagctggttgccgagatcacaagcagcggcaccacacactacgacgacttcgtgtccggcagattcaccatcagccgggacaacgccaagaacaccgtgtacctccagatgaacaccctgaaggccgaggacaccgccgtgtactactgtagagccaaccacgtgttcggcggcagctattggggacagggaacccaagtgacagtgtctagtgaggtggccgctttggagaaacaggtgcagcttgttgaaagcggaggtggcctggttcaacctggcggaagcctgagactgtcctgtgaagccagcggctttaccctggactactacgccatcggctggtttagacaagctcccggcaaagagagagagggcgtcatctgcatcagcagatccgacggcagcacctactatgccgacagcgtgaagggacgcttcaccatctccagagacaatgccaaaaagacggtctacctgcaaatgatctccctcaagcctgaggataccgccgcctactattgtgccgctggcgctgattgcagcggctacctgagagactacgagttcagaggccagggcacacaagtgaccgtcagctct

SEQ ID NO: 895 - DNA, 384 bp, Artificial Sequence
  Synthetic Polynucleotide
caagtgaagctggaagagtctggcggcagactggtgcagcctagaggaagcctgagactgtcttgtgccggcagcggcagaacctttagcacatacggcatggcctggttcagacaggcccctggaaaagagagagagttcgtcgccagcaaggccagcatgaactactccggcaggacctactacgccgacagcgtgaagggcagattcacaatcgccagagacaacgccaagaacatggtgttcctccagatgaacaatctgaagcccgaggacaccgccgtgtactattgtgccgctggcacaggctgtagcacctacggctgtttcgacgcccagatcatcgactactggggcaagggcacactggtcacagtttctagc

SEQ ID NO: 896 - DNA, 357 bp, Artificial Sequence
  Synthetic Polynucleotide
caagtcaaactggaagaaagcggtggcggcctggtgcaacctggcgaatctctgagactgagctgtagcgccagcggctccatcttcaaggtgttcagagtgttcgccatgagctggtacaggcaaggccctggcaagcagagagagctggtcgcctctatcagcagcggcgagacaaccacatacgccgactctgtgaaaggccggttcaccatcagccgggataatgccaagaataccgcctatctccagatggactccctgaagcctgaagatacagctgtgtactactgcaacgccgaccataccttcaccggcgatttttggggccagggaacccaagtgaccgtgtctagt

SEQ ID NO: 897 - DNA, 762 bp, Artificial Sequence
  Synthetic Polynucleotide
caagtgaagctggaagagtctggcggcagactggtgcagcctagaggaagcctgagactgtcttgtgccggcagcggcagaacctttagcacatacggcatggcctggttcagacaggcccctggaaaagagagagagttcgtcgccagcaaggccagcatgaactactccggcaggacctactacgccgacagcgtgaagggcagattcacaatcgccagagacaacgccaagaacatggtgttcctccagatgaacaatctgaagcccgaggacaccgccgtgtactattgtgccgctggcacaggctgtagcacctacggctgtttcgacgcccagatcatcgactactggggcaagggcacactggtcacagtttctagcgaggtggccgctttggagaaacaagtcaaactggaagaaagcggtggcggcctggtgcaacctggcgaatctctgagactgagctgtagcgccagcggctccatcttcaaggtgttcagagtgttcgccatgagctggtacaggcaaggccctggcaagcagagagagctggtcgcctctatcagcagcggcgagacaaccacatacgccgactctgtgaaaggccggttcaccatcagccgggataatgccaagaataccgcctatctccagatggactccctgaagcctgaagatacagctgtgtactactgcaacgccgaccataccttcaccggcgatttttggggccagggaacccaagtgaccgtgtctagt

SEQ ID NO: 898 - DNA, 351 bp, Artificial Sequence
  Synthetic Polynucleotide
caagtgaagctggaagagtctggcggagagctggttcaacctggcggacctctgagactgtcttgtgccgccagcggcaacatcttcagcatcaaccggatgggctggtacagacaggcccctggaaaacagagagccttcgtcgcctctatcaccgtgcggggcatcaccaattacgccgactctgtgaagggcagattcaccatcagcgtggacaagagcaagaacaccatctacctccagatgaacgccctgaagcctgaggacaccgccgtgtactactgcaatgccgtgtccagcaacagggaccccgattattggggccagggcacccaagtgacagtgtctagt

SEQ ID NO: 899 - DNA, 387 bp, Artificial Sequence
  Synthetic Polynucleotide
cctgttcaactggttgaatctggcggcggactggtgcaggctggcgatagtctcagactgagctgtgccgcctccggcagaacatttggcatcggcacaatgggatggttccggcagcctcctggaaaagaacgcgaatttgtggccgccatcagatggtctacaggcggcaccagatacgccgacagcgtgaaaggccggtttaccatcagcagagacaacgccaagctgaccgtggatctccagatggatagcctgaaaccagaggatacagccgtctattactgcgccgctgacaggctgagcctggatctgtctggcagataccactacaaccctgccgtgtacgactactggggacagggaacacaagtcaccgtgtcctct

SEQ ID NO: 900 - DNA, 783 bp, Artificial Sequence
  Synthetic Polynucleotide
caagtgaagctggaagagtctggcggagagctggttcaacctggcggacctctgagactgtcttgtgccgccagcggcaacatcttcagcatcaaccggatgggctggtacagacaggcccctggaaaacagagagccttcgtcgcctctatcaccgtgcggggcatcaccaattacgccgactctgtgaagggcagattcaccatcagcgtggacaagagcaagaacaccatctacctccagatgaacgccctgaagcctgaggacaccgccgtgtactactgcaatgccgtgtccagcaacagggaccccgattattggggccagggcacccaagtgacagtgtctagtggaggcggtggaagtggcggcggtggttcaggcggcggaggatctcctgttcaactggttgaatctggcggcggactggtgcaggctggcgatagtctcagactgagctgtgccgcctccggcagaacatttggcatcggcacaatgggatggttccggcagcctcctggaaaagaacgcgaatttgtggccgccatcagatggtctacaggcggcaccagatacgccgacagcgtgaaaggccggtttaccatcagcagagacaacgccaagctgaccgtggatctccagatggatagcctgaaaccagaggatacagccgtctattactgcgccgctgacaggctgagcctggatctgtctggcagataccactacaaccctgccgtgtacgactactggggacagggaacacaagtcaccgtgtcctct

SEQ ID NO: 901 - DNA, 357 bp, Artificial Sequence
  Synthetic Polynucleotide
gccgtgcaactggttgaatctggcggaggactggtgcaggctggcgattctctgagactgacctgtacagccagcggcagagccttcagcacctacttcatggcctggttcagacaggcccctggcaaagagagagagttcgtcgccggaatcgcttggagcggaggctctacagcctacgccgattctgtgaagggcagattcaccatcagccgggacaacgccaagaacaccgtgtacctccagatgaacagcctgaagtccgaggacaccgccgtgtactactgtgccagcagaggcatcgaggtggaagagtttggagcctggggccagggaacccaagtgacagtttcttct

SEQ ID NO: 902 - DNA, 360 bp, Artificial Sequence
  Synthetic Polynucleotide
caggttcaactggtggaaagtggcggtggcttggtgcaagcaggcggctctcttagactgtcttgtgctgcctctggcggcaccctgagcaagaataccgtggcatggtttaggcaggctcccggaaaagagcggggctttgtcgccagcatcacctgggatggcagaaccacctactacgccgacagcgtgaaaggccggttcaccatctccagagataatgccaagaatacggtctacttgcaaatgaactccctgaagcctgaagatacagccgtgtacgtgtgcgccgatctcggcaaatggcctgctggacctgccgattattggggacagggcacacaagtcaccgtgtcctct

SEQ ID NO: 903 - DNA, 33 bp, Artificial Sequence
  Synthetic Polynucleotide
  misc_feature (30)..(33): n is a, c, g, or t
gggggggggggggggggggggggggggggnnnn

SEQ ID NO: 904 - DNA, 33 bp, Artificial Sequence; identical to SEQ ID NO: 903
  Synthetic Polynucleotide
  misc_feature (30)..(33): n is a, c, g, or t

SEQ ID NO: 905 - DNA, 33 bp, Artificial Sequence; identical to SEQ ID NO: 903
  Synthetic Polynucleotide
  misc_feature (30)..(33): n is a, c, g, or t

SEQ ID NO: 906 - DNA, 33 bp, Artificial Sequence; identical to SEQ ID NO: 903
  Synthetic Polynucleotide
  misc_feature (30)..(33): n is a, c, g, or t

SEQ ID NO: 907 - DNA, 33 bp, Artificial Sequence; identical to SEQ ID NO: 903
  Synthetic Polynucleotide
  misc_feature (30)..(33): n is a, c, g, or t

SEQ ID NO: 908 - DNA, 33 bp, Artificial Sequence; identical to SEQ ID NO: 903
  Synthetic Polynucleotide
  misc_feature (30)..(33): n is a, c, g, or t

SEQ ID NO: 909 - DNA, 33 bp, Artificial Sequence; identical to SEQ ID NO: 903
  Synthetic Polynucleotide
  misc_feature (30)..(33): n is a, c, g, or t

SEQ ID NO: 910 - DNA, 33 bp, Artificial Sequence; identical to SEQ ID NO: 903
  Synthetic Polynucleotide
  misc_feature (30)..(33): n is a, c, g, or t

SEQ ID NO: 911 - DNA, 33 bp, Artificial Sequence; identical to SEQ ID NO: 903
  Synthetic Polynucleotide
  misc_feature (30)..(33): n is a, c, g, or t

SEQ ID NO: 912 - DNA, 33 bp, Artificial Sequence; identical to SEQ ID NO: 903
  Synthetic Polynucleotide
  misc_feature (30)..(33): n is a, c, g, or t

SEQ ID NO: 913 - DNA, 33 bp, Artificial Sequence; identical to SEQ ID NO: 903
  Synthetic Polynucleotide
  misc_feature (30)..(33): n is a, c, g, or t

SEQ ID NO: 914 - DNA, 33 bp, Artificial Sequence; identical to SEQ ID NO: 903
  Synthetic Polynucleotide
  misc_feature (30)..(33): n is a, c, g, or t

SEQ ID NO: 915 - DNA, 33 bp, Artificial Sequence; identical to SEQ ID NO: 903
  Synthetic Polynucleotide
  misc_feature (30)..(33): n is a, c, g, or t

SEQ ID NO: 916 - DNA, 33 bp, Artificial Sequence; identical to SEQ ID NO: 903
  Synthetic Polynucleotide
  misc_feature (30)..(33): n is a, c, g, or t

SEQ ID NO: 917 - DNA, 33 bp, Artificial Sequence; identical to SEQ ID NO: 903
  Synthetic Polynucleotide
  misc_feature (30)..(33): n is a, c, g, or t

SEQ ID NO: 918 - DNA, 33 bp, Artificial Sequence; identical to SEQ ID NO: 903
  Synthetic Polynucleotide
  misc_feature (30)..(33): n is a, c, g, or t

SEQ ID NO: 919 - DNA, 33 bp, Artificial Sequence; identical to SEQ ID NO: 903
  Synthetic Polynucleotide
  misc_feature (30)..(33): n is a, c, g, or t

SEQ ID NO: 920 - DNA, 33 bp, Artificial Sequence; identical to SEQ ID NO: 903
  Synthetic Polynucleotide
  misc_feature (30)..(33): n is a, c, g, or t

SEQ ID NO: 921 - DNA, 33 bp, Artificial Sequence; identical to SEQ ID NO: 903
  Synthetic Polynucleotide
  misc_feature (30)..(33): n is a, c, g, or t

SEQ ID NO: 922 - DNA, 33 bp, Artificial Sequence; identical to SEQ ID NO: 903
  Synthetic Polynucleotide
  misc_feature (30)..(33): n is a, c, g, or t

SEQ ID NO: 923 - DNA, 33 bp, Artificial Sequence; identical to SEQ ID NO: 903
  Synthetic Polynucleotide
  misc_feature (30)..(33): n is a, c, g, or t

SEQ ID NO: 924 - DNA, 33 bp, Artificial Sequence; identical to SEQ ID NO: 903
  Synthetic Polynucleotide
  misc_feature (30)..(33): n is a, c, g, or t

SEQ ID NO: 925 - DNA, 33 bp, Artificial Sequence; identical to SEQ ID NO: 903
  Synthetic Polynucleotide
  misc_feature (30)..(33): n is a, c, g, or t

SEQ ID NO: 926 - DNA, 33 bp, Artificial Sequence; identical to SEQ ID NO: 903
  Synthetic Polynucleotide
  misc_feature (30)..(33): n is a, c, g, or t

SEQ ID NO: 927 - DNA, 33 bp, Artificial Sequence; identical to SEQ ID NO: 903
  Synthetic Polynucleotide
  misc_feature (30)..(33): n is a, c, g, or t

SEQ ID NO: 928 - DNA, 33 bp, Artificial Sequence; identical to SEQ ID NO: 903
  Synthetic Polynucleotide
  misc_feature (30)..(33): n is a, c, g, or t

SEQ ID NO: 929 - DNA, 33 bp, Artificial Sequence; identical to SEQ ID NO: 903
  Synthetic Polynucleotide
  misc_feature (30)..(33): n is a, c, g, or t

SEQ ID NO: 930 - DNA, 33 bp, Artificial Sequence; identical to SEQ ID NO: 903
  Synthetic Polynucleotide
  misc_feature (30)..(33): n is a, c, g, or t

SEQ ID NO: 931 - DNA, 33 bp, Artificial Sequence; identical to SEQ ID NO: 903
  Synthetic Polynucleotide
  misc_feature (30)..(33): n is a, c, g, or t

SEQ ID NO: 932 - DNA, 426 bp, Artificial Sequence
  Synthetic Polynucleotide
atggccctgcctgtgacagctctgctgctgcctctggcactgctgctgcacgccgccagacctgaagttcagctggttgaatctggcggcggactggttcaacctggcggatctctgagactgagctgtgccgcctctggctacgcctttagcagctactgcgtcaactgggttcgacaggcccctggcaaagaagaggaatgggtcgcccaaatctgtcccggcgacggcgacaccaactacaacggcaagttcaagggcagattcaccatcagccgggacaacagcaagaacaccctgtacctccagatgaactccctgagagccgaggacaccgccgtgtactattgtgccagatccatcaccaccgtcgtgggctgcgcttacgattattggggccagggaaccctggtcaccgtgtcctct

SEQ ID NO: 933 - DNA, 420 bp, Artificial Sequence
  Synthetic Polynucleotide
atggccttaccagtgaccgccttgctcctgccgctggccttgctgctccacgccgccaggccggaagtgcaactggtggaatcaggcggcggactggtgcagcctggcggatctctgagactgagctgtgccgccagcggcttcgacttcagccggtactgtatgagctgggtgcgccaggcccctggcaaagaagaggaatggatcggcgaaatctgccccgacagcagcaccatcaactacgcccccagcctgaaggacaagttcatcatcagccgggacaacgccaagaacagcctgtacctccagatgaactccctgcgggccgaggacaccgccgtgtactattgcgccagacccgacggcaactactggtactacgacgtgtggggccagggaaccctcgtgaccgtgtcatct

SEQ ID NO: 934 - DNA, 831 bp, Artificial Sequence
  Synthetic Polynucleotide
atggccttaccagtgaccgccttgctcctgccgctggccttgctgctccacgccgccaggccgcaggttcagctggttcagtctggggccgaagtgaagaaacctggggcctctgtgaaggtgtcctgcaaagcaagcggcggcaccttcagcaactactggatgcactgggtccgacaggcccctggacaaggacttgaatggatgggctggacctacagaggccacagcgacaccaattacgcccagaaattccagggcagagtgaccatgaccagagacaccagcatcagcaccgcctacatggaactgagccggctgagatccgatgacaccgccgtgtactattgcgccagaggggccatctacgacggctacgacgtgctggataatagaggccagggcaccctggtcacagtgtctagcggatccggcggaggcggaagtggaggcggaggatctttcgaagtgcagctgctggaatctggtggcggactggttcaacctggcggctctctgagactgtcttgtgccgccagcggcttcaccttcaacagctttgccatgagctgggttcgacaagctcccggcaaagggctcgaatgggtgtccgccatttctggctctggcggcggaacctactacgccgattctgtgaaaggccggttcaccatcagccgggacatcagcaagaacaccctgtacctccagatgaacagcctgagagccgaggatacagctgtgtactactgtgccaaggacaagatcctttggttcggcgagcccgtgttcgactacagaggacagggaacactcgtgaccgtgtcctct

SEQ ID NO: 935 - DNA, 426 bp, Artificial Sequence
  Synthetic Polynucleotide
atggccttaccagtgaccgccttgctcctgccgctggccttgctgctccacgccgccaggccgcaggttcagctggttcagtctggggccgaagtgaagaaacctggggcctctgtgaaggtgtcctgcaaagcaagcggcggcaccttcagcaactactggatgcactgggtccgacaggcccctggacaaggacttgaatggatgggctggacctacagaggccacagcgacaccaattacgcccagaaattccagggcagagtgaccatgaccagagacaccagcatcagcaccgcctacatggaactgagccggctgagatccgatgacaccgccgtgtactattgcgccagaggggccatctacgacggctacgacgtgctggataatagaggccagggcaccctggtcacagtgtctagc

SEQ ID NO: 936 - DNA, 423 bp, Artificial Sequence
  Synthetic Polynucleotide
atggactggatttggcgcatccttttccttgtcggcgctgctaccggcgcccattcccaggtgcagctggttgaatctggcggaggactggttcagcctggcggatctctgagactgtcttgtgccgccagcggcttcaccttcagcaactacggcatgagctgggtccgacaggcccctggaaaaggactggaactggtgtccagcatcagaagcgacggcagctggacctactacgccgattctgtgaagggcagattcaccatcagccgggacatcagcaagaacaccctggacctccagatgaacagcctgagagccgaggataccgccgtgtactactgcgccagacggtactggtctaagagccacgccagcgtgaccgactatagaggccagggaacactggtcaccgtgtctagc

SEQ ID NO: 937 - DNA, 831 bp, Artificial Sequence
  Synthetic Polynucleotide
atggactggatttggcgcatccttttccttgtcggcgctgctaccggcgcccattcccaggtgcagctggttgaatctggcggaggactggttcagcctggcggatctctgagactgtcttgtgccgccagcggcttcaccttcagcaactacggcatgagctgggtccgacaggcccctggaaaaggactggaactggtgtccagcatcagaagcgacggcagctggacctactacgccgattctgtgaagggcagattcaccatcagccgggacatcagcaagaacaccctggacctccagatgaacagcctgagagccgaggataccgccgtgtactactgcgccagacggtactggtctaagagccacgccagcgtgaccgactatagaggccagggaacactggtcaccgtgtctagcggatccggcggaggcggaagtggaggcggaggatctttcgaacaactgcaactgcaagagtctggccctggcctggtcaagcctagcgaaacactgagcctgacctgtacagtgtctggcggctctgtgtccagcggcagctattactggggctggatcagacagcctcctggcaagggactcgaatggatcggccacatcagctactccggcagcacctactacaaccccagcctgaagtccagagtgaccatctccgtggacacctccagaaaccagttctccctgaagctgagcagcgtgacagccgccgatacagctgtgtattattgtgccagaggcagaggctacgccaccagcctggccttcgatattagaggacagggcacccttgtgacagtgtcctct

SEQ ID NO: 938 - DNA, 426 bp, Artificial Sequence
  Synthetic Polynucleotide
atggccttaccagtgaccgccttgctcctgccgctggccttgctgctccacgccgccaggccggaagtgcaactggttgaatctggcggcggactggttaagcctggcggatctctgaagctgagctgtgccgccagcggctacacctttaccagctacgtgatgggctgggtccgacgagcccctggcaaagaagaggagctgatcggctacatcaacccctacaacgatggcaccaagtacaacgagaagttccagggcagagtgaccatcagctccgacaagagcatcagcaccgcctacatggaactgagcagcctgagaagcgaggataccgccatgtactattgcgccagaggcacctactactacggcaccagagtgttcgactacagaggccagggaaccctggtcacagtctcttct

SEQ ID NO: 939 - DNA, 432 bp, Artificial Sequence
  Synthetic Polynucleotide
atggccttaccagtgaccgccttgctcctgccgctggccttgctgctccacgccgccaggccggaagtgcagctggttgagtctggcggcggacttgtgaaacctggcggaagcctgaagctgagctgtgccgcttctggcttcgccttcagcatctacgacatgggctgggtccgaagagcccctggcaaagaagaggagctggtcgcctacatcagctctggcggagggacaacctactatcccgacaccgtgaagggcagattcaccatcagccgggacaacgccaagaacaccctgtacctccagatgagcagcctgagagccgaggacaccgccatgtactactgtgccagacacagcggctacggcagctcttacggcgtgctgtttgcctatagaggccagggcacactggtcaccgttagctct

SEQ ID NO: 940 - DNA, 435 bp, Artificial Sequence
  Synthetic Polynucleotide
atggccttaccagtgaccgccttgctcctgccgctggccttgctgctccacgccgccaggccggaggtgcaactggttgagtctggcggaggactggtgcagcctggaagaagcctgagactgtcttgtgccgccagcggcttcaccttcgacgattatgccatgggctgggtccgaagagcccctggcaaagaagaggaactggtgtccggcatctcctggaacagcggctctatcggctacgccgattccgtgaagggcagattcaccatcagccgggacaacgccaagaacagcctgtacctccagatgaactccctgagagccgaggacacagccctgtactactgcgccaaagacaaaggcggaggctactacgacttttggagcggcagcgattatagaggccagggcacactggtcacagtgtctagc

SEQ ID NO: 941 - DNA, 426 bp, Artificial Sequence
  Synthetic Polynucleotide
atggccttaccagtgaccgccttgctcctgccgctggccttgctgctccacgccgccaggccggaggtgcagctggttgaatctggcggaggactggttcagcctggcggatctctgagactgtcttgtgccgccagcggcttcaccttcagcagctatgctatgggctgggttcgcagagcccctggcaaagaggaagaactggtcgccagcatcagcggcagcggcgactatatcagatacgccgacagcgtgaagggcagattcaccatcagcgccgacaccagcaagaacaccgcctacctccagatgaacagcctgagagccgaggacaccgccgtgtactactgtgccaaagaaggcaccggcgctaacagcagcctggccgattatagaggccagggcacactggtcaccgtgtctagt

SEQ ID NO: 942 - DNA, 426 bp, Artificial Sequence
  Synthetic Polynucleotide
atggccttaccagtgaccgccttgctcctgccgctggccttgctgctccacgccgccaggccggaggtgcagctggttgaatctggcggaggactggttcagcctggcggatctctgagactgtcttgtgccgccagcggcttcacctttagcagctacgccatgacctggttcagacaggcccctggcaaaggactggaatgggtcgcctctatcagcggcagcggcgactacatcagatacgaggatagcgtggaaggccggttcaccgtgtccagagacaacgccaagaacagcgtgtacctccagatgaacagcctgagagccgaggacaccgccgtgtactactgtgccaaagaaggcaccggcgctaacagcagcctggccgattattggggccagggcacaaccgtgacagtgtctagt

SEQ ID NO: 943 - DNA, 426 bp, Artificial Sequence
  Synthetic Polynucleotide
atggccttaccagtgaccgccttgctcctgccgctggccttgctgctccacgccgccaggccggaagtgcaactggttgaatctggcggcggactggttaagcctggcggatctctgaagctgagctgtgccgccagcggctacacctttaccagctactgtatgggctgggtccgacgagcccctggcaaagaagaggagctgatcggctacatctgcccctacaacgatggcaccaagtacaacgagaagttccagggcagagtgaccatcagctccgacaagagcatcagcaccgcctacatggaactgagcagcctgagaagcgaggataccgccatgtactattgcgccagaggcacctactactacggcaccagagtgttcgactacagaggccagggaaccctggtcacagtctcttct

SEQ ID NO: 944 - DNA, 828 bp, Artificial Sequence
  Synthetic Polynucleotide
atggccttaccagtgaccgccttgctcctgccgctggccttgctgctccacgccgccaggccggaggtgcagctggttgaatctggtggcggagttgtgcagcctggcagaagcctgagactgtcttgtgccgccagcggctacaccttcaccagctatgtgatgggctgggttcgcagagcccctggcaaagaggaagaactgatcggctacatcaacccctacaacgacggcacctactacgccgactctgtgaagggcagattcaccatcagccgggacaacagcaagaacaccctgtacctccagatgaacagcctgagagccgaggacaccgccgtgtactattgtgccagaggcacctattactacggcaccagagtgttcgactacagaggccagggcacaatggtcaccgtttctagcggatccggcggaggcggaagtggaggcggaggatctttcgaagttcagctggtggaaagtggcggaggcgttgtgcaacccggaagatcactgagactgagctgtgccgcttccggctatacctttacctcctacgtgatgcactgggtccgacaggctccaggcaaaggactggaatggatcggatatatcaatccgtacaatgatgggacgtactatgccgacagcgtgaaaggccggttcaccatctccagagacaactccaagaacacgctctatctgcaaatgaactctctgcgggccgaagatacagccgtgtattactgcgctcggggaacctactactatggcacacgggttttcgattactggggccagggaactatggttacagtgtccagc

SEQ ID NO: 945 - DNA, 426 bp, Artificial Sequence
  Synthetic Polynucleotide
atggccttaccagtgaccgccttgctcctgccgctggccttgctgctccacgccgccaggccggaggtgcagctggttgaatctggtggcggagttgtgcagcctggcagaagcctgagactgtcttgtgccgccagcggctacaccttcaccagctatgtgatgggctgggttcgcagagcccctggcaaagaggaagaactgatcggctacatcaacccctacaacgacggcacctactacgccgactctgtgaagggcagattcaccatcagccgggacaacagcaagaacaccctgtacctccagatgaacagcctgagagccgaggacaccgccgtgtactattgtgccagaggcacctattactacggcaccagagtgttcgactacagaggccagggcacaatggtcaccgtttctagc

SEQ ID NO: 946 - DNA, 363 bp, Artificial Sequence
  Synthetic Polynucleotide
gaagtgcaactggttgaatctggcggcggactggttaagcctggcggatctctgaagctgagctgtgccgccagcggctacacctttaccagctacgtgatgggctgggtccgacgagcccctggcaaagaagaggagctgatcggctacatcaacccctacaacgatggcaccaagtacaacgagaagttccagggcagagtgaccatcagctccgacaagagcatcagcaccgcctacatggaactgagcagcctgagaagcgaggataccgccatgtactattgcgccagaggcacctactactacggcaccagagtgttcgactacagaggccagggaaccctggtcacagtctcttct

SEQ ID NO: 947 - DNA, 369 bp, Artificial Sequence
  Synthetic Polynucleotide
gaagtgcagctggttgagtctggcggcggacttgtgaaacctggcggaagcctgaagctgagctgtgccgcttctggcttcgccttcagcatctacgacatgggctgggtccgaagagcccctggcaaagaagaggagctggtcgcctacatcagctctggcggagggacaacctactatcccgacaccgtgaagggcagattcaccatcagccgggacaacgccaagaacaccctgtacctccagatgagcagcctgagagccgaggacaccgccatgtactactgtgccagacacagcggctacggcagctcttacggcgtgctgtttgcctatagaggccagggcacactggtcaccgttagctct

SEQ ID NO: 948 - DNA, 372 bp, Artificial Sequence
  Synthetic Polynucleotide
gaggtgcaactggttgagtctggcggaggactggtgcagcctggaagaagcctgagactgtcttgtgccgccagcggcttcaccttcgacgattatgccatgggctgggtccgaagagcccctggcaaagaagaggaactggtgtccggcatctcctggaacagcggctctatcggctacgccgattccgtgaagggcagattcaccatcagccgggacaacgccaagaacagcctgtacctccagatgaactccctgagagccgaggacacagccctgtactactgcgccaaagacaaaggcggaggctactacgacttttggagcggcagcgattatagaggccagggcacactggtcacagtgtctagc

SEQ ID NO: 949 - DNA, 363 bp, Artificial Sequence
  Synthetic Polynucleotide
gaggtgcagctggttgaatctggcggaggactggttcagcctggcggatctctgagactgtcttgtgccgccagcggcttcaccttcagcagctatgctatgggctgggttcgcagagcccctggcaaagaggaagaactggtcgccagcatcagcggcagcggcgactatatcagatacgccgacagcgtgaagggcagattcaccatcagcgccgacaccagcaagaacaccgcctacctccagatgaacagcctgagagccgaggacaccgccgtgtactactgtgccaaagaaggcaccggcgctaacagcagcctggccgattatagaggccagggcacactggtcaccgtgtctagt

SEQ ID NO: 950 - DNA, 363 bp, Artificial Sequence
  Synthetic Polynucleotide
gaggtgcagctggttgaatctggcggaggactggttcagcctggcggatctctgagactgtcttgtgccgccagcggcttcacctttagcagctacgccatgacctggttcagacaggcccctggcaaaggactggaatgggtcgcctctatcagcggcagcggcgactacatcagatacgaggatagcgtggaaggccggttcaccgtgtccagagacaacgccaagaacagcgtgtacctccagatgaacagcctgagagccgaggacaccgccgtgtactactgtgccaaagaaggcaccggcgctaacagcagcctggccgattattggggccagggcacaaccgtgacagtgtctagt

SEQ ID NO: 951 - DNA, 363 bp, Artificial Sequence
  Synthetic Polynucleotide
gaagtgcaactggttgaatctggcggcggactggttaagcctggcggatctctgaagctgagctgtgccgccagcggctacacctttaccagctactgtatgggctgggtccgacgagcccctggcaaagaagaggagctgatcggctacatctgcccctacaacgatggcaccaagtacaacgagaagttccagggcagagtgaccatcagctccgacaagagcatcagcaccgcctacatggaactgagcagcctgagaagcgaggataccgccatgtactattgcgccagaggcacctactactacggcaccagagtgttcgactacagaggccagggaaccctggtcacagtctcttct

SEQ ID NO: 952 - DNA, 363 bp, Artificial Sequence
  Synthetic Polynucleotide
gaggtgcagctggttgaatctggtggcggagttgtgcagcctggcagaagcctgagactgtcttgtgccgccagcggctacaccttcaccagctatgtgatgggctgggttcgcagagcccctggcaaagaggaagaactgatcggctacatcaacccctacaacgacggcacctactacgccgactctgtgaagggcagattcaccatcagccgggacaacagcaagaacaccctgtacctccagatgaacagcctgagagccgaggacaccgccgtgtactattgtgccagaggcacctattactacggcaccagagtgttcgactacagaggccagggcacaatggtcaccgtttctagc

SEQ ID NO: 953 - DNA, 363 bp, Artificial Sequence
  Synthetic Polynucleotide
gaagttcagctggtggaaagtggcggaggcgttgtgcaacccggaagatcactgagactgagctgtgccgcttccggctatacctttacctcctacgtgatgcactgggtccgacaggctccaggcaaaggactggaatggatcggatatatcaatccgtacaatgatgggacgtactatgccgacagcgtgaaaggccggttcaccatctccagagacaactccaagaacacgctctatctgcaaatgaactctctgcgggccgaagatacagccgtgtattactgcgctcggggaacctactactatggcacacgggttttcgattactggggccagggaactatggttacagtgtccagc

SEQ ID NO: 954 - DNA, 357 bp, Artificial Sequence; identical to SEQ ID NO: 850
  Synthetic Polynucleotide

SEQ ID NO: 955 - DNA, 357 bp, Artificial Sequence; identical to SEQ ID NO: 851
  Synthetic Polynucleotide

SEQ ID NO: 956 - DNA, 363 bp, Artificial Sequence
  Synthetic Polynucleotide
gaagttcagctggttgaatctggcggcggactggttcaacctggcggatctctgagactgagctgtgccgcctctggctacgcctttagcagctactgcgtcaactgggttcgacaggcccctggcaaagaagaggaatgggtcgcccaaatctgtcccggcgacggcgacaccaactacaacggcaagttcaagggcagattcaccatcagccgggacaacagcaagaacaccctgtacctccagatgaactccctgagagccgaggacaccgccgtgtactattgtgccagatccatcaccaccgtcgtgggctgcgcttacgattattggggccagggaaccctggtcaccgtgtcctct

SEQ ID NO: 957 - DNA, 357 bp, Artificial Sequence
  Synthetic Polynucleotide
gaagtgcaactggtggaatcaggcggcggactggtgcagcctggcggatctctgagactgagctgtgccgccagcggcttcgacttcagccggtactgtatgagctgggtgcgccaggcccctggcaaagaagaggaatggatcggcgaaatctgccccgacagcagcaccatcaactacgcccccagcctgaaggacaagttcatcatcagccgggacaacgccaagaacagcctgtacctccagatgaactccctgcgggccgaggacaccgccgtgtactattgcgccagacccgacggcaactactggtactacgacgtgtggggccagggaaccctcgtgaccgtgtcatct

SEQ ID NO: 958 - DNA, 360 bp, Artificial Sequence; identical to SEQ ID NO: 840
  Synthetic Polynucleotide

SEQ ID NO: 959 - DNA, 366 bp, Artificial Sequence
  Synthetic Polynucleotide
caactgcaactgcaagagtctggccctggcctggtcaagcctagcgaaacactgagcctgacctgtacagtgtctggcggctctgtgtccagcggcagctattactggggctggatcagacagcctcctggcaagggactcgaatggatcggccacatcagctactccggcagcacctactacaaccccagcctgaagtccagagtgaccatctccgtggacacctccagaaaccagttctccctgaagctgagcagcgtgacagccgccgatacagctgtgtattattgtgccagaggcagaggctacgccaccagcctggccttcgatattagaggacagggcacccttgtgacagtgtcctct

SEQ ID NO: 960 - DNA, 33 bp, Artificial Sequence; identical to SEQ ID NO: 903
  Synthetic Polynucleotide
  misc_feature (30)..(33): n is a, c, g, or t

SEQ ID NO: 961 - DNA, 405 bp, Artificial Sequence
  Synthetic Polynucleotide
atggcctgtcctggcttcctgtgggctcttgtgatctccacctgtcttgagttcagcatggcccagaccgtgacacagagccagcctgagatgtctgtgcaagaggccgagacagtgaccctgagctgcacctacgataccagcgagagcgactactacctgttctggtacaagcagcctcctagccggcagatgatcctggtcatccggcaagaagcctataagcagcagaacgccaccgagaacagattcagcgtgaacttccagaaggccgccaagagcttcagcctgaagatcagcgatagccagctgggcgacgccgccatgtacttttgcgcttatagaagcgccgtgaacgcccggctgatgtttggagatggcacacagctggtggtcaagcccaac

SEQ ID NO: 962 - DNA, 411 bp, Artificial Sequence
  Synthetic Polynucleotide
atgaccatccggctgctgtgctatatgggcttctacttcctcggagccggcctgatggaagccgacatctaccagacacctagatacctggtcatcggcaccggcaagaaaatcaccctggaatgcagccagacaatgggccacgacaagatgtactggtatcagcaggaccccggcatggaactgcacctgatccactacagctacggcgtgaacagcaccgagaagggcgatctgtctagcgagagcaccgtgtccagaatcagaaccgagcacttcccactgacactggaaagcgccagacctagccacaccagccagtacctgtgtgcctcttctgaggccagaggactggccgagttcaccgacacacagtatttcggccctggcaccagactgaccgttctcgag

SEQ ID NO: 963 - DNA, 345 bp, Artificial Sequence
  Synthetic Polynucleotide
gcccagaccgtgacacagagccagcctgagatgtctgtgcaagaggccgagacagtgaccctgagctgcacctacgataccagcgagagcgactactacctgttctggtacaagcagcctcctagccggcagatgatcctggtcatccggcaagaagcctataagcagcagaacgccaccgagaacagattcagcgtgaacttccagaaggccgccaagagcttcagcctgaagatcagcgatagccagctgggcgacgccgccatgtacttttgcgcttatagaagcgccgtgaacgcccggctgatgtttggagatggcacacagctggtggtcaagcccaac

SEQ ID NO: 964 - DNA, 354 bp, Artificial Sequence
  Synthetic Polynucleotide
gaagccgacatctaccagacacctagatacctggtcatcggcaccggcaagaaaatcaccctggaatgcagccagacaatgggccacgacaagatgtactggtatcagcaggaccccggcatggaactgcacctgatccactacagctacggcgtgaacagcaccgagaagggcgatctgtctagcgagagcaccgtgtccagaatcagaaccgagcacttcccactgacactggaaagcgccagacctagccacaccagccagtacctgtgtgcctcttctgaggccagaggactggccgagttcaccgacacacagtatttcggccctggcaccagactgaccgttctcgag

SEQ ID NO: 965 - DNA, 342 bp, Artificial Sequence
  Synthetic Polynucleotide
caagaagtgacacagatccctgccgctctgtctgtgcctgagggcgaaaacctggtgctgaactgctccttcaccgacagcgccatctacaacctccagtggttcaggcaggaccctggaaagggactgacaagcctgctgctgatccagagcagccagagagagcagacctccggcagactgaatgccagcctggataagagcagcggcaggtctaccctgtatatcgccgcttctcagcctggcgatagcgccacatatctgtgtgctgtgcggcctacaagcggcggcagctacatccctacatttggcagaggcaccagcctgatcgtgcacccttat

SEQ ID NO: 966 - DNA, 342 bp, Artificial Sequence
  Synthetic Polynucleotide
aatgctggcgtgacccagacacctaagttccaggtgctgaaaaccggccagagcatgaccctgcaatgcgcccaggacatgaaccatgagtacatgagctggtacagacaggaccccggcatgggcctgagactgatccactactctgtggctatccagaccaccgaccagggcgaagtgcccaatggctacaacgtgtccagaagcaccatcgaggacttcccactgagactgctgtctgccgctcctagccagaccagcgtgtacttttgtgccagcagctacctgggcaacaccggcgagctgttttttggcgagggcagcagactgaccgtgctcgag

SEQ ID NO: 967 - DNA, 332 bp, Artificial Sequence
  Synthetic Polynucleotide
atcctgaacgtggaacagagccctcagagcctgcatgtgcaagagggcgacagcaccaacttcacctgtagcttccccagcagcaacttctacgccctgcactggtacagatgggagacagccaagtctcccgaggcactgttcgtgatgaccctgaacggcgacgagaagaagaagggcagaatcagcgccacactgaacaccaaagagggctactcctacctgtacatcaagggcagccagcctgaggacagcgccacttatctgtgcgccagaaacaccggcaaccagttctactttggcaccggcacaagcctgacagtgatccccaa

SEQ ID NO: 968 - DNA, 339 bp, Artificial Sequence
  Synthetic Polynucleotide
ggcgtgacccagacacctaagttccaggtgctgaaaaccggccagagcatgaccctgcaatgcgcccaggacatgaaccatgagtacatgagctggtacaggcaggaccctggcatgggcctgagactgatccactattctgtcggagccggcatcaccgaccagggcgaagttcctaatggctacaacgtgtccagaagcaccaccgaggacttcccactgagactgctgtctgccgctcctagccagaccagcgtgtacttttgcgccagcagctttcagaccggcgcttcctacggctacacattcggctctggcaccagactgaccgtgctcgag

SEQ ID NO: 969 - DNA, 360 bp, Artificial Sequence
  Synthetic Polynucleotide
gccattgagctggtgcctgagcaccagaccgtgcctgtgtctattggagtgcccgccacactgcggtgtagcatgaagggcgaagccatcggcaactactacatcaactggtacagaaagacccagggcaacaccatgaccttcatctacagagagaaggacatctacggccctggcttcaaggacaacttccagggcgacatcgacattgccaagaacctggccgtgctgaagattctggcccctagcgagagagatgagggcagctactactgcgcctgtgacacacttggaatgggcggcgagtacaccgacaagctgatcttcggcaagggcaccagagtgaccgtggaacctaga

SEQ ID NO: 970 - DNA, 378 bp, Artificial Sequence
  Synthetic Polynucleotide
gctggacatctggaacagccccagatcagcagcaccaagacactgagcaagaccgccagactggaatgcgtggtgtccggcatcacaatcagcgccacaagcgtgtactggtacagagaaagacccggcgaagtgatccagttcctggtgtccatcagctacgatggcaccgtgcggaaagagagcggcatcccttctggcaagttcgaggtggacagaatccccgagacaagcaccagcacactgaccatccacaacgtggaaaagcaggacattgccacctactactgcgccctgtgggaagcccaacaagagctgggcaagaaaatcaaggtgttcggccctggcaccaagctgattatcaccgacaagcagctg

SEQ ID NO: 971 - DNA, 33 bp, Artificial Sequence; identical to SEQ ID NO: 903
  Synthetic Polynucleotide
  misc_feature (30)..(33): n is a, c, g, or t

SEQ ID NO: 972 - DNA, 372 bp, Artificial Sequence
  Synthetic Polynucleotide
ggctctgacctgggcatcaagctgctgttcgccgctgccaagggccaggacgacgaagtgcggattctgctggctgctggggccgacgtgaacgccaaggatttcgagggctacacccccctgcacgtggccgcctatgatggacacctggaaatcgtggaagtgctgctgaaggctggcgctgatgtgaatgccaaagacagccagggccggacccctctgcatgaagccgcctacagcggccatctggaaattgtggaagtgctgctgaaagccggggcagacgtgaacgctcaggacgacgctggcgagacaccagccgatctggctgcagcttggggccacgaagatatcgccgaggtgctgcagaag

SEQ ID NO: 973 - DNA, 378 bp, Artificial Sequence
  Synthetic Polynucleotide
agaagcgatctgggaaagaagctgctggaagctgccagagccggacaggatgatgaagtgcgcatcctgatggcaaacggcgcagatgtgaacgcaaaggacgagtacggcctgacccccctgtacctggctacagcccacgggcacctggaaattgtggaagtgctgctgaagaacggcgctgacgtgaacgccgtggacgccatcggctttaccccactgcatctggccgctttcatcgggcatctcgaaatcgcagaggtgctgctgaaacacggggccgatgtgaatgcccaggacaagttcggcaagaccgccttcgacatcagcatcggcaacggcaacgaggacctggccgagatcctgcagaaactgaac

SEQ ID NO: 974 - DNA, 174 bp, Artificial Sequence
  Synthetic Polynucleotide
gtggacaacaagttcaacaaagagcggtacagcgcctactacgagatttggcaactgcccaacctgaacgtgcggcagaaggccgccttcatcggatctctgcaggacgaccctagccagagcgccaatctgctggccgaggccaagaagctgaacgacgcccaggcccctaaa

SEQ ID NO: 975 - DNA, 153 bp, Artificial Sequence
  Synthetic Polynucleotide
tacgccaaagagatgcggaacgcctactgggagatcgccctgctgcccaatctgaccaaccagcagaagagagcccccatcagaaagctgtacgacgacccctcccagagcagcgagctgctgtctgaggctaaaaaactgaacgatagccag

SEQ ID NO: 976 - DNA, 153 bp, Artificial Sequence
  Synthetic Polynucleotide
tatgccaaagaaatgtggattgcctgggaggaaatccgcaacctgcctaatctgaatggctggcagatgaccgcctttatcgctaagctgctggatgaccccagccagtcctctgagctgctgagcgaagcaaagaaactgaatgactcccag

SEQ ID NO: 977 - DNA, 267 bp, Artificial Sequence
  Synthetic Polynucleotide
ctgccagccccgaagaatttggtcgtttcccgtgtcactgaggactctgcacgtctgagctggaccgcaccggacgcggcgttcgacagctttgcaatcggctactgggagtgggatgatgacggcgaggccattgtgctgaccgttccgggtagcgagcgcagctacgatctgaccggtctgaagccgggtacggaatatccggtgtatattgcgggcgtgaagggtggccagtggagcttcccgctgagcgcgatctttaccacc

SEQ ID NO: 978 - DNA, 273 bp, Artificial Sequence
  Synthetic Polynucleotide
ctgccggctccgaaaaacctggtcgtttcccgtgtcactgaagattctgcacgcttgagctgggcgatcgacgagcagcgtgactggtttgagagcttcctgattcagtatcaagaatcggaaaaagttggcgaggccatcgtgctgaccgttccgggtagcgagcgcagctatgatctgacgggtctgaagccaggcaccgagtatacggtgagcatttacggtgtctaccatgtgtaccgtagcaatccgctgagcgcgatcttcaccacc

SEQ ID NO: 979 - DNA, 267 bp, Artificial Sequence
  Synthetic Polynucleotide
ctgccagccccgaaaaacttagttgtctcccgcgtgaccgaagattctgctcgtctgagctggactgcaccggacgcggcgttcgacagctttccgattggctactgggagtgggatgatgacggtgaagcgatcgtgctgaccgttccgggtagcgagcgtagctatgacctgacgggtttgaaacctggtaccgagtatcacgtttacattgcgggcgtcaagggtggccagtggtcgttcccgctgagcgcaatctttacgacc

SEQ ID NO: 980 - DNA, 282 bp, Artificial Sequence
  Synthetic Polynucleotide
ctgcccgctcctaagaatctggtggtgtccgaagtgaccgaggacagcgctagactgagctgggatgatccctgggccttctacgagagcttcctgatccagtaccaagagagcgagaaagtcggcgaggccatcgtgcttacagtgcctggaagcgagagaagctacgacctgacaggcctgaagcctggcaccgagtacaccgtgtctatctacggcgtgcacaacgtgtacaaggacaccaacatgcggggcctgcctctgagcgccatctttacaaca

SEQ ID NO: 981 - DNA, 267 bp, Artificial Sequence
  Synthetic Polynucleotide
ttgcctgctccaaaaaacctggtcgtcagcagagtgacagaggactccgccagactgtcttggacagcccctgatgccgccttcgacagcttctggatcagatacttcgagttcctcggcagcggagaagccattgtgctgaccgttccaggcagcgagagatcctatgatctgaccggactgaagcccggaacagagtatgtggtcaacatcatgggcgtgaaaggcggcaagatcagccctcctctgtccgccattttcaccacc

SEQ ID NO: 982 - DNA, 579 bp, Artificial Sequence
  Synthetic Polynucleotide
ctgcccgctcctaagaatctggtggtgtccgaagtgaccgaggacagcgctagactgagctgggatgatccctgggccttctacgagagcttcctgatccagtaccaagagagcgagaaagtcggcgaggccatcgtgcttacagtgcctggaagcgagagaagctacgacctgacaggcctgaagcctggcaccgagtacaccgtgtctatctacggcgtgcacaacgtgtacaaggacaccaacatgcggggcctgcctctgagcgccatctttacaacagctcccgctcctgctccagcaccagctccattgcctgctccaaaaaacctggtcgtcagcagagtgacagaggactccgccagactgtcttggacagcccctgatgccgccttcgacagcttctggatcagatacttcgagttcctcggcagcggagaagccattgtgctgaccgttccaggcagcgagagatcctatgatctgaccggactgaagcccggaacagagtatgtggtcaacatcatgggcgtgaaaggcggcaagatcagccctcctctgtccgccattttcaccacc

SEQ ID NO: 983 - DNA, 270 bp, Artificial Sequence
  Synthetic Polynucleotide
atgctgcccgctcctaagaatctggtggtgtccagaatcaccgaggacagcgccagactgtcttggacagctcctgatgccgccttcgacagcttccccatccggtacatcgagacactgatctggggcgaagccatctggctggatgtgcctggaagcgagagaagctacgacctgaccggactgaagcctggcacagagtatgccgtggtcatcaccggcgtgaaaggcggcagattctctagccctctggtggcctctttcaccacc

SEQ ID NO: 984 - DNA, 1791 bp, Artificial Sequence
  Synthetic Polynucleotide
agtactatcgaggaacaggcgaaaacattcctggataagtttaaccatgaagccgaagacttgttttatcaaagcagccttgcatcctggaactacaacactaatataacagaagagaacgtacaaaacatgaataatgcaggcgataagtggagtgcgtttcttaaagaacagtctacactcgcccaaatgtaccccttgcaagagattcagaatctgactgtcaaacttcagctgcaggcacttcaacaaaacggctcctctgtattgagtgaggataaaagtaaaagactcaacactatcctgaacacaatgtctacgatctacagcaccgggaaggtctgtaatcctgataaccctcaagagtgtctcctcctggagcctggtcttaatgaaataatggccaatagtttggattataacgagaggttgtgggcttgggagtcatggaggagcgaagtaggcaaacagttgcgacccctctacgaggagtacgttgttttgaagaacgaaatggctcgggccaaccattacgaggactatggtgattattggcggggggattacgaggtcaacggtgttgacggttacgattacagtcgggggcaactgattgaagatgtcgaacatacgttcgaggaaatcaagccattgtatgaacatcttcacgcctacgtccgcgcgaagctgatgaatgcatacccatcctatattagcccgataggatgcttgcccgcccatctgctgggcgacatgtgggggcgattttggactaacctgtatagtctgactgttcccttcggacagaaacctaacattgatgtgacagatgcaatggtggatcaagcatgggacgcacaaaggatctttaaagaggctgaaaagtttttcgtcagcgtggggttgccgaacatgacccaggggttctgggagaactcaatgttgaccgaccccgggaacgtccagaaggctgtatgccatccaactgcctgggacttgggtaagggtgatttccgcatactcatgtgtactaaagtcactatggacgattttctcactgcgcatcacgagatgggccacattcagtatgacatggcatacgcagcgcaaccttttctccttcggaacggggctaatgaagggttccatgaagcagtaggggaaatcatgtctctcagcgctgccacccccaagcacctgaagagtattggactcttgagtccggacttccaagaggataatgaaaccgaaatcaattttcttctcaaacaagccctgactatcgttggaacactgccctttacttatatgctggagaaatggcgatggatggtgttcaagggggaaatacccaaagatcaatggatgaagaaatggtgggaaatgaagcgagaaatagtaggagtagttgagccggttccgcatgatgagacgtattgtgatcccgcttcactctttcacgtctccaatgattactcattcataagatattacacgcggacactttatcagtttcagttccaagaggctctctgccaggcagctaaacatgaggggcctctccataagtgcgatatctccaacagtactgaggccggtcagaagcttttcaacatgctgaggctcggaaagtctgagccgtggacgctggctctcgaaaacgtggtaggtgcaaagaacatgaatgtgcggcccctcttgaactactttgagcctctctttacctggctcaaagatcaaaacaagaactcattcgtaggatggagtacagattggagtccgtacgcagac

SEQ ID NO: 985 - DNA, 807 bp, Artificial Sequence
  Synthetic Polynucleotide
gaacctctagtggtgaaggtggaagagggagataacgctgtgctgcagtgcctcaaggggacctcagatggccccactcagcagctgacctggtctcgggagtccccgcttaaacccttcttaaaactcagcctggggctgccaggcctgggaatccacatgaggcccctggccatctggcttttcatcttcaacgtctctcaacagatggggggcttctacctgtgccagccggggcccccctctgagaaggcctggcagcctggctggacagtcaatgtggagggcagcggggagctgttccggtggaatgtttcggacctaggtggcctgggctgtggcctgaagaacaggtcctcagagggccccagctccccttccgggaagctcatgagccccaagctgtatgtgtgggccaaagaccgccctgaaatctgggagggagagcctccgtgtctcccaccgagggacagcctgaaccagagcctcagccaggacctcaccatggcccctggctccacactctggctgtcctgtggggtaccccctgactctgtgtccaggggccccctctcctggacccatgtgcaccccaaggggcctaagtcattgctgagcctagagctgaaggacgatcgcccggccagagatatgtgggtaatggagacgggtctgttgttgccccgggccacagctcaagacgctggaaagtattattgtcaccgtggcaacctgaccatgtcattccacctcgagatcactgctcggccagtactatggcactggctgctgaggactggtggctgg

SEQ ID NO: 986 - DNA, 1470 bp, Artificial Sequence
  Synthetic Polynucleotide
atgccctcctgggccctcttcatggtcacctcctgcctcctcctggcccctcaaaacctggcccaagtcagcagccaagatgtctccttgctggcatcagactcagagcccctgaagtgtttctcccgaacatttgaggacctcacttgcttctgggatgaggaagaggcagcgcccagtgggacataccagctgctgtatgcctacccgcgggagaagccccgtgcttgccccctgagttcccagagcatgccccactttggaacccgatacgtgtgccagtttccagaccaggaggaagtgcgtctcttctttccgctgcacctctgggtgaagaatgtgttcctaaaccagactcggactcagcgagtcctctttgtggacagtgtaggcctgccggctccccccagtatcatcaaggccatgggtgggagccagccaggggaacttcagatcagctgggaggagccagctccagaaatcagtgatttcctgaggtacgaactccgctatggccccagagatcccaagaactccactggtcccacggtcatacagctgattgccacagaaacctgctgccctgctctgcagaggcctcactcagcctctgctctggaccagtctccatgtgctcagcccacaatgccctggcaagatggaccaaagcagacctccccaagtagagaagcttcagctctgacagcagagggtggaagctgcctcatctcaggactccagcctggcaactcctactggctgcagctgcgcagcgaacctgatgggatctccctcggtggctcctggggatcctggtccctccctgtgactgtggacctgcctggagatgcagtggcacttggactgcaatgctttaccttggacctgaagaatgttacctgtcaatggcagcaacaggaccatgctagctcccaaggcttcttctaccacagcagggcacggtgctgccccagagacaggtaccccatctgggagaactgcgaagaggaagagaaaacaaatccaggactacagaccccacagttctctcgctgccacttcaagtcacgaaatgacagcattattcacatccttgtggaggtgaccacagccccgggtactgttcacagctacctgggctcccctttctggatccaccaggctgtgcgcctccccaccccaaacttgcactggagggagatctccagtgggcatctggaattggagtggcagcacccatcgtcctgggcagcccaagagacctgttatcaactccgatacacaggagaaggccatcaggactggaaggtgctggagccgcctctcggggcccgaggagggaccctggagctgcgcccgcgatctcgctaccgtttacagctgcgcgccaggctcaacggccccacctaccaaggtccctggagctcgtggtcggacccaactagggtggagaccgccaccgagaccgcc

SEQ ID NO: 987 - DNA, 501 bp, Artificial Sequence
  Synthetic Polynucleotide
atggccttaccagtgaccgccttgctcctgccgctggccttgctgctccacgccgccaggccgggctggtttctggacagccctgacagaccctggaatcctccaacattcagccccgctctgctggtggttaccgagggcgataatgccaccttcacctgtagcttcagcaacaccagcgagagcttcgtgctgaactggtacagaatgagccccagcaaccagaccgacaagctggccgcctttcctgaggatagaagccagcctggacaggactgccggttcagagttacccagctgcctaacggcagagacttccacatgagcgttgtgcgggccagaagaaacgacagcggcacatatctgtgcggagccatctctctggcccctaaggctcagatcaaagagagcctgagagccgagctgagagtgacagaaagacgggccgaagtgcccacagctcacccttcaccttctccaagacctgccggccagttccag

SEQ ID NO: 988 - DNA, 438 bp, Artificial Sequence
  Synthetic Polynucleotide
ggctggtttctggacagccctgacagaccctggaatcctccaacattcagccccgctctgctggtggttaccgagggcgataatgccaccttcacctgtagcttcagcaacaccagcgagagcttcgtgctgaactggtacagaatgagccccagcaaccagaccgacaagctggccgcctttcctgaggatagaagccagcctggacaggactgccggttcagagttacccagctgcctaacggcagagacttccacatgagcgttgtgcgggccagaagaaacgacagcggcacatatctgtgcggagccatctctctggcccctaaggctcagatcaaagagagcctgagagccgagctgagagtgacagaaagacgggccgaagtgcccacagctcacccttcaccttctccaagacctgccggccagttccag

SEQ ID NO: 989 - DNA, 501 bp, Artificial Sequence
  Synthetic Polynucleotide
atgcagatcccacaggcgccctggccagtcgtctgggcggtgctacaactgggctggcggccaggatggttcttagactccccagacaggccctggaacccccccaccttctccccagccctgctcgtggtgaccgaaggggacaacgccaccttcacctgcagcttctccaacacatcggagagcttcgtgctaaactggtaccgcatgagccccagcaaccagacggacaagctggccgccttccccgaggaccgcagccagcccggccaggactgccgcttccgtgtcacacaactgcccaacgggcgtgacttccacatgagcgtggtcagggcccggcgcaatgacagcggcacctacctctgtggggccatctccctggcccccaaggcgcagatcaaagagagcctgcgggcagagctcagggtgacagagagaagggcagaagtgcccacagcccaccccagcccctcacccaggccagccggccagttccaa

SEQ ID NO: 990 - DNA, 486 bp, Artificial Sequence
  Synthetic Polynucleotide
atggcctgtctgggcttccagagacacaaggcccagctcaacctggctaccagaacctggccttgtactctgctgttcttcctgctgttcatccccgtgttctgcaaggccatgcatgtggctcagcctgctgtggtgctggcctctagtagaggaatcgccagcttcgtgtgcgagtacgcctctcctggaaaggccactgaagtgcgcgtgaccgttctgagacaggccgatagccaagtgaccgaagtgtgcgccgccacctacatgatgggcaacgagctgaccttcctggacgacagcatctgtaccggcaccagcagcggcaatcaagtgaacctgaccatccagggcctgagagctatggacaccggcctgtacatctgcaaggtggaactgatgtaccctcctccttactacctcggcatcggcaacggcacccaaatctacgtgatcgaccccgagccttgtcctgacagcgatttc

SEQ ID NO: 991 - DNA, 405 bp, Artificial Sequence
  Synthetic Polynucleotide
ctgttcaaccaggaagtgcagatccccctgaccgagagctactgcggcccctgccccaagaactggatctgctacaagaacaactgctaccagttcttcgacgagagcaagaattggtacgagagccaggcttcctgcatgagccagaacgccagcctgctgaaggtgtacagcaaagaggaccaggatctgctgaagctggtcaagagctaccactggatgggcctggtgcacatccccaccaacggctcttggcagtgggaggacggcagcatcctgagccccaacctgctgaccatcatcgagatgcagaagggcgactgcgccctgtacgccagcagcttcaagggctacatcgagaactgctccacccccaacacctacatctgtatgcagcggaccgtg

SEQ ID NO: 992 - DNA, 624 bp, Artificial Sequence
  Synthetic Polynucleotide
atggttaggggcgttccattcagacatctgcttctggtcttgcagcttgcactcttgcccgctgccacccagggcaaaaaagtggtgctgggcaagaaaggcgacaccgtggaactgacctgcaccgccagccagaagaagtccatccagttccactggaagaacagcaaccagatcaagatcctgggcaaccagggcagcttcctgaccaagggacccagcaagctgaacgacagagccgacagcagacggtccctgtgggaccagggcaatttcccactgattatcaagaacctgaagatcgaggacagcgacacctacatctgcgaggtggaagatcagaaagaagaggtgcaactgctggtgttcggcctgaccgccaactccgacacccatctgctccagggccagagcctgaccctgacactggaaagccctccaggcagctcccccagcgtgcagtgtagaagcccacgaggcaagaacatccagggaggcaaaacattgtcagtgtcccaactggaactccaggactccggcacctggacctgtaccgtgctccagaaccagaaaaaggtggagttcaagatcgacatcgtggtgctggccttccagaaagcctct

SEQ ID NO: 993 - DNA, 501 bp, Artificial Sequence
  Synthetic Polynucleotide
atctaccaggaactgacacaactgaaggccgccgtggaacggctgtgccacccttgtccttgggagtggaccttctttcagggcaactgctacttcatgagcaacagccagcggaactggcacgacagcatcaccgcctgcaaagaagtgggagcccaactggtcgtgattaagagcgccgaggaacagaacttcctccaactccagagcagcagaagcaacagattcacctggatgggcctgagcgacctgaaccaggaaggcacctggcagtgggtggacggatctcctctgctgcccagcttcaagcagtattggaaccggggcgagcccaacaacgtgggcgaagaggattgcgccgagttcagcggcaacggctggaacgacgacaagtgcaacctggctaagttctggatctgcaagaagtccgccgcctcctgtagccgggatgaggaacagttcctgagccctgcccctgccacccctaatcctccaccagct

SEQ ID NO: 994 - DNA, 576 bp, Artificial Sequence
  Synthetic Polynucleotide
ggcatgcggactgaagacctcccaaaggctgtggtgttcctggagcctcaatggtacagggtgctggagaaggacagtgtgactctgaagtgccagggagcctactcccctgaggacaattccacacagtggtttcacaatgagagcctcatctcaagccaggcctccagctacttcattgacgctgccacagtggacgacagtggagagtacaggtgccagacaaacctctccaccctcagtgacccggtgcagctagaagtccatatcggctggctgttgctccaggcccctcggtgggtgttcaaggaggaagaccctattcacctgaggtgtcacagctggaagaacactgctctgcataaggtcacatatttacagaatggcaaaggcaggaagtattttcatcataattctgacttctacattccaaaagccacactcaaagacagcggctcctacttctgcagggggcttgttgggagtaaaaatgtgtcttcagagactgtgaacatcaccatcactcaaggtttggcagtgtcaaccatctcatcattctttccacctggctaccaa

SEQ ID NO: 995 - DNA, 576 bp, Artificial Sequence
  Synthetic Polynucleotide
ggcatgagaaccgaggacctgcctaaggccgtggtgttcctggaaccccagtggtacagagtgctggaaaaggacagcgtgaccctgaagtgccagggcgcctacagccccgaggacaatagcacccagtggttccacaacgagagcctgatctccagccaggccagcagctacttcatcgacgccgccaccgtggacgacagcggcgagtatagatgccagaccaacctgagcaccctgagcgaccccgtgcagctggaagtgcacatcggatggctgctgctgcaggcccccagatgggtgttcaaagaagaggaccccatccacctgagatgccactcttggaagaacaccgccctgcacaaagtgacctacctgcagaacggcaagggcagaaagtacttccaccacaacagcgacttctacatccccaaggccaccctgaaggactccggctcctacttctgcagaggcctcgtgggcagcaagaacgtgtccagcgagacagtgaacatcaccatcacccagggcctggccgtgtctaccatcagcagctttttcccacccggctaccag

SEQ ID NO: 996 - DNA, 822 bp, Artificial Sequence
  Synthetic Polynucleotide
gccagaaagagaacccagcccaccttcggcttcaccgtgaactggaagttcagcgagagcaccaccgtgttcaccggccagtgcttcatcgaccggaacggcaaagaggtgctgaaaaccatgtggctgctgcggagcagcgtgaacgacatcggcgacgactggaaggccaccagagtgggcatcaacatcttcacccggctgcggacacagaaagagggcggctctggcggaagcgccagaaagtgtagcctgaccggcaagtggaccaacgacctgggcagcaacatgaccatcggagccgtgaacagcagaggcgagtttaccggcacctacatcaccgccgtgaccgccaccagcaacgagatcaaagagagccccctgcacggcacccagaacaccatcaacaagagcggcggcagcacaacagtgtttacaggacagtgctttattgaccgcaatgggaaagaagtgctgaaaacaatgtggctgctgaggtcctccgtgaatgacattggagatgattggaaagctacaagagtggggattaacatttttaccagactgaggacccagaaagaagggggcagcggaggctccgccagaaaatgctctctgacagggaagtggacaaatgatctggggtccaatatgacaatcggcgctgtgaactctcggggcgagttcactggaacatatattacagccgtgacagctacctctaacgaaatcaaagagtctcctctgcacgggacacagaataccattaacaaacggacccagcctacatttgggtttacagtgaattggaaattctccgag

SEQ ID NO: 997 - DNA, 1698 bp, Artificial Sequence
  Synthetic Polynucleotide
gagtgggtcaagttcgccaagccttgcagagaaggcgaggacaacagcaagcggaaccctatcgccaagatcaccagcgactaccaggccacacagaagatcacctaccggatctctggcgtgggcatcgaccagcctccattcggcatcttcgtggtggacaagaacaccggcgacatcaacatcaccgccatcgtggacagagaggaaacccctagcttcctgattacctgtagagccctgaacgcccagggcctcgatgtggaaaagcctctgatcctgaccgtgaagatcctggacatcaacgacaaccctccagtgttcagccagcagattttcatgggcgagatcgaggaaaacagcgccagcaacagcctggtcatgatcctgaatgccaccgacgccgacgagcccaaccacctgaatagcaagatcgccttcaagatcgtgtcccaagagcctgccggcacacccatgtttctgctgtccagaaataccggcgaagtgcggaccctgaccaatagcctggatagagagcaggccagcagctacagactggtggtgtctggcgctgacaaggatggcgagggactgagcacccagtgcgagtgcaacatcaaagtgaaggacgtgaacgacaacttccccatgttccgggacagccagtatagcgcccggatcgaagagaacatcctgagcagcgagctgctgcggttccaagtgaccgacctggacgaagagtacaccgacaactggctggccgtgtacttcttcaccagcggcaacgaaggcaactggttcgagatccagacagaccccaggaccaacgagggcatcctgaaggttgtgaaggccctggactacgagcagctccagagcgtgaagctgtctatcgccgtgaagaacaaggccgagttccaccagtccgtgatctcccggtacagagtgcagagcacccctgtgaccatccaagtgattaacgtgcgcgagggcattgccttcagacccgccagcaagaccttcaccgtgcagaagggcatcagcagcaagaaactggtggactacatcctgggcacctatcaggccatcgacgaggacacaaacaaagccgcctccaacgtgaaatacgtgatgggcagaaacgacggcggctacctgatgatcgactccaagaccgccgagatcaagttcgtgaagaatatgaaccgggactccaccttcatcgtgaacaagaccatcacagccgaggtgctggctatcgacgagtataccggcaagaccagcaccggcacagtgtatgtgcgggtgcccgacttcaacgataactgccctacagccgtgctggaaaaggacgccgtgtgtagctctagccctagcgtggtcgtgtccgccagaacactgaacaacagatacacaggcccctacacattcgccctggaagatcagcctgtgaagctgcctgccgtgtggtccatcaccacactgaatgctacaagcgccctgctgagagcccaagagcaaattcctcctggcgtgtaccacatcagcctggtgctgacagacagccagaacaatagatgcgagatgcctcggagcctgacactggaagtgtgccagtgcgacaacagaggcatctgcggcacaagctaccccacaacaagccccggcacaagatacggcagacctcactctggaaga

SEQ ID NO: 998 - DNA, 468 bp, Artificial Sequence
  Synthetic Polynucleotide
atggccttaccagtgaccgccttgctcctgccgctggccttgctgctccacgccgccaggccgctgttcaatcaagaggtgcagatccctctgaccgagagctactgtggcccctgtcctaagaactggatctgctacaagaacaactgctaccagttcttcgacgagagcaagaattggtacgagagccaggccagctgcatgagccagaatgccagcctgctgaaggtgtacagcaaagaggaccaggacctgctgaaactggtcaagagctaccactggatgggccttgtgcacatccccaccaatggctcttggcagtgggaggacggcagcattctgagccctaacctgctgaccatcatcgagatgcagaagggcgactgcgccctgtacgccagcagctttaagggctacatcgagaattgcagcaccccgaacacctacatctgtatgcagagaaccgtt

SEQ ID NO: 999 - DNA, 921 bp, Artificial Sequence
  Synthetic Polynucleotide
atggccttaccagtgaccgccttgctcctgccgctggccttgctgctccacgccgccaggccgctgttcaatcaagaggtgcagatccctctgaccgagagctactgtggcccctgtcctaagaactggatctgctacaagaacaactgctaccagttcttcgacgagagcaagaattggtacgagagccaggccagctgcatgagccagaatgccagcctgctgaaggtgtacagcaaagaggaccaggacctgctgaaactggtcaagagctaccactggatgggccttgtgcacatccccaccaatggctcttggcagtgggaggacggcagcattctgagccctaacctgctgaccatcatcgagatgcagaagggcgactgcgccctgtacgccagcagctttaagggctacatcgagaattgcagcaccccgaacacctacatctgtatgcagagaaccgttggcggaggcggaagtggaggcggaggatctggcggcggaggctctgacctctttaatcaagaagtccagattccactcaccgaatcctactgcggaccttgtccaaaaaattggatttgttataagaacaactgttatcaattctttgatgagtctaaaaattggtatgagtcccaggcttcctgcatgtctcagaacgcttctctgctgaaagtctactctaaagaagatcaggatctcctgaagctcgtcaagtcttatcattggatggggctcgtccacattcctaccaacggaagctggcaatgggaagatggctccatcctgtctccaaatctgctcacgattattgaaatgcagaaaggggattgtgctctctacgccagctccttcaagggatatattgagaactgtagcacgcccaatacttatatctgtatgcaacggaccgtg

SEQ ID NO: 1000 - DNA, 405 bp, Artificial Sequence
  Synthetic Polynucleotide
ctgttcaatcaagaggtgcagatccctctgaccgagagctactgtggcccctgtcctaagaactggatctgctacaagaacaactgctaccagttcttcgacgagagcaagaattggtacgagagccaggccagctgcatgagccagaatgccagcctgctgaaggtgtacagcaaagaggaccaggacctgctgaaactggtcaagagctaccactggatgggccttgtgcacatccccaccaatggctcttggcagtgggaggacggcagcattctgagccctaacctgctgaccatcatcgagatgcagaagggcgactgcgccctgtacgccagcagctttaagggctacatcgagaattgcagcaccccgaacacctacatctgtatgcagagaaccgtt

SEQ ID NO: 1001 - DNA, 669 bp, Artificial Sequence
  Synthetic Polynucleotide
agagtgcagcctaccgagagcatcgtgcggttccccaacatcaccaatctgtgccctttcggcgaggtgttcaacgccaccagattcgcctctgtgtacgcctggaaccggaagcggatcagcaactgcgtggccgattacagcgtgctgtacaacagcgccagcttcagcaccttcaagtgctacggcgtgtcccctaccaagctgaacgacctgtgcttcaccaacgtgtacgccgacagcttcgtgatcagaggcgacgaagtgcggcagattgcccctggacagacaggcaagatcgccgactacaactacaagctgcccgacgacttcaccggctgtgtgattgcctggaacagcaacaacctggacagcaaagtcggcggcaactacaattacctgtaccggctgtttcggaagtccaacctgaagcctttcgagcgggacatcagcaccgaaatctaccaggccggcagcaccccttgcaatggcgtggaaggcttcaactgctacttcccactgcaaagctacggcttccagcctacaaacggcgtgggctaccagccttacagagtggtggtgctgagcttcgagctgctgcacgctcctgctacagtgtgcggccctaagaaaagcaccaacctggtcaagaacaaatgcgtgaacttc

SEQ ID NO: 1002 - DNA, 561 bp, Artificial Sequence
  Synthetic Polynucleotide
atggagctgactgaattgctcctcgtggtcatgcttctcctaactgcaaggctaacgctgtccagcccggctcctcctgcttgtgacctccgagtcctcagtaaactgcttcgtgactcccatgtccttcacagcagactgagccagtgcccagaggttcaccctttgcctacacctgtcctgctgcctgctgtggactttagcttgggagaatggaaaacccagatggaggagaccaaggcacaggacattctgggagcagtgacccttctgctggagggagtgatggcagcacggggacaactgggacccacttgcctctcatccctcctggggcagctttctggacaggtccgtctcctccttggggccctgcagagcctccttggaacccagcttcctccacagggcaggaccacagctcacaaggaccctaatgccatcttcctgagcttccaacacctgctccgaggaaaggtgcgtttcctgatgcttgtaggagggtccaccctctgcgtcaggcgggccccacccaccacagctgtccccagcagaacctct

SEQ ID NO: 1003 - DNA, 561 bp, Artificial Sequence
  Synthetic Polynucleotide
atggagctgactgatttgctcctggcggccatgcttcttgcagtggcaagactaactctgtccagccccgtagctcctgcctgtgaccccagactcctaaataaactgctgcgtgactcccacctccttcacagccgactgagtcagtgtcccgacgtggaccctttgtctatccctgttctgctgcctgctgtggactttagcctgggagaatggaaaacccagacggaacagagcaaggcacaggacattctaggggcagtgtcccttctactggagggagtgatggcagcacgaggacagttggaaccctcctgcctctcatccctcctgggacagctttctgggcaggttcgcctcctcttgggggccctgcagggcctcctaggaacccagcttcctctacagggcaggaccacagctcacaaggaccccaatgccctcttcttgagcttgcaacaactgcttcggggaaaggtgcgcttcctgcttctggtagaaggtcccaccctctgtgtcagacggaccctgccaaccacagctgtcccaagcagtacttct

SEQ ID NO: 1004 - DNA, 276 bp, Artificial Sequence
  Synthetic Polynucleotide
gctcctgatgtgcaggattgccctgagtgcaccctgcaagagaaccccttcttctcccaacctggcgctcctatcctccagtgcatgggctgctgcttcagccgggcttatcccacacctctgcggagcaagaaaaccatgctggtccagaaaaacgtgaccagcgagagcacctgttgtgtggctaagagctacaacagagtgaccgtgatgggcggcttcaaggtggaaaatcacaccgcctgccactgctccacctgttactaccacaagagc

SEQ ID NO: 1005 - DNA, 495 bp, Artificial Sequence
  Synthetic Polynucleotide
atggaaatgttccagggcctgctgctgctcctgctgctttctatgggaggcacatgggccagcagagagatgctgaggcccagatgcagacccatcaatgccacactggccgtggaaaaagagggctgccctgtctgcatcaccgtgaacaccacaatctgcgccggctactgccccaccatgacaagagttctgcaaggcgtgctgcccgctctgcctcaggtcgtgtgcaactatcgggacgtccgcttcgagagcatcagactgcctggatgtcccagaggcgtgaaccctgtggtgtcttatgccgtggctctgagctgtcagtgcgccctgtgtagaagaagcaccaccgattgcggcggacccaaggatcaccctctgacctgtgacgaccctagattccaggccagcagcagctctaaagcccctccaccttctctgccatctccaagcagactgcccggacctagcgacacacctattctgcctcaa

SEQ ID NO: 1006 - DNA, 333 bp, Artificial Sequence
  Synthetic Polynucleotide
aacagctgcgagctgaccaacatcacaatcgccatcgagaaagaggaatgccggttctgcatcagcatcaacaccacttggtgcgccggctactgctacacccgcgatctggtgtataaggaccccgccagacctaagatccagaaaacctgcaccttcaaagagctggtctacgagacagtcagagtgcctggatgtgcccaccacgccgatagcctgtacacataccctgtggctacccagtgccactgcggcaagtgtgatagcgacagcaccgattgcaccgtcagaggactgggacccagctactgtagcttcggcgagatgaaggaa

SEQ ID NO: 1007 - DNA, 423 bp, Artificial Sequence
  Synthetic Polynucleotide
atggaaatgctccagggcctgctgctgctcctgctgctttctatgggcggagcttgggccagcagagagcctcttagaccttggtgtcaccccatcaacgccatcctggccgtggaaaaagagggctgccctgtctgcatcaccgtgaacaccacaatctgcgccggctactgccccaccatgatgagagtgctgcaagccgttctgcctcctctgcctcaggtcgtgtgcacctatcgggacgtccgcttcgagagcatcagactgcctggatgtcctagaggcgtggaccccgtggtgtcttttcctgtggctctgtcctgtagatgcggcccctgtagaagaagcaccagcgattgcggcggacccaaggatcaccctctgacatgcgatcacccacagctgagcggcctgttgtttctt

SEQ ID NO: 1008 - DNA, 414 bp, Artificial Sequence
  Synthetic Polynucleotide
atgacagccctgttcctgatgtccatgctgttcggcctggcctgcggacaggccatgtctttctgtatccccaccgagtacaccatgcacatcgagagaagagagtgcgcctactgcctgaccatcaacaccacaatctgcgccggctactgcatgacacgggatattaacggcaagctgttcctgcctaagtacgccctgagccaggacgtgtgcacctaccgggacttcatctaccggaccgtggaaatccctggctgccctctgcatgtggccccttactttagctaccccgtggctctgagctgcaagtgcggcaagtgcaacaccgactacagcgactgtatccacgaggccatcaagaccaactactgcaccaagcctcagaaaagctacctcgtgggcttctctgtt

SEQ ID NO: 1009 - DNA, 816 bp, Artificial Sequence
  Synthetic Polynucleotide
atggaaatgttccagggcctgctgctgctcctgctgctttctatgggaggcacatgggccagcagagagatgctgaggcccagatgcagacccatcaatgccacactggccgtggaaaaagagggctgccctgtctgcatcaccgtgaacaccacaatctgcgccggctactgccccaccatgacaagagttctgcaaggcgtgctgcccgctctgcctcaggtcgtgtgcaactatcgggacgtccgcttcgagagcatcagactgcctggatgtcccagaggcgtgaaccctgtggtgtcttatgccgtggctctgagctgtcagtgcgccctgtgtagaagaagcaccaccgattgcggcggacccaaggatcaccctctgacctgtgacgaccctagattccaggccagcagcagctctaaagcccctccaccttctctgccatctccaagcagactgcccggacctagcgacacacctattctgcctcaaggcggaggcggaagtggaggcggaggatctggcggcggaggctctgctcctgatgtgcaggattgccctgagtgcaccctgcaagagaaccccttcttctcccaacctggcgctcctatcctccagtgcatgggctgctgcttcagccgggcttatcccacacctctgcggagcaagaaaaccatgctggtccagaaaaacgtgaccagcgagagcacctgttgtgtggctaagagctacaacagagtgaccgtgatgggcggcttcaaggtggaaaatcacaccgcctgccactgctccacctgttactaccacaagagc

SEQ ID NO: 1010 - DNA, 717 bp, Artificial Sequence
  Synthetic Polynucleotide
atggccttaccagtgaccgccttgctcctgccgctggccttgctgctccacgccgccaggccgaacagctgcgagctgaccaacatcacaatcgccatcgagaaagaggaatgccggttctgcatcagcatcaacaccacttggtgcgccggctactgctacacccgcgatctggtgtataaggaccccgccagacctaagatccagaaaacctgcaccttcaaagagctggtctacgagacagtcagagtgcctggatgtgcccaccacgccgatagcctgtacacataccctgtggctacccagtgccactgcggcaagtgtgatagcgacagcaccgattgcaccgtcagaggactgggacccagctactgtagcttcggcgagatgaaggaaggcggaggcggaagtggaggcggaggatctggcggcggaggctctgctcctgatgtgcaggattgccctgagtgcaccctgcaagagaaccccttcttctcccaacctggcgctcctatcctccagtgcatgggctgctgcttcagccgggcttatcccacacctctgcggagcaagaaaaccatgctggtccagaaaaacgtgaccagcgagagcacctgttgtgtggctaagagctacaacagagtgaccgtgatgggcggcttcaaggtggaaaatcacaccgcctgccactgctccacctgttactaccacaagagc

SEQ ID NO: 1011 - DNA, 744 bp, Artificial Sequence
  Synthetic Polynucleotide
atggaaatgctccagggcctgctgctgctcctgctgctttctatgggcggagcttgggccagcagagagcctcttagaccttggtgtcaccccatcaacgccatcctggccgtggaaaaagagggctgccctgtctgcatcaccgtgaacaccacaatctgcgccggctactgccccaccatgatgagagtgctgcaagccgttctgcctcctctgcctcaggtcgtgtgcacctatcgggacgtccgcttcgagagcatcagactgcctggatgtcctagaggcgtggaccccgtggtgtcttttcctgtggctctgtcctgtagatgcggcccctgtagaagaagcaccagcgattgcggcggacccaaggatcaccctctgacatgcgatcacccacagctgagcggcctgttgtttcttggcggaggcggaagtggaggcggaggatctggcggcggaggctctgctcctgatgtgcaggattgccctgagtgcaccctgcaagagaaccccttcttctcccaacctggcgctcctatcctccagtgcatgggctgctgcttcagccgggcttatcccacacctctgcggagcaagaaaaccatgctggtccagaaaaacgtgaccagcgagagcacctgttgtgtggctaagagctacaacagagtgaccgtgatgggcggcttcaaggtggaaaatcacaccgcctgccactgctccacctgttactaccacaagagc

SEQ ID NO: 1012 - DNA, 735 bp, Artificial Sequence
  Synthetic Polynucleotide
atgacagccctgttcctgatgtccatgctgttcggcctggcctgcggacaggccatgtctttctgtatccccaccgagtacaccatgcacatcgagagaagagagtgcgcctactgcctgaccatcaacaccacaatctgcgccggctactgcatgacacgggatattaacggcaagctgttcctgcctaagtacgccctgagccaggacgtgtgcacctaccgggacttcatctaccggaccgtggaaatccctggctgccctctgcatgtggccccttactttagctaccccgtggctctgagctgcaagtgcggcaagtgcaacaccgactacagcgactgtatccacgaggccatcaagaccaactactgcaccaagcctcagaaaagctacctcgtgggcttctctgttggcggaggcggaagtggaggcggaggatctggcggcggaggctctgctcctgatgtgcaggattgccctgagtgcaccctgcaagagaaccccttcttctcccaacctggcgctcctatcctccagtgcatgggctgctgcttcagccgggcttatcccacacctctgcggagcaagaaaaccatgctggtccagaaaaacgtgaccagcgagagcacctgttgtgtggctaagagctacaacagagtgaccgtgatgggcggcttcaaggtggaaaatcacaccgcctgccactgctccacctgttactaccacaagagc

SEQ ID NO: 1013 - DNA, 858 bp, Artificial Sequence
  Synthetic Polynucleotide
ctgttcaatcaagaggtgcagatccctctgaccgagagctactgtggcccctgtcctaagaactggatctgctacaagaacaactgctaccagttcttcgacgagagcaagaattggtacgagagccaggccagctgcatgagccagaatgccagcctgctgaaggtgtacagcaaagaggaccaggacctgctgaaactggtcaagagcgcccactggatgggccttgtgcacatccccaccaatggctcttggcagtgggaggacggcagcattctgagccctaacctgctgaccatcatcgagatgcagaagggcgactgcgccctgtacgccagcagctttaagggcttcatcgagaattgcagcaccccgaacacctacatctgtatgcagagaaccgttggcggaggcggaagtggaggcggaggatctggcggcggaggctctgacctctttaatcaagaagtccagattccactcaccgaatcctactgcggaccttgtccaaaaaattggatttgttataagaacaactgttatcaattctttgatgagtctaaaaattggtatgagtcccaggcttcctgcatgtctcagaacgcttctctgctgaaagtctactctaaagaagatcaggatctcctgaagctcgtcaagtctgcccattggatggggctcgtccacattcctaccaacggaagctggcaatgggaagatggctccatcctgtctccaaatctgctcacgattattgaaatgcagaaaggggattgtgctctctacgccagctccttcaagggatttattgagaactgtagcacgcccaatacttatatctgtatgcaacggaccgtg

SEQ ID NO: 1014 - DNA, 159 bp, Artificial Sequence
  Synthetic Polynucleotide
atggaccccgacctggaaatcagagccgccttcctgcggcagagaaacacagccctgagaacagaggtggccgagctggaacaagaggtgcagcggctggaaaacgaggtgtcccagtacgagacaagatacggccctctcggaggcggaaaaacgcgt

SEQ ID NO: 1015 - DNA, 159 bp, Artificial Sequence
  Synthetic Polynucleotide
acgcgtatggaccctgatctcgaaattgaggccgcctttctggaacgcgagaacactgccctggaaaccagggtcgcagagctgagacagagagtgcagagactgcggaacagagtgtctcagtaccgcaccagatatggcccactcggcggaggtaaa

SEQ ID NO: 1016 - DNA, 84 bp, Artificial Sequence
  Synthetic Polynucleotide
gaagttgctgccctcgagaaggaggtagcagctttggaaaaagaagtcgcagcccttgagaaagaagttgcggctctggagaag

SEQ ID NO: 1017 - DNA, 84 bp, Artificial Sequence
  Synthetic Polynucleotide
aaagttgctgctcttaaagaaaaggtcgcggctctgaaagaaaaagtggcggcgctcaaggagaaagttgcagctctcaaagaa

SEQ ID NO: 1018 - DNA, 39 bp, Artificial Sequence
  Synthetic Polynucleotide
gctcatattgtcatggtagatgcctacaagcctacaaag

SEQ ID NO: 1019 - DNA, 51 bp, Artificial Sequence
  Synthetic Polynucleotide
cagatagagtacctggctaaacagattgtggataacgctatccaacaggcc

SEQ ID NO: 1020 - DNA, 132 bp, Artificial Sequence
  Synthetic Polynucleotide
tctcatatccaaatacctccgggcttgacagaattgcttcagggctacacggttgaagtcttgcggcagcaacctcctgatctcgtagagttcgccgtcgagtatttcacccggcttagggaagcccgagca

SEQ ID NO: 1021 - DNA, 63 bp, Artificial Sequence
  Synthetic Polynucleotide
tgcggccagatagagtatcttgctaagcaaattgtggacaatgcaatccagcaggctgggtgc

SEQ ID NO: 1022 - DNA, 135 bp, Artificial Sequence
  Synthetic Polynucleotide
tgtggacatatacagatcccacctggacttacggaacttcttcagggttatacagttgaagtcctcagacagcagcctcccgatttggtcgaatttgcggtggaatacttcacaagactccgggaggcgcgggca

SEQ ID NO: 1023 - DNA, 48 bp, Artificial Sequence
  Synthetic Polynucleotide
acagataaggacatgaccataactttcactaacaagaaggacgctgaa

SEQ ID NO: 1024 - DNA, 45 bp, Artificial Sequence
  Synthetic Polynucleotide
ggcggaggcggatctggcggcggaggtagcggtggcggaggatct

SEQ ID NO: 1025 - DNA, 18 bp, Artificial Sequence
  Synthetic Polynucleotide
agcggcggaggcggatct

SEQ ID NO: 1026 - DNA, 24 bp, Artificial Sequence
  Synthetic Polynucleotide
ggcggaggaagcggcggaggatct

SEQ ID NO: 1027 - DNA, 30 bp, Artificial Sequence
  Synthetic Polynucleotide
ggcggaggcggaagtggaggcggaggatct

SEQ ID NO: 1028 - DNA, 45 bp, Artificial Sequence; identical to SEQ ID NO: 37
  Synthetic Polynucleotide

SEQ ID NO: 1029 - DNA, 36 bp, Artificial Sequence
  Synthetic Polynucleotide
gagcagaaactgatctcggaagaggatgggagcggc

SEQ ID NO: 1030 - DNA, 39 bp, Artificial Sequence
  Synthetic Polynucleotide
gaacagaaattgataagtgaggaagacttgggcagcggc

SEQ ID NO: 1031 - DNA, 39 bp, Artificial Sequence
  Synthetic Polynucleotide
gagcagaaactgatctcggaagaggatctggggagcggc

SEQ ID NO: 1032 - DNA, 51 bp, Artificial Sequence
  Synthetic Polynucleotide
gggaaaccaattcccaaccctcttctgggactggattcaaccggcagcggc

SEQ ID NO: 1033 - DNA, 36 bp, Artificial Sequence
  Synthetic Polynucleotide
tacccctacgatgtgcccgattacgctggcagcggc

SEQ ID NO: 1034 - DNA, 27 bp, Artificial Sequence
  Synthetic Polynucleotide
caccatcatcaccatcacggcagcggc

SEQ ID NO: 1035 - DNA, 45 bp, Artificial Sequence
  Synthetic Polynucleotide
ggcctgaacgacatcttcgaggctcagaagatcgaatggcacgag

SEQ ID NO: 1036 - DNA, 39 bp, Artificial Sequence
  Synthetic Polynucleotide
gggtctggaggcggaggcagcggcggaggcgggagcggc

SEQ ID NO: 1037 - DNA, 39 bp, Artificial Sequence
  Synthetic Polynucleotide
ggcagcggcggaggcggaagtggaggcggaggcagcggc

SEQ ID NO: 1038 - DNA, 33 bp, Artificial Sequence
  Synthetic Polynucleotide
tggtctcatccccagtttgaaaagggcagcggc

SEQ ID NO: 1039 - DNA, 33 bp, Artificial Sequence
  Synthetic Polynucleotide
tggtcccatccccagttcgagaaaggcagcggc

SEQ ID NO: 1040 - DNA, 34 bp, Artificial Sequence
  Synthetic Polynucleotide
gattataaagatgatgacgataaagggcagcggc

SEQ ID NO: 1041 - DNA, 858 bp, Artificial Sequence
  Synthetic Polynucleotide
ctgttcaatcaagaggtgcagatccctctgaccgagagctactgtggcccctgtcctaagaactggatctgctacaagaacaactgctaccagttcttcgacgagagcaagaattggtacgagagccaggccagctgcatgagccagaatgccagcctgctgaaggtgtacagcaaagaggaccaggacctgctgaaactggtcaagagcgcccactggatgggccttgtgcacatccccaccaatggctcttggcagtgggaggacggcagcattctgagccctaacctgctgaccatcatcgagatgcagaagggcgactgcgccctgtacgccagcagctttaagggctacatcgagaattgcagcaccccgaacacctacatctgtatgcagagaaccgtttctggcggaggcggctctggaggaggcggaagtggcggcggaggcgacctctttaatcaagaagtccagattccactcaccgaatcctactgcggaccttgtccaaaaaattggatttgttataagaacaactgttatcaattctttgatgagtctaaaaattggtatgagtcccaggcttcctgcatgtctcagaacgcttctctgctgaaagtctactctaaagaagatcaggatctcctgaagctcgtcaagtctgcccattggatggggctcgtccacattcctaccaacggaagctggcaatgggaagatggctccatcctgtctccaaatctgctcacgattattgaaatgcagaaaggggattgtgctctctacgccagctccttcaagggatatattgagaactgtagcacgcccaatacttatatctgtatgcaacggaccgtg

SEQ ID NO: 1042 - DNA, 423 bp, Artificial Sequence
  Synthetic Polynucleotide
gatatccagaaccctgaccctgccgtgtaccagctgagagactctaaatccagtgacaagtctgtctgcctattcaccgattttgattctcaaacaaatgtgtcacaaagtaaggattctgatgtgtatatcacagacaaaactgtgctagacatgaggtctatggacttcaagagcaacagtgctgtggcctggagcaacaaatctgactttgcatgtgcaaacgccttcaacaacagcattattccagaagacaccttcttccccagcccagaaagttcctgtgatgtcaagctggtcgagaaaagctttgaaacagatacgaacctaaactttcaaaacctgtcagtgattgggttccgaatcctcctcctgaaagtggccgggtttaatctgctcatgacgctgcggctgtggtccagc

SEQ ID NO: 1043 - DNA, 420 bp, Artificial Sequence
  Synthetic Polynucleotide
atccagaaccctgaccctgccgtgtaccagctgagagactctaaatccagtgacaagtctgtctgcctattcaccgattttgattctcaaacaaatgtgtcacaaagtaaggattctgatgtgtatatcacagacaaaactgtgctagacatgaggtctatggacttcaagagcaacagtgctgtggcctggagcaacaaatctgactttgcatgtgcaaacgccttcaacaacagcattattccagaagacaccttcttccccagcccagaaagttcctgtgatgtcaagctggtcgagaaaagctttgaaacagatacgaacctaaactttcaaaacctgtcagtgattgggttccgaatcctcctcctgaaagtggccgggtttaatctgctcatgacgctgcggctgtggtccagc

SEQ ID NO: 1044 - DNA, 420 bp, Artificial Sequence
  Synthetic Polynucleotide
atccagaaccctgatcctgccgtgtaccagctgcgggatagcaagagcagcgacaagagcgtgtgtctgttcaccgacttcgacagccagaccaacgtgtcccagagcaaggactccgacgtgtacatcaccgataagtgcgtgctggacatgcggagcatggacttcaagagcaactccgccgtggcctggtccaacaagtccgatttcgcctgcgccaacgccttcaacaacagcattatccccgaggacacattcttcccaagcagcgacgtgccctgcgacgtgaagctggtggaaaagagcttcgagacagacaccaacctgaacttccagaacctgagcgtgatcggcttcagaatcctgctgctgaaagtggccggctttaacctgctgatgaccctgcggctgtggtccagc

SEQ ID NO: 1045 - DNA, 420 bp, Artificial Sequence
  Synthetic Polynucleotide
atccagaaccctgatcctgccgtgtaccagctgcgggatagcaagagcagcgacaagagcgtgtgtctgttcaccgacttcgacagccagaccaacgtgtcccagagcaaggactccgacgtgtacatcaccgataagaccgtgctggacatgcggagcatggacttcaagagcaactccgccgtggcctggtccaacaagtccgatttcgcctgcgccaacgccttcaacaacagcattatccccgaggacacattcttcccaagccccgagagcagctgcgacgtgaagctggtggaaaagagcttcgagacagacaccaacctgaacttccagaacctgagcgtgatcggcttcagaatcctgctgctgaaagtggccggctttaacctgctgatgaccctgcggctgtggtccagc

SEQ ID NO: 1046 - DNA, 411 bp, Artificial Sequence
  Synthetic Polynucleotide
cctgatcctgccgtgtaccagctgcgggatagcaagagcagcgacaagagcgtgtgcctgttcaccgacttcgacagccagaccaacgtgtctcagtctaaggatagtgatgtgtatatcaccgacaagaccgtgctggacatgcggagcatggacttcaagagcaacagcgccgtggcctggtccaacaagagcgacttcgcctgcgccaacgccttcaacaacagcatcatccccgaggacaccttcttccccagccccgagagcagctgcgacgtgaaactggtggagaagagcttcgagacagacaccaacctgaacttccagaacctgagcgtgatcggcttcagaatcctgctgctgaaggtggccggcttcaacctgctgatgaccctgcggctgtggagcagc

SEQ ID NO: 1047 - DNA, 420 bp, Artificial Sequence
  Synthetic Polynucleotide
atccagaaccctgatcctgccgtgtaccagctgcgggatagcaagagcagcgacaagagcgtgtgtctgttcaccgacttcgacagccagaccaacgtgtcccagagcaaggactccgacgtgtacatcaccgataagtgcgtgctggacatgcggagcatggacttcaagagcaactccgccgtggcctggtccaacaagtccgatttcgcctgcgccaacgccttcaacaacagcattatccccgaggacacattcttcccaagccccgagagcagctgcgacgtgaagctggtggaaaagagcttcgagacagacaccaacctgaacttccagaacctgagcgtgatcggcttcagaatcctgctgctgaaagtggccggctttaacctgctgatgaccctgcggctgtggtccagc

SEQ ID NO: 1048 - DNA, 411 bp, Artificial Sequence
  Synthetic Polynucleotide
cctgatcctgccgtgtaccagctgcgggatagcaagagcagcgacaagagcgtgtgtctgttcaccgacttcgacagccagaccaacgtgtcccagagcaaggactccgacgtgtacatcaccgataagtgcgtgctggacatgcggagcatggacttcaagagcaactccgccgtggcctggtccaacaagtccgatttcgcctgcgccaacgccttcaacaacagcattatccccgaggacacattcttcccaagccccgagagcagctgcgacgtgaagctggtggaaaagagcttcgagacagacaccaacctgaacttccagaacctgagcgtgatcggcttcagaatcctgctgctgaaagtggccggctttaacctgctgatgaccctgcggctgtggtccagc

SEQ ID NO: 1049 - DNA, 420 bp, Artificial Sequence
  Synthetic Polynucleotide
atccagaaccctgatcctgccgtgtaccagctgcgggatagcaagagcagcgacaagagcgtgtgtctgttcaccgacttcgacagccagaccaacgtgtcccagagcaaggactccgacgtgtacatcaccgataagaccgtgctggacatgcggagcatggacttcaagagcaactccgccgtggcctggtccaacaagtccgatttcgcctgcgccaacgccttcaacaacagcattatccccgaggacacattcttcccaagcagcgacgtgccctgcgacgtgaagctggtggaaaagagcttcgagacagacaccaacctgaacttccagaacctgagcgtgatcggcttcagaatcctgctgctgaaagtggccggctttaacctgctgatgaccctgcggctgtggtccagc

SEQ ID NO: 1050 - DNA, 420 bp, Artificial Sequence
  Synthetic Polynucleotide
atccagaaccctgatcctgccgtgtaccagctgcgggatagcaagagcagcgacaagagcgtgtgtctgttcaccgacttcgacagccagaccaacgtgtcccagagcaaggactccgacgtgtacatcaccgataagaccgtgctggacatgcggagcatggacttcaagagcaaccgcgccgtggcctggtccaacaagtccgatttcgcctgcgccaacgccttcaacaacagcattatccccgaggacacattcttcccaagccccgagagcagctgcgacgtgaagctggtggaaaagagcttcgagacagacaccaacctgaacttccagaacctgagcgtgatcggcttcagaatcctgctgctgaaagtggccggctttaacctgctgatgaccctgcggctgtggtccagc

SEQ ID NO: 1051 - DNA, 420 bp, Artificial Sequence
  Synthetic Polynucleotide
atccagaaccctgatcctgccgtgtaccagctgcgggatagcaagagcagcgacaagagcgtgtgtctgttcaccgacttcgacagccagaccaacgtgtcccagagcaaggactccgacgtgtacatcaccgataagaccgtgctggacatgcggagcatggacttcaagagcaaccgcgccgtggcctggtccaacaagtccgatttcgcctgcgccaacgccttcaacaacagcattatccccgaggacacattcttcccaagcagcgacgtgccctgcgacgtgaagctggtggaaaagagcttcgagacagacaccaacctgaacttccagaacctgagcgtgatcggcttcagaatcctgctgctgaaagtggccggctttaacctgctgatgaccctgcggctgtggtccagc

SEQ ID NO: 1052 - DNA, 420 bp, Artificial Sequence
  Synthetic Polynucleotide
atccagaaccctgatcctgccgtgtaccagctgcgggatagcaagagcagcgacaagagcgtgtgtctgttcaccgacttcgacagccagaccaacgtgtcccagagcaaggactccgacgtgtacatcaccgataagaccgtgctggacatgcggagcatggacttcaagagcaactccgccgtggcctggtccaacaagtccgatttcgcctgcgccaacgccttcaacaacagcattatccccgaggacacattcttcccaagcagcgacagcagctgcgacgtgaagctggtggaaaagagcttcgagacagacaccaacctgaacttccagaacctgagcgtgatcggcttcagaatcctgctgctgaaagtggccggctttaacctgctgatgaccctgcggctgtggtccagc

SEQ ID NO: 1053 - DNA, 717 bp, Artificial Sequence
  Synthetic Polynucleotide
atccagaaccctgatcctgccgtgtaccagctgcgggatagcaagagcagcgacaagagcgtgtgtctgttcaccgacttcgacagccagaccaacgtgtcccagagcaaggactccgacgtgtacatcaccgataagaccgtgctggacatgcggagcatggacttcaagagcaactccgccgtggcctggtccaacaagtccgatttcgcctgcgccaacgccttcaacaacagcattatccccgaggacacattcttcccaagccccgagagcagctgcggtacccagagttttgggttgttggaccctaaattgtgctatctgttggacggaatcctgttcatttacggagtgatcctgaccgcattgttcctgcgggttaagttttccagatccgcagacgcacccgcttaccaacaagggcagaaccaactctacaatgaacttaatttggggcggagggaagagtacgacgttctggacaaaaggaggggacgagatcccgagatgggcggaaagcctcagcgaaggaagaatccgcaagaggggctttataacgaactccagaaagataaaatggcagaagcctatagtgagattgggatgaagggagaaaggaggaggggtaaaggtcacgatgggttgtaccaaggattgagcacagccactaaagatacctatgatgcgctccacatgcaggccctgccgccaaga

SEQ ID NO: 1054 - DNA, 408 bp, Artificial Sequence
  Synthetic Polynucleotide
atccagaaccctgaacctgccgtgtaccagctgaaggaccccagaagccaggacagcaccctgtgcctgttcaccgacttcgacagccagatcaacgtgcccaagacaatggaaagcggcaccttcatcaccgacaagaccgtgctggacatgaaggctatggacagcaagagcaacggcgccattgcctggtccaaccagaccagcttcacatgccaggacatcttcaaagagacaaacgccacctacccctccagcgacgtgccctgtgacgccaccctgaccgagaagtccttcgagacagacatgaacctcaacttccagaacctgagcgtgatgggcctgcgaatcctgctgctgaaagtggccggcttcaacctgctgatgaccctgcggctgtggtccagc

SEQ ID NO: 1055 - DNA, 399 bp, Artificial Sequence
  Synthetic Polynucleotide
gtgcaggaccctgaccctagcgtgtaccagatgagaagccccaagaccggcaggaccgtgtgcctgttcaccgacttcgacagccaggccgacttccagaagcctgagggggccaccgtgatctccctgaacagcaccgtgctggacatgaaagtgatggacagcaagagcaacggcgctctgacctggaacagcgagacaaacatcgagtgcaaagagaacttccagcagcccttctaccccagcagcaactactcctgcgacgccaagctgatcgagaagtccttcgagacagacatggacctgaacttctacaacctgctggtcatcggcctgagaatcctgctgctgaaagtgatcggcttcaacctgttcatgaccctgaggctgtggtcctgc

SEQ ID NO: 1056 - DNA, 531 bp, Artificial Sequence
  Synthetic Polynucleotide
gaggacctgaacaaggtgttcccacccgaggtcgctgtgtttgagccatcagaagcagagatctcccacacccaaaaggccacactggtgtgcctggccacaggcttcttccccgaccacgtggagctgagctggtgggtgaatgggaaggaggtgcacagtggggtcagcacagacccgcagcccctcaaggagcagcccgccctcaatgactccagatactgcctgagcagccgcctgagggtctcggccaccttctggcagaacccccgcaaccacttccgctgtcaagtccagttctacgggctctcggagaatgacgagtggacccaggatagggccaaacccgtcacccagatcgtcagcgccgaggcctggggtagagcagactgtggctttacctcggtgtcctaccagcaaggggtcctgtctgccaccatcctctatgagatcctgctagggaaggccaccctgtatgctgtgctggtcagcgcccttgtgttgatggccatggtcaagagaaaggatttc

SEQ ID NO: 1057 - DNA, 537 bp, Artificial Sequence
  Synthetic Polynucleotide
gaggacctgaaaaacgtgttcccacccgaggtcgctgtgtttgagccatcagaagcagagatctcccacacccaaaaggccacactggtatgcctggccacaggcttctaccccgaccacgtggagctgagctggtgggtgaatgggaaggaggtgcacagtggggtcagcacagacccgcagcccctcaaggagcagcccgccctcaatgactccagatactgcctgagcagccgcctgagggtctcggccaccttctggcagaacccccgcaaccacttccgctgtcaagtccagttctacgggctctcggagaatgacgagtggacccaggatagggccaaacccgtcacccagatcgtcagcgccgaggcctggggtagagcagactgtggcttcacctccgagtcttaccagcaaggggtcctgtctgccaccatcctctatgagatcttgctagggaaggccaccttgtatgccgtgctggtcagtgccctcgtgctgatggccatggtcaagagaaaggattccagaggc

SEQ ID NO: 1058 - DNA, 537 bp, Artificial Sequence; identical to SEQ ID NO: 1057
  Synthetic Polynucleotide

SEQ ID NO: 1059 - DNA, 537 bp, Artificial Sequence
  Synthetic Polynucleotide
gaggacctgaagaacgtgttcccacctgaggtggccgtgttcgagcctagcgaggccgagatcagccacacccagaaagccaccctcgtgtgcctggctaccggcttctaccccgaccatgtggaactgtcttggtgggtcaacggcaaagaggtgcacagcggcgtgtgtaccgacccccagccactgaaagaacagcccgccctgaacgacagccggtactgcctgagcagcagactgagagtgtccgccaccttctggcagaacccccggaaccacttcagatgccaggtgcagttctacggcctgagcgagaacgacgagtggacccaggacagagccaagcccgtgacccagatcgtgtctgccgaagcctggggcagagccgattgcggctttaccagcgagagctaccagcagggcgtgctgagcgccaccatcctgtacgagatcctgctgggcaaggccaccctgtacgccgtgctggtgtctgccctggtgctgatggctatggtcaagcggaaggacagccgggga

SEQ ID NO: 1060 - DNA, 537 bp, Artificial Sequence
  Synthetic Polynucleotide
gaggacctgaagaacgtgttcccacctgaggtggccgtgttcgagcctagcaaggccgagatcgcccacacccagaaagccaccctcgtgtgcctggctaccggcttctaccccgaccatgtggaactgtcttggtgggtcaacggcaaagaggtgcacagcggcgtgtgtaccgacccccagccactgaaagaacagcccgccctgaacgacagccggtactgcctgagcagcagactgagagtgtccgccaccttctggcagaacccccggaaccacttcagatgccaggtgcagttctacggcctgagcgagaacgacgagtggacccaggacagagccaagcccgtgacccagatcgtgtctgccgaagcctggggcagagccgattgcggcatcaccagcgccagctaccaccagggcgtgctgagcgccaccatcctgtacgagatcctgctgggcaaggccaccctgtacgccgtgctggtgtctgccctggtgctgatggctatggtcaagcggaaggacagccgggga

SEQ ID NO: 1061 - DNA, 537 bp, Artificial Sequence
  Synthetic Polynucleotide
gaggacctgaagaacgtgttcccacctgaggtggccgtgttcgagcctagcgaggccgagatcagccacacccagaaagccaccctcgtgtgcctggctaccggcttctaccccgaccatgtggaactgtcttggtgggtcaacggcaaagaggtgcacagcggcgtgtctaccgacccccagccactgaaagaacagcccgccctgaacgacagccggtactgcctgagcagcagactgagagtgtccgccaccttctggcagaacccccggaaccacttcagatgccaggtgcagttctacggcctgagcgagaacgacgagtggacccaggacagagccaagcccgtgacccagatcgtgtctgccgaagcctggggcagagccgattgcggctttaccagcgagagctaccagcagggcgtgctgagcgccaccatcctgtacgagatcctgctgggcaaggccaccctgtacgccgtgctggtgtctgccctggtgctgatggctatggtcaagcggaaggacagccgggga

SEQ ID NO: 1062 - DNA, 534 bp, Artificial Sequence
  Synthetic Polynucleotide
gacctgaagaacgtgttcccacctgaggtggccgtgttcgagcctagcgaggccgagatcagccacacccagaaagccaccctcgtgtgcctggctaccggcttctaccccgaccatgtggaactgtcttggtgggtcaacggcaaagaggtgcacagcggcgtgtctaccgacccccagccactgaaagaacagcccgccctgaacgacagccggtactgcctgagcagcagactgagagtgtccgccaccttctggcagaacccccggaaccacttcagatgccaggtgcagttctacggcctgagcgagaacgacgagtggacccaggacagagccaagcccgtgacccagatcgtgtctgccgaagcctggggcagagccgattgcggctttaccagcgagagctaccagcagggcgtgctgagcgccaccatcctgtacgagatcctgctgggcaaggccaccctgtacgccgtgctggtgtctgccctggtgctgatggctatggtcaagcggaaggacagccgggga

SEQ ID NO: 1063 - DNA, 531 bp, Artificial Sequence
  Synthetic Polynucleotide
gaggacctgaagaacgtgttcccacctgaggtggccgtgttcgagcccagcgaggccgagatttcacacactcagaaagccacactcgtatgtctggcgactggtttctttcccgaccacgtggagctgtcttggtgggtgaacggcaaagaggtgcacagcggggtctctaccgacccccagccactgaaagagcagcccgccctgaacgacagccggtactgcctctcttctcggctgagagtgtccgccaccttctggcagaacccccggaaccacttcagatgccaggtgcagttctacggcctgagcgagaacgacgagtggacccaggacagagccaagcctgtgacccagatcgtgagtgctgaagcgtggggacgcgccgattgcggctttaccagcgagagctaccagcagggcgtgctgtctgccaccatcctgtacgagatcctgctgggcaaggccaccctgtacgccgtgctggtgtccgccctggtgctgatggctatggtgaagcggaaggacttc

SEQ ID NO: 1064 - DNA, 531 bp, Artificial Sequence
  Synthetic Polynucleotide
gaggacctgaacaaggtgttcccacctgaggtggccgtgttcgagcccagcgaggccgagatttcacacactcagaaagccacactcgtatgtctggcgactggtttctttcccgaccacgtggagctgtcttggtgggtgaacggcaaagaggtgcacagcggggtctctaccgacccccagccactgaaagagcagcccgccctgaacgacagccggtactgcctctcttctcggctgagagtgtccgccaccttctggcagaacccccggaaccacttcagatgccaggtgcagttctacggcctgagcgagaacgacgagtggacccaggacagagccaagcctgtgacccagatcgtgagtgctgaagcgtggggacgcgccgattgcggctttaccagcgtgagctaccagcagggcgtgctgtctgccaccatcctgtacgagatcctgctgggcaaggccaccctgtacgccgtgctggtgtccgccctggtgctgatggctatggtgaagcggaaggacttc

SEQ ID NO: 1065 - DNA, 537 bp, Artificial Sequence
  Synthetic Polynucleotide
gaggacctgaagaacgtgttcccacctgaggtggccgtgttcgagcctagcaaggccgagatcgcccacacccagaaagccaccctcgtgtgcctggctaccggcttctaccccgaccatgtggaactgtcttggtgggtcaacggcaaagaggtgcacagcggcgtgtctaccgacccccagccactgaaagaacagcccgccctgaacgacagccggtactgcctgagcagcagactgagagtgtccgccaccttctggcagaacccccggaaccacttcagatgccaggtgcagttctacggcctgagcgagaacgacgagtggacccaggacagagccaagcccgtgacccagatcgtgtctgccgaagcctggggcagagccgattgcggcatcaccagcgccagctaccaccagggcgtgctgagcgccaccatcctgtacgagatcctgctgggcaaggccaccctgtacgccgtgctggtgtctgccctggtgctgatggctatggtcaagcggaaggacagccgggga

SEQ ID NO: 1066 - DNA, 537 bp, Artificial Sequence
  Synthetic Polynucleotide
gaggacctgaagaacgtgttcccacctgaggtggccgtgttcgagcctagcaaggccgagatcgcccacacccagaaagccaccctcgtgtgcctggctaccggcttctaccccgaccatgtggaactgtcttggtgggtcaacggcaaagaggtgcacagcggcgtgtctaccgacccccagccactgaaagaacagcccgccctgaacgacagccggtactgcctgagcagcagactgagagtgtccgccaccttctggcagaacccccggaaccacttcagatgccaggtgcagttctacggcctgagcgagaacgacgagtggacccaggacagagccaagcccgtgacccagatcgtgtctgccgaagcctggggcagagccgattgcggctttaccagcgagagctaccagcagggcgtgctgagcgccaccatcctgtacgagatcctgctgggcaaggccaccctgtacgccgtgctggtgtctgccctggtgctgatggctatggtcaagcggaaggacagccgggga

SEQ ID NO: 1067 - DNA, 537 bp, Artificial Sequence
  Synthetic Polynucleotide
gaggacctgaagaacgtgttcccacctgaggtggccgtgttcgagcctagcaaggccgagatcagccacacccagaaagccaccctcgtgtgcctggctaccggcttctaccccgaccatgtggaactgtcttggtgggtcaacggcaaagaggtgcacagcggcgtgtctaccgacccccagccactgaaagaacagcccgccctgaacgacagccggtactgcctgagcagcagactgagagtgtccgccaccttctggcagaacccccggaaccacttcagatgccaggtgcagttctacggcctgagcgagaacgacgagtggacccaggacagagccaagcccgtgacccagatcgtgtctgccgaagcctggggcagagccgattgcggcatcaccagcgagagctaccagcagggcgtgctgagcgccaccatcctgtacgagatcctgctgggcaaggccaccctgtacgccgtgctggtgtctgccctggtgctgatggctatggtcaagcggaaggacagccgggga

SEQ ID NO: 1068 - DNA, 537 bp, Artificial Sequence
  Synthetic Polynucleotide
gaggacctgaagaacgtgttcccacctgaggtggccgtgttcgagcctagcaaggccgagatcagccacacccagaaagccaccctcgtgtgcctggctaccggcttctaccccgaccatgtggaactgtcttggtgggtcaacggcaaagaggtgcacagcggcgtgtctaccgacccccagccactgaaagaacagcccgccctgaacgacagccggtactgcctgagcagcagactgagagtgtccgccaccttctggcagaacccccggaaccacttcagatgccaggtgcagttctacggcctgagcgagaacgacgagtggacccaggacagagccaagcccgtgacccagatcgtgtctgccgaagcctggggcagagccgattgcggctttaccagcgccagctaccagcagggcgtgctgagcgccaccatcctgtacgagatcctgctgggcaaggccaccctgtacgccgtgctggtgtctgccctggtgctgatggctatggtcaagcggaaggacagccgggga

SEQ ID NO: 1069 - DNA, 537 bp, Artificial Sequence
  Synthetic Polynucleotide
gaggacctgaagaacgtgttcccacctgaggtggccgtgttcgagcctagcaaggccgagatcagccacacccagaaagccaccctcgtgtgcctggctaccggcttctaccccgaccatgtggaactgtcttggtgggtcaacggcaaagaggtgcacagcggcgtgtctaccgacccccagccactgaaagaacagcccgccctgaacgacagccggtactgcctgagcagcagactgagagtgtccgccaccttctggcagaacccccggaaccacttcagatgccaggtgcagttctacggcctgagcgagaacgacgagtggacccaggacagagccaagcccgtgacccagatcgtgtctgccgaagcctggggcagagccgattgcggctttaccagcgagagctaccaccagggcgtgctgagcgccaccatcctgtacgagatcctgctgggcaaggccaccctgtacgccgtgctggtgtctgccctggtgctgatggctatggtcaagcggaaggacagccgggga

SEQ ID NO: 1070 - DNA, 537 bp, Artificial Sequence
  Synthetic Polynucleotide
gaggacctgaagaacgtgttcccacctgaggtggccgtgttcgagcctagcagggccgagatcgcccacacccagaaagccaccctcgtgtgcctggctaccggcttctaccccgaccatgtggaactgtcttggtgggtcaacggcaaagaggtgcacagcggcgtgtctaccgacccccagccactgaaagaacagcccgccctgaacgacagccggtactgcctgagcagcagactgagagtgtccgccaccttctggcagaacccccggaaccacttcagatgccaggtgcagttctacggcctgagcgagaacgacgagtggacccaggacagagccaagcccgtgacccagatcgtgtctgccgaagcctggggcagagccgattgcggctttaccagcgagagctaccagcagggcgtgctgagcgccaccatcctgtacgagatcctgctgggcaaggccaccctgtacgccgtgctggtgtctgccctggtgctgatggctatggtcaagcggaaggacagccgggga

SEQ ID NO: 1071 - DNA, 537 bp, Artificial Sequence
  Synthetic Polynucleotide
gaggacctgaagaacgtgttcccacctgaggtggccgtgttcgagcctagcagggccgagatcagccacacccagaaagccaccctcgtgtgcctggctaccggcttctaccccgaccatgtggaactgtcttggtgggtcaacggcaaagaggtgcacagcggcgtgtctaccgacccccagccactgaaagaacagcccgccctgaacgacagccggtactgcctgagcagcagactgagagtgtccgccaccttctggcagaacccccggaaccacttcagatgccaggtgcagttctacggcctgagcgagaacgacgagtggacccaggacagagccaagcccgtgacccagatcgtgtctgccgaagcctggggcagagccgattgcggctttaccagcgagagctaccagcagggcgtgctgagcgccaccatcctgtacgagatcctgctgggcaaggccaccctgtacgccgtgctggtgtctgccctggtgctgatggctatggtcaagcggaaggacagccgggga

SEQ ID NO: 1072 - DNA, 537 bp, Artificial Sequence
  Synthetic Polynucleotide
gaggacctgaagaacgtgttcccacctgaggtggccgtgttcgagcctagcaaggccgagatcgcccacacccagaaagccaccctcgtgtgcctggctaccggcttctaccccgaccatgtggaactgtcttggtgggtcaacggcaaagaggtgcacagcggcgtgtctaccgacccccagccactgaaagaacagcccgccctgaacgacagccggtactgcctgagcagcggactgagagtgtccgccaccttctggcagaacccccggaaccacttcagatgccaggtgcagttctacggcctgagcgagaacgacgagtggacccaggacagagccaagcccgtgacccagatcgtgtctgccgaagcctggggcagagccgattgcggcatcaccagcgccagctaccaccagggcgtgctgagcgccaccatcctgtacgagatcctgctgggcaaggccaccctgtacgccgtgctggtgtctgccctggtgctgatggctatggtcaagcggaaggacagccgggga

SEQ ID NO: 1073 - DNA, 537 bp, Artificial Sequence
  Synthetic Polynucleotide
gaggacctgaagaacgtgttcccacctgaggtggccgtgttcgagcctagcaaggccgagatcgcccacacccagaaagccaccctcgtgtgcctggctaccggcttctaccccgaccatgtggaactgtcttggtgggtcaacggcaaagaggtgcacagcggcgtgtctaccgacccccagccactgaaagaacagcccgccctgaacgacagccggtactgcctgagcagcggactgagagtgtccgccaccttctggcagaacccccggaaccacttcagatgccaggtgcagttctacggcctgagcgagaacgacgagtggacccaggacagagccaagcccgtgacccagatcgtgtctgccgaagcctggggcagagccgattgcggctttaccagcgagagctaccagcagggcgtgctgagcgccaccatcctgtacgagatcctgctgggcaaggccaccctgtacgccgtgctggtgtctgccctggtgctgatggctatggtcaagcggaaggacagccgggga

SEQ ID NO: 1074 - DNA, 537 bp, Artificial Sequence
  Synthetic Polynucleotide
gaggacctgaagaacgtgttcccacctgaggtggccgtgttcgagcctagcgaggccgagatcagccacacccagaaagccaccctcgtgtgcctggctaccggcttctaccccgaccatgtggaactgtcttggtgggtcaacggcaaagaggtgcacagcggcgtgtctaccgacccccagccactgaaagaacagcccgccctgaacgacagccggtactgcctgagcagcggactgagagtgtccgccaccttctggcagaacccccggaaccacttcagatgccaggtgcagttctacggcctgagcgagaacgacgagtggacccaggacagagccaagcccgtgacccagatcgtgtctgccgaagcctggggcagagccgattgcggctttaccagcgagagctaccagcagggcgtgctgagcgccaccatcctgtacgagatcctgctgggcaaggccaccctgtacgccgtgctggtgtctgccctggtgctgatggctatggtcaagcggaaggacagccgggga

SEQ ID NO: 1075 - DNA, 513 bp, Artificial Sequence
  Synthetic Polynucleotide
gaggatctgcggaacgtgaccccacccaaggtgtccctgttcgagcccagcaaggccgagatcgccaataaacagaaggccaccctcgtgtgcctggccagaggcttcttccccgaccacgtggaactgtcttggtgggtcaacggcaaagaggtgcacagcggcgtcagcaccgaccctcaggcctacaaagagagcaactacagctactgcctgagcagtcggctgcgggtgtccgccaccttctggcacaacccccggaaccacttcagatgccaggtgcagttccacggcctgagcgaagaggacaagtggcccgagggcagccccaagcctgtcacccagaacatcagcgccgaggcctggggcagagcctgtggcatcaccagcagctaccagcagggcgtgctgagcgccaccatcctgtacgagatcctgctgggcaaggccaccctgtacgccgtgctggtgtccaccctggtggtcatggctatggtcaagcggaagaacagc

SEQ ID NO: 1076 - DNA, 531 bp, Artificial Sequence
  Synthetic Polynucleotide
gaggacctccagaaagtgaccccccctaccgtgaccgtgttcgagccttctgaggccgagatcagccggacccagaaagccacactcgtgtgcctggctcggggcttctaccccgatcacgtggaactgtcttggtgggtcaacggcaaagaagtgaccagcggcttcagcaccgacccccagcctgacaaagagcggcccagcgagaacgacagcagctactgcctgagcagcagactgagagtgtccgccagcttctggcacaacccccggaaccacttcagatgccaggtgcagttctacggcctgggcgacgacgacgagtggaagtacgacagagtgaagcccatcacccagaacatcagcgccgaagcctggggcagagccgattgcggctttacctccgtcagctaccaccagggcgtgctgagcgccaccatcctgtacgagatcctgctgggcaaggccaccctgtacgccgtgctggtgtctatcctggtgctgatggctaaagtgaagcggaagggcagc

SEQ ID NO: 1077 - DNA, 828 bp, Artificial Sequence
  Synthetic Polynucleotide
gaggacctgaagaacgtgttcccacctgaggtggccgtgttcgagcctagcgaggccgagatcagccacacccagaaagccaccctcgtgtgcctggctaccggcttctaccccgaccatgtggaactgtcttggtgggtcaacggcaaagaggtgcacagcggcgtgtctaccgacccccagccactgaaagaacagcccgccctgaacgacagccggtactgcctgagcagcagactgagagtgtccgccaccttctggcagaacccccggaaccacttcagatgccaggtgcagttctacggcctgagcgagaacgacgagtggacccaggacagagccaagcccgtgacccagatcgtgtctgccgaagcctggggcagagccgattgcggatcccagagcttcggcctgctggaccccaagctgtgctacctgctggatggcatcctgttcatctacggcgtgatcctgaccgccctgttcctgagagtgaagttcagcagaagcgccgacgcccctgcctaccagcagggacagaaccaactgtacaacgagctgaacctgggcagacgggaagagtacgacgtgctggacaagcggagaggcagggaccctgagatgggcggaaagccccagcggagaaagaacccccaggaaggactgtataacgaactccagaaagacaagatggccgaagcctacagcgagatcggcatgaagggcgagcggagaagaggcaagggccacgatggcctgtaccagggcctgagcaccgccaccaaggacacctatgacgccctgcacatgcaggccctgcctccaaga

SEQ ID NO: 1078 - DNA, 807 bp, Artificial Sequence
  Synthetic Polynucleotide
  misc_feature (540)..(540): n is a, c, g, or t
gggtgtccagccctacccacaggtgtgggcggcacaccctttccttctctggccccaccaatcatgctgctggtggatggaaagcagcagatggtggtggtctgcctggtccttgatgttgcaccccctggccttgacagccccatctggttctcagccggcaatggcagtgcactggatgccttcacctatggcccttccccagcaacggatggcacctggaccaacttggcccatctctccctgccttctgaggagctggcatcctgggagcctttggtctgccacactgggcctggggctgagggtcacagcaggagtacacagcccatgcatctgtcaggagaggcttctacagccaggacctgcccccaggagcctctcagggggacaccgggtggggcgctgtggctgggggtcctgcggctgctgctcttcaagctgctgctgtttgacctgctcctgacctgcagctgcctgtgcgaccccgcgggcccgctgccttcccccgcaaccaccacccgcctgcgagccctcggntcccatcgactgcacccggccacggagactgggggacgagaggccaccagctcacccagaccccagcctcgggaccgccgctggggtgacacccctccgggtcggaagcccgggagcccagtatggggggaagggtcttacctcagcagttaccccacttgcccagcacaggcctggtgctcaagatctcgcctcagggctccttcctccagtcttggagcattttttgcaggtgacctgcctcctcctctgcaggctggagctgcc

SEQ ID NO: 1079 - DNA, 774 bp, Artificial Sequence
  Synthetic Polynucleotide
accccattcccttctctggcccctcccatcatgctgctggtggacggcaagcagcagatggtggtcgtgtgcctggtgctggatgtggccccacctggactggacagccccatctggtttagcgccggcaatggctctgccctggacgcctttacctacggcccaagccctgccaccgatggcacctggacaaatctggcccacctgagcctgcccagcgaggaactggcttcttgggagcctctcgtgtgccacacaggacctggcgctgagggacacagcagatccacccagcctatgcacctgtctggcgaggccagcaccgccagaacctgtcctcaggaacctctgagaggcacccctggcggagcactgtggctgggagtgctgagactgctgctgttcaagctgctgctgtttgacctgctgctgacctgctcctgtctgtgcgatcctgccggccctctgccttctcctgccaccaccacaagactgagagccctgggcagccacagactgcaccctgccacagagacaggcggcagagaggccacaagcagccctagaccccagcccagagacagaagatggggcgataccccccctggcagaaagcctggatctccagtgtggggcgagggcagctacctgagcagctaccctacatgccctgcccaggcttggtgcagcagaagcgcactgagagcacccagctctagcctgggagccttctttgccggcgatctgcctccaccactccaggctggcgctgct

SEQ ID NO: 1080 - DNA, 630 bp, Artificial Sequence
  Synthetic Polynucleotide
accccattcccttctctggcccctcccatcatgctgctggtggacggcaagcagcagatggtggtcgtgtgcctggtgctggatgtggccccacctggactggacagccccatctggtttagcgccggcaatggctctgccctggacgcctttacctacggcccaagccctgccaccgatggcacctggacaaatctggcccacctgagcctgcccagcgaggaactggcttcttgggagcctctcgtgtgccacacaggacctggcgctgagggacacagcagatccacccagcctatgcacctgtctggcgaggccagcaccgccagaacctgtcctcaggaacctctgagaggcacccctggcggagcactgtggctgggagtgctgagactgctgctgttcaagctgctgctgtttgacctgctgctgacctgctcctgtctgtgcgatcctgccggccctctgccttctcctgccaccaccacaagactgagagccctgggcagccacagactgcaccctgccacagagacaggcggcagagaggccacaagcagccctagaccccagcccagagacagaagatggggcgataccccccctggcagaaagcctggatctccagtc

SEQ ID NO: 1081 - DNA, 567 bp, Artificial Sequence
  Synthetic Polynucleotide
gataaacaacttgatgcagatgtttcccccaagcccactatttttcttccttcaattgctgaaacaaaactccagaaggctggaacatacctttgtcttcttgagaaatttttcccagatattattaagatacattggcaagaaaagaagagcaacacgattctgggatcccaggaggggaacaccatgaagactaacgacacatacatgaaatttagctggttaacggtgccagaagagtcactggacaaagaacacagatgtatcgtcagacatgagaataataaaaacggaattgatcaagaaattatctttcctccaataaagacagatgtcaccacagtggatcccaaatacaattattcaaaggatgcaaatgatgtcatcacaatggatcccaaagacaattggtcaaaagatgcaaatgatacactactgctgcagctcacaaacacctctgcatattacatgtacctcctcctgctcctcaagagtgtggtctattttgccatcatcacctgctgtctgcttggaagaacggctttctgctgcaatggagagaaatca

SEQ ID NO: 1082 - DNA, 519 bp, Artificial Sequence
  Synthetic Polynucleotide
gacaagcagctggacgccgacgtgtcccccaagcctaccatcttcctgccctctatcgccgagacaaagctccagaaggccggcacctacctgtgcctgctggaaaagttcttcccagatgtgattaagatccactggcaggaaaagaagtccaacaccatcctgggcagccaggaaggcaacaccatgaagaccaacgacacctacatgaagttcagctggctgaccgtgcccgagaagtccctggacaaagaacacagatgcatcgtgcggcacgaaaacaacaagaacggcgtggaccaggaaatcatcttcccacccatcaagaccgatgtgattacaatggaccccaaggacaactgctccaaggacgccaacgataccctgctgctccagctgaccaacaccagcgcctactacatgtacttgttgctgctgctgaagtccgtggtgtacttcgccatcatcacatgctgcctgctgcggagaaccgccttctgctgcaacggcgagaagtct

SEQ ID NO: 1083 - DNA, 459 bp, Artificial Sequence
  Synthetic Polynucleotide
agtcagcctcataccaaaccatccgtttttgtcatgaaaaatggaacaaatgtcgcttgtctggtgaaggaattctaccccaaggatataagaataaatctcgtgtcatccaagaagataacagagtttgatcctgctattgtcatctctcccagtgggaagtacaatgctgtcaagcttggtaaatatgaagattcaaattcagtgacatgttcagttcaacacgacaataaaactgtgcactccactgactttgaagtgaagacagattctacagatcacgtaaaaccaaaggaaactgaaaacacaaagcaaccttcaaagagctgccataaacccaaagccatagttcataccgagaaggtgaacatgatgtccctcacagtgcttgggctacgaatgctgtttgcaaagactgttgccgtcaattttctcttgactgccaagttatttttcttg

SEQ ID NO: 1084 - DNA, 459 bp, Artificial Sequence
  Synthetic Polynucleotide
agccagcctcacaccaagcccagcgtgttcgtgatgaagaacggcaccaacgtggcctgcctcgtgaaagagttctaccccaaggacatcaggatcaacctggtgtccagcaagaagatcaccgagttcgaccccgccatcgtgatctcccccagcggcaagtacaacgccgtgaagctggggaagtacgaggacagcaacagcgtgacctgctccgtgcagcacgacaacaagaccgtgcacagcaccgactttgaagtgaaaaccgactccaccgaccacgtgaagcccaaagagacagagaacaccaagcagcccagcaagagctgccacaagcccaaggccatcgtgcacaccgagaaagtgaacatgatgagcctgaccgtgctgggcctgcggatgctgttcgccaaaaccgtggccgtgaacttcctgctgaccgccaagctgttcttcctc

SEQ ID NO: 1085 - DNA, 321 bp, Artificial Sequence
  Synthetic Polynucleotide
atccagaaccctgatcctgccgtgtacatcaccgataagaccgtgctggacatgcggagcatggacttcaagagcaactccgccgtggcctggtccaacaagtccgatttcgcctgcgccaacgccttcaacaacagcattatccccgaggacacattcttcccaagccccgagagcagctgcgacgtgaagctggtggaaaagagcttcgagacagacaccaacctgaacttccagaacctgagcgtgatcggcttcagaatcctgctgctgaaagtggccggctttaacctgctgatgaccctgcggctgtggtccagc

SEQ ID NO: 1086 - DNA, 537 bp, Artificial Sequence
  Synthetic Polynucleotide
gaggacctgaagaacgtgttcccacctgaggtggccgtgttcgagcctagcagggccgagatcagccacacccagaaagccaccctcgtgtgcctggctaccggcttctaccccgaccatgtggaactgtcttggtgggtcaacggcaaagaggtgcacagcggcgtgtgtaccgacccccagccactgaaagaacagcccgccctgaacgacagccggtactgcctgagcagcagactgagagtgtccgccaccttctggcagaacccccggaaccacttcagatgccaggtgcagttctacggcctgagcgagaacgacgagtggacccaggacagagccaagcccgtgacccagatcgtgtctgccgaagcctggggcagagccgattgcggctttaccagcgagagctaccagcagggcgtgctgagcgccaccatcctgtacgagatcctgctgggcaaggccaccctgtacgccgtgctggtgtctgccctggtgctgatggctatggtcaagcggaaggacagccgggga

SEQ ID NO: 1087 - DNA, 537 bp, Artificial Sequence
  Synthetic Polynucleotide
gaggacctgaagaacgtgttcccacctgaggtggccgtgttcgagcctagcagggccgagatcgcccacacccagaaagccaccctcgtgtgcctggctaccggcttctaccccgaccatgtggaactgtcttggtgggtcaacggcaaagaggtgcacagcggcgtgtgtaccgacccccagccactgaaagaacagcccgccctgaacgacagccggtactgcctgagcagcagactgagagtgtccgccaccttctggcagaacccccggaaccacttcagatgccaggtgcagttctacggcctgagcgagaacgacgagtggacccaggacagagccaagcccgtgacccagatcgtgtctgccgaagcctggggcagagccgattgcggctttaccagcgagagctaccagcagggcgtgctgagcgccaccatcctgtacgagatcctgctgggcaaggccaccctgtacgccgtgctggtgtctgccctggtgctgatggctatggtcaagcggaaggacagccgggga

SEQ ID NO: 1088 - DNA, 90 bp, Artificial Sequence
  Synthetic Polynucleotide
cagagcttcggcctgctggaccccaagctgtgctacctgctggatggcatcctgttcatctacggcgtgatcctgaccgccctgttcctg

SEQ ID NO: 1089 - DNA, 429 bp, Artificial Sequence
  Synthetic Polynucleotide
cagagcttcggcctgctggaccccaagctgtgctacctgctggatggcatcctgttcatctacggcgtgatcctgaccgccctgttcctgagagtgaagttcagcagaagcgccgacgcccctgcctaccagcagggacagaaccaactgtacaacgagctgaacctgggcagacgggaagagtacgacgtgctggacaagcggagaggcagggaccctgagatgggcggaaagccccagcggagaaagaacccccaggaaggactgtataacgaactccagaaagacaagatggccgaagcctacagcgagatcggcatgaagggcgagcggagaagaggcaagggccacgatggcctgtaccagggcctgagcaccgccaccaaggacacctatgacgccctgcacatgcaggccctgcctccaaga

SEQ ID NO: 1090 - DNA, 429 bp, Artificial Sequence; identical to SEQ ID NO: 1089
  Synthetic Polynucleotide

SEQ ID NO: 1091 - DNA, 123 bp, Artificial Sequence
  Synthetic Polynucleotide
aggagtaagaggagcaggctcctgcacagtgactacatgaacatgactccacgccgccccggacccacccgcaagcattaccagccctatgccccaccacgcgacttcgcagcctatcgctcc

SEQ ID NO: 1092 - DNA, 126 bp, Artificial Sequence
  Synthetic Polynucleotide
aaacggggcagaaagaaactcctgtatatattcaaacaaccatttatgagaccagtacaaactactcaagaggaagatggctgtagctgccgatttccagaagaagaagaaggaggatgtgaactg

SEQ ID NO: 1093 - DNA, 165 bp, Artificial Sequence
  Synthetic Polynucleotide
aagaaccggaaggccaaggccaagcctgtgacaagaggtgctggtgctggcggcagacagagaggccagaacaaagaaagacctcctcctgtgcctaatcctgactacgagcccatcagaaaaggccagcgggatctgtacagcggcctgaaccagcggcggatc

SEQ ID NO: 1094 - DNA, 90 bp, Artificial Sequence
  Synthetic Polynucleotide
cagagttttgggttgttggaccctaaattgtgctatctgttggacggaatcctgttcatttacggagtgatcctgaccgcattgttcctg

SEQ ID NO: 1095 - DNA, 339 bp, Artificial Sequence
  Synthetic Polynucleotide
cgggttaagttttccagatccgcagacgcacccgcttaccaacaagggcagaaccaactctacaatgaacttaatttggggcggagggaagagtacgacgttctggacaaaaggaggggacgagatcccgagatgggcggaaagcctcagcgaaggaagaatccgcaagaggggctttataacgaactccagaaagataaaatggcagaagcctatagtgagattgggatgaagggagaaaggaggaggggtaaaggtcacgatgggttgtaccaaggattgagcacagccactaaagatacctatgatgcgctccacatgcaggccctgccgccaaga

SEQ ID NO: 1096 - DNA, 429 bp, Artificial Sequence
  Synthetic Polynucleotide
cagagttttgggttgttggaccctaaattgtgctatctgttggacggaatcctgttcatttacggagtgatcctgaccgcattgttcctgcgggttaagttttccagatccgcagacgcacccgcttaccaacaagggcagaaccaactctacaatgaacttaatttggggcggagggaagagtacgacgttctggacaaaaggaggggacgagatcccgagatgggcggaaagcctcagcgaaggaagaatccgcaagaggggctttataacgaactccagaaagataaaatggcagaagcctatagtgagattgggatgaagggagaaaggaggaggggtaaaggtcacgatgggttgtaccaaggattgagcacagccactaaagatacctatgatgcgctccacatgcaggccctgccgccaaga

SEQ ID NO: 1097 - DNA, 123 bp, Artificial Sequence
  Synthetic Polynucleotide
aggagcaagcggtcacggctgctccacagcgattacatgaatatgacaccacgaagaccgggtcctactcgcaaacactaccaaccctacgcacctccccgcgactttgcagcgtaccgatct

SEQ ID NO: 1098 - DNA, 126 bp, Artificial Sequence
  Synthetic Polynucleotide
aagagaggccggaagaagctgctgtacatcttcaagcagcctttcatgcggcccgtgcagaccacccaggaagaggacggctgctcctgccggttccccgaggaagaagaaggcggctgcgagctg

SEQ ID NO: 1099 - DNA, 552 bp, Artificial Sequence
  Synthetic Polynucleotide
cagagcttcggcctgctggaccccaagctgtgctacctgctggatggcatcctgttcatctacggcgtgatcctgaccgccctgttcctgaggagtaagaggagcaggctcctgcacagtgactacatgaacatgactccacgccgccccggacccacccgcaagcattaccagccctatgccccaccacgcgacttcgcagcctatcgctccagagtgaagttcagcagaagcgccgacgcccctgcctaccagcagggacagaaccaactgtacaacgagctgaacctgggcagacgggaagagtacgacgtgctggacaagcggagaggcagggaccctgagatgggcggaaagccccagcggagaaagaacccccaggaaggactgtataacgaactccagaaagacaagatggccgaagcctacagcgagatcggcatgaagggcgagcggagaagaggcaagggccacgatggcctgtaccagggcctgagcaccgccaccaaggacacctatgacgccctgcacatgcaggccctgcctccaaga

SEQ ID NO: 1100 - DNA, 555 bp, Artificial Sequence
  Synthetic Polynucleotide
cagagcttcggcctgctggaccccaagctgtgctacctgctggatggcatcctgttcatctacggcgtgatcctgaccgccctgttcctgaaacggggcagaaagaaactcctgtatatattcaaacaaccatttatgagaccagtacaaactactcaagaggaagatggctgtagctgccgatttccagaagaagaagaaggaggatgtgaactgagagtgaagttcagcagaagcgccgacgcccctgcctaccagcagggacagaaccaactgtacaacgagctgaacctgggcagacgggaagagtacgacgtgctggacaagcggagaggcagggaccctgagatgggcggaaagccccagcggagaaagaacccccaggaaggactgtataacgaactccagaaagacaagatggccgaagcctacagcgagatcggcatgaagggcgagcggagaagaggcaagggccacgatggcctgtaccagggcctgagcaccgccaccaaggacacctatgacgccctgcacatgcaggccctgcctccaaga

SEQ ID NO: 1101 - DNA, 552 bp, Artificial Sequence
  Synthetic Polynucleotide
cagagttttgggttgttggaccctaaattgtgctatctgttggacggaatcctgttcatttacggagtgatcctgaccgcattgttcctgaggagcaagcggtcacggctgctccacagcgattacatgaatatgacaccacgaagaccgggtcctactcgcaaacactaccaaccctacgcacctccccgcgactttgcagcgtaccgatctcgggttaagttttccagatccgcagacgcacccgcttaccaacaagggcagaaccaactctacaatgaacttaatttggggcggagggaagagtacgacgttctggacaaaaggaggggacgagatcccgagatgggcggaaagcctcagcgaaggaagaatccgcaagaggggctttataacgaactccagaaagataaaatggcagaagcctatagtgagattgggatgaagggagaaaggaggaggggtaaaggtcacgatgggttgtaccaaggattgagcacagccactaaagatacctatgatgcgctccacatgcaggccctgccgccaaga

SEQ ID NO: 1102 - DNA, 555 bp, Artificial Sequence
  Synthetic Polynucleotide
cagagttttgggttgttggaccctaaattgtgctatctgttggacggaatcctgttcatttacggagtgatcctgaccgcattgttcctgaagagaggccggaagaagctgctgtacatcttcaagcagcctttcatgcggcccgtgcagaccacccaggaagaggacggctgctcctgccggttccccgaggaagaagaaggcggctgcgagctgcgggttaagttttccagatccgcagacgcacccgcttaccaacaagggcagaaccaactctacaatgaacttaatttggggcggagggaagagtacgacgttctggacaaaaggaggggacgagatcccgagatgggcggaaagcctcagcgaaggaagaatccgcaagaggggctttataacgaactccagaaagataaaatggcagaagcctatagtgagattgggatgaagggagaaaggaggaggggtaaaggtcacgatgggttgtaccaaggattgagcacagccactaaagatacctatgatgcgctccacatgcaggccctgccgccaaga

SEQ ID NO: 1103 - DNA, 408 bp, Artificial Sequence
  Synthetic Polynucleotide
gatcctgccgtgtaccagctgcgggatagcaagagcagcgacaagagcgtgtgtctgttcaccgacttcgacagccagaccaacgtgtcccagagcaaggactccgacgtgtacatcaccgataagtgcgtgctggacatgcggagcatggacttcaagagcaactccgccgtggcctggtccaacaagtccgatttcgcctgcgccaacgccttcaacaacagcattatccccgaggacacattcttcccaagccccgagagcagctgcgacgtgaagctggtggaaaagagcttcgagacagacaccaacctgaacttccagaacctgagcgtgatcggcttcagaatcctgctgctgaaagtggccggctttaacctgctgatgaccctgcggctgtggtccagc

SEQ ID NO: 1104 - DNA, 402 bp, Artificial Sequence
  Synthetic Polynucleotide
gccgtgtaccagctgcgggatagcaagagcagcgacaagagcgtgtgtctgttcaccgacttcgacagccagaccaacgtgtcccagagcaaggactccgacgtgtacatcaccgataagtgcgtgctggacatgcggagcatggacttcaagagcaactccgccgtggcctggtccaacaagtccgatttcgcctgcgccaacgccttcaacaacagcattatccccgaggacacattcttcccaagccccgagagcagctgcgacgtgaagctggtggaaaagagcttcgagacagacaccaacctgaacttccagaacctgagcgtgatcggcttcagaatcctgctgctgaaagtggccggctttaacctgctgatgaccctgcggctgtggtccagc

SEQ ID NO: 1105 - DNA, 390 bp, Artificial Sequence
  Synthetic Polynucleotide
ctgcgggatagcaagagcagcgacaagagcgtgtgtctgttcaccgacttcgacagccagaccaacgtgtcccagagcaaggactccgacgtgtacatcaccgataagtgcgtgctggacatgcggagcatggacttcaagagcaactccgccgtggcctggtccaacaagtccgatttcgcctgcgccaacgccttcaacaacagcattatccccgaggacacattcttcccaagccccgagagcagctgcgacgtgaagctggtggaaaagagcttcgagacagacaccaacctgaacttccagaacctgagcgtgatcggcttcagaatcctgctgctgaaagtggccggctttaacctgctgatgaccctgcggctgtggtccagc

SEQ ID NO: 1106 - DNA, 381 bp, Artificial Sequence
  Synthetic Polynucleotide
agcaagagcagcgacaagagcgtgtgtctgttcaccgacttcgacagccagaccaacgtgtcccagagcaaggactccgacgtgtacatcaccgataagtgcgtgctggacatgcggagcatggacttcaagagcaactccgccgtggcctggtccaacaagtccgatttcgcctgcgccaacgccttcaacaacagcattatccccgaggacacattcttcccaagccccgagagcagctgcgacgtgaagctggtggaaaagagcttcgagacagacaccaacctgaacttccagaacctgagcgtgatcggcttcagaatcctgctgctgaaagtggccggctttaacctgctgatgaccctgcggctgtggtccagc

SEQ ID NO: 1107 - DNA, 369 bp, Artificial Sequence
  Synthetic Polynucleotide
gacaagagcgtgtgtctgttcaccgacttcgacagccagaccaacgtgtcccagagcaaggactccgacgtgtacatcaccgataagtgcgtgctggacatgcggagcatggacttcaagagcaactccgccgtggcctggtccaacaagtccgatttcgcctgcgccaacgccttcaacaacagcattatccccgaggacacattcttcccaagccccgagagcagctgcgacgtgaagctggtggaaaagagcttcgagacagacaccaacctgaacttccagaacctgagcgtgatcggcttcagaatcctgctgctgaaagtggccggctttaacctgctgatgaccctgcggctgtggtccagc

SEQ ID NO: 1108 - DNA, 342 bp, Artificial Sequence
  Synthetic Polynucleotide
ttcgacagccagaccaacgtgtcccagagcaaggactccgacgtgtacatcaccgataagtgcgtgctggacatgcggagcatggacttcaagagcaactccgccgtggcctggtccaacaagtccgatttcgcctgcgccaacgccttcaacaacagcattatccccgaggacacattcttcccaagccccgagagcagctgcgacgtgaagctggtggaaaagagcttcgagacagacaccaacctgaacttccagaacctgagcgtgatcggcttcagaatcctgctgctgaaagtggccggctttaacctgctgatgaccctgcggctgtggtccagc

SEQ ID NO: 1109 - DNA, 324 bp, Artificial Sequence
  Synthetic Polynucleotide
gtgtcccagagcaaggactccgacgtgtacatcaccgataagtgcgtgctggacatgcggagcatggacttcaagagcaactccgccgtggcctggtccaacaagtccgatttcgcctgcgccaacgccttcaacaacagcattatccccgaggacacattcttcccaagccccgagagcagctgcgacgtgaagctggtggaaaagagcttcgagacagacaccaacctgaacttccagaacctgagcgtgatcggcttcagaatcctgctgctgaaagtggccggctttaacctgctgatgaccctgcggctgtggtccagc

SEQ ID NO: 1110 - DNA, 282 bp, Artificial Sequence
  Synthetic Polynucleotide
tgcgtgctggacatgcggagcatggacttcaagagcaactccgccgtggcctggtccaacaagtccgatttcgcctgcgccaacgccttcaacaacagcattatccccgaggacacattcttcccaagccccgagagcagctgcgacgtgaagctggtggaaaagagcttcgagacagacaccaacctgaacttccagaacctgagcgtgatcggcttcagaatcctgctgctgaaagtggccggctttaacctgctgatgaccctgcggctgtggtccagc

SEQ ID NO: 1111 - DNA, 264 bp, Artificial Sequence
  Synthetic Polynucleotide
agcatggacttcaagagcaactccgccgtggcctggtccaacaagtccgatttcgcctgcgccaacgccttcaacaacagcattatccccgaggacacattcttcccaagccccgagagcagctgcgacgtgaagctggtggaaaagagcttcgagacagacaccaacctgaacttccagaacctgagcgtgatcggcttcagaatcctgctgctgaaagtggccggctttaacctgctgatgaccctgcggctgtggtccagc

SEQ ID NO: 1112 - DNA, 180 bp, Artificial Sequence
  Synthetic Polynucleotide
atccccgaggacacattcttcccaagccccgagagcagctgcgacgtgaagctggtggaaaagagcttcgagacagacaccaacctgaacttccagaacctgagcgtgatcggcttcagaatcctgctgctgaaagtggccggctttaacctgctgatgaccctgcggctgtggtccagc

SEQ ID NO: 1113 - DNA, 150 bp, Artificial Sequence
  Synthetic Polynucleotide
gagagcagctgcgacgtgaagctggtggaaaagagcttcgagacagacaccaacctgaacttccagaacctgagcgtgatcggcttcagaatcctgctgctgaaagtggccggctttaacctgctgatgaccctgcggctgtggtccagc

SEQ ID NO: 1114 - DNA, 537 bp, Artificial Sequence; identical to SEQ ID NO: 1059
  Synthetic Polynucleotide

SEQ ID NO: 1115 - DNA, 528 bp, Artificial Sequence
  Synthetic Polynucleotide
aagaacgtgttcccacctgaggtggccgtgttcgagcctagcgaggccgagatcagccacacccagaaagccaccctcgtgtgcctggctaccggcttctaccccgaccatgtggaactgtcttggtgggtcaacggcaaagaggtgcacagcggcgtgtgtaccgacccccagccactgaaagaacagcccgccctgaacgacagccggtactgcctgagcagcagactgagagtgtccgccaccttctggcagaacccccggaaccacttcagatgccaggtgcagttctacggcctgagcgagaacgacgagtggacccaggacagagccaagcccgtgacccagatcgtgtctgccgaagcctggggcagagccgattgcggctttaccagcgagagctaccagcagggcgtgctgagcgccaccatcctgtacgagatcctgctgggcaaggccaccctgtacgccgtgctggtgtctgccctggtgctgatggctatggtcaagcggaaggacagccgggga

SEQ ID NO: 1116 - DNA, 525 bp, Artificial Sequence
  Synthetic Polynucleotide
aacgtgttcccacctgaggtggccgtgttcgagcctagcgaggccgagatcagccacacccagaaagccaccctcgtgtgcctggctaccggcttctaccccgaccatgtggaactgtcttggtgggtcaacggcaaagaggtgcacagcggcgtgtgtaccgacccccagccactgaaagaacagcccgccctgaacgacagccggtactgcctgagcagcagactgagagtgtccgccaccttctggcagaacccccggaaccacttcagatgccaggtgcagttctacggcctgagcgagaacgacgagtggacccaggacagagccaagcccgtgacccagatcgtgtctgccgaagcctggggcagagccgattgcggctttaccagcgagagctaccagcagggcgtgctgagcgccaccatcctgtacgagatcctgctgggcaaggccaccctgtacgccgtgctggtgtctgccctggtgctgatggctatggtcaagcggaaggacagccgggga

SEQ ID NO: 1117 - DNA, 519 bp, Artificial Sequence
  Synthetic Polynucleotide
ttcccacctgaggtggccgtgttcgagcctagcgaggccgagatcagccacacccagaaagccaccctcgtgtgcctggctaccggcttctaccccgaccatgtggaactgtcttggtgggtcaacggcaaagaggtgcacagcggcgtgtgtaccgacccccagccactgaaagaacagcccgccctgaacgacagccggtactgcctgagcagcagactgagagtgtccgccaccttctggcagaacccccggaaccacttcagatgccaggtgcagttctacggcctgagcgagaacgacgagtggacccaggacagagccaagcccgtgacccagatcgtgtctgccgaagcctggggcagagccgattgcggctttaccagcgagagctaccagcagggcgtgctgagcgccaccatcctgtacgagatcctgctgggcaaggccaccctgtacgccgtgctggtgtctgccctggtgctgatggctatggtcaagcggaaggacagccgggga

SEQ ID NO: 1118 - DNA, 507 bp, Artificial Sequence
  Synthetic Polynucleotide
gtggccgtgttcgagcctagcgaggccgagatcagccacacccagaaagccaccctcgtgtgcctggctaccggcttctaccccgaccatgtggaactgtcttggtgggtcaacggcaaagaggtgcacagcggcgtgtgtaccgacccccagccactgaaagaacagcccgccctgaacgacagccggtactgcctgagcagcagactgagagtgtccgccaccttctggcagaacccccggaaccacttcagatgccaggtgcagttctacggcctgagcgagaacgacgagtggacccaggacagagccaagcccgtgacccagatcgtgtctgccgaagcctggggcagagccgattgcggctttaccagcgagagctaccagcagggcgtgctgagcgccaccatcctgtacgagatcctgctgggcaaggccaccctgtacgccgtgctggtgtctgccctggtgctgatggctatggtcaagcggaaggacagccgggga

SEQ ID NO: 1119 - DNA, 492 bp, Artificial Sequence
  Synthetic Polynucleotide
cctagcgaggccgagatcagccacacccagaaagccaccctcgtgtgcctggctaccggcttctaccccgaccatgtggaactgtcttggtgggtcaacggcaaagaggtgcacagcggcgtgtgtaccgacccccagccactgaaagaacagcccgccctgaacgacagccggtactgcctgagcagcagactgagagtgtccgccaccttctggcagaacccccggaaccacttcagatgccaggtgcagttctacggcctgagcgagaacgacgagtggacccaggacagagccaagcccgtgacccagatcgtgtctgccgaagcctggggcagagccgattgcggctttaccagcgagagctaccagcagggcgtgctgagcgccaccatcctgtacgagatcctgctgggcaaggccaccctgtacgccgtgctggtgtctgccctggtgctgatggctatggtcaagcggaaggacagccgggga

SEQ ID NO: 1120 - DNA, 483 bp, Artificial Sequence
  Synthetic Polynucleotide
gccgagatcagccacacccagaaagccaccctcgtgtgcctggctaccggcttctaccccgaccatgtggaactgtcttggtgggtcaacggcaaagaggtgcacagcggcgtgtgtaccgacccccagccactgaaagaacagcccgccctgaacgacagccggtactgcctgagcagcagactgagagtgtccgccaccttctggcagaacccccggaaccacttcagatgccaggtgcagttctacggcctgagcgagaacgacgagtggacccaggacagagccaagcccgtgacccagatcgtgtctgccgaagcctggggcagagccgattgcggctttaccagcgagagctaccagcagggcgtgctgagcgccaccatcctgtacgagatcctgctgggcaaggccaccctgtacgccgtgctggtgtctgccctggtgctgatggctatggtcaagcggaaggacagccgggga

SEQ ID NO: 1121 - DNA, 447 bp, Artificial Sequence
  Synthetic Polynucleotide
tgcctggctaccggcttctaccccgaccatgtggaactgtcttggtgggtcaacggcaaagaggtgcacagcggcgtgtgtaccgacccccagccactgaaagaacagcccgccctgaacgacagccggtactgcctgagcagcagactgagagtgtccgccaccttctggcagaacccccggaaccacttcagatgccaggtgcagttctacggcctgagcgagaacgacgagtggacccaggacagagccaagcccgtgacccagatcgtgtctgccgaagcctggggcagagccgattgcggctttaccagcgagagctaccagcagggcgtgctgagcgccaccatcctgtacgagatcctgctgggcaaggccaccctgtacgccgtgctggtgtctgccctggtgctgatggctatggtcaagcggaaggacagccgggga

SEQ ID NO: 1122 - DNA, 411 bp, Artificial Sequence
  Synthetic Polynucleotide
ctgtcttggtgggtcaacggcaaagaggtgcacagcggcgtgtgtaccgacccccagccactgaaagaacagcccgccctgaacgacagccggtactgcctgagcagcagactgagagtgtccgccaccttctggcagaacccccggaaccacttcagatgccaggtgcagttctacggcctgagcgagaacgacgagtggacccaggacagagccaagcccgtgacccagatcgtgtctgccgaagcctggggcagagccgattgcggctttaccagcgagagctaccagcagggcgtgctgagcgccaccatcctgtacgagatcctgctgggcaaggccaccctgtacgccgtgctggtgtctgccctggtgctgatggctatggtcaagcggaaggacagccgggga

SEQ ID NO: 1123 - DNA, 384 bp, Artificial Sequence
  Synthetic Polynucleotide
gtgcacagcggcgtgtgtaccgacccccagccactgaaagaacagcccgccctgaacgacagccggtactgcctgagcagcagactgagagtgtccgccaccttctggcagaacccccggaaccacttcagatgccaggtgcagttctacggcctgagcgagaacgacgagtggacccaggacagagccaagcccgtgacccagatcgtgtctgccgaagcctggggcagagccgattgcggctttaccagcgagagctaccagcagggcgtgctgagcgccaccatcctgtacgagatcctgctgggcaaggccaccctgtacgccgtgctggtgtctgccctggtgctgatggctatggtcaagcggaaggacagccgggga

SEQ ID NO: 1124 - DNA, 369 bp, Artificial Sequence
  Synthetic Polynucleotide
tgtaccgacccccagccactgaaagaacagcccgccctgaacgacagccggtactgcctgagcagcagactgagagtgtccgccaccttctggcagaacccccggaaccacttcagatgccaggtgcagttctacggcctgagcgagaacgacgagtggacccaggacagagccaagcccgtgacccagatcgtgtctgccgaagcctggggcagagccgattgcggctttaccagcgagagctaccagcagggcgtgctgagcgccaccatcctgtacgagatcctgctgggcaaggccaccctgtacgccgtgctggtgtctgccctggtgctgatggctatggtcaagcggaaggacagccgggga

SEQ ID NO: 1125 - DNA, 345 bp, Artificial Sequence
  Synthetic Polynucleotide
gaacagcccgccctgaacgacagccggtactgcctgagcagcagactgagagtgtccgccaccttctggcagaacccccggaaccacttcagatgccaggtgcagttctacggcctgagcgagaacgacgagtggacccaggacagagccaagcccgtgacccagatcgtgtctgccgaagcctggggcagagccgattgcggctttaccagcgagagctaccagcagggcgtgctgagcgccaccatcctgtacgagatcctgctgggcaaggccaccctgtacgccgtgctggtgtctgccctggtgctgatggctatggtcaagcggaaggacagccgggga

SEQ ID NO: 1126 - DNA, 159 bp, Artificial Sequence
  Synthetic Polynucleotide
ggcagagccgattgcggctttaccagcgagagctaccagcagggcgtgctgagcgccaccatcctgtacgagatcctgctgggcaaggccaccctgtacgccgtgctggtgtctgccctggtgctgatggctatggtcaagcggaaggacagccgggga

SEQ ID NO: 1127 - DNA, 153 bp, Artificial Sequence
  Synthetic Polynucleotide
gccgattgcggctttaccagcgagagctaccagcagggcgtgctgagcgccaccatcctgtacgagatcctgctgggcaaggccaccctgtacgccgtgctggtgtctgccctggtgctgatggctatggtcaagcggaaggacagccgggga

SEQ ID NO: 1128 - DNA, 519 bp, Artificial Sequence; identical to SEQ ID NO: 1082
  Synthetic Polynucleotide

SEQ ID NO: 1129 - DNA, 504 bp, Artificial Sequence
  Synthetic Polynucleotide
gccgacgtgtcccccaagcctaccatcttcctgccctctatcgccgagacaaagctccagaaggccggcacctacctgtgcctgctggaaaagttcttcccagatgtgattaagatccactggcaggaaaagaagtccaacaccatcctgggcagccaggaaggcaacaccatgaagaccaacgacacctacatgaagttcagctggctgaccgtgcccgagaagtccctggacaaagaacacagatgcatcgtgcggcacgaaaacaacaagaacggcgtggaccaggaaatcatcttcccacccatcaagaccgatgtgattacaatggaccccaaggacaactgctccaaggacgccaacgataccctgctgctccagctgaccaacaccagcgcctactacatgtacttgttgctgctgctgaagtccgtggtgtacttcgccatcatcacatgctgcctgctgcggagaaccgccttctgctgcaacggcgagaagtct

SEQ ID NO: 1130 - DNA, 498 bp, Artificial Sequence
  Synthetic Polynucleotide
gtgtcccccaagcctaccatcttcctgccctctatcgccgagacaaagctccagaaggccggcacctacctgtgcctgctggaaaagttcttcccagatgtgattaagatccactggcaggaaaagaagtccaacaccatcctgggcagccaggaaggcaacaccatgaagaccaacgacacctacatgaagttcagctggctgaccgtgcccgagaagtccctggacaaagaacacagatgcatcgtgcggcacgaaaacaacaagaacggcgtggaccaggaaatcatcttcccacccatcaagaccgatgtgattacaatggaccccaaggacaactgctccaaggacgccaacgataccctgctgctccagctgaccaacaccagcgcctactacatgtacttgttgctgctgctgaagtccgtggtgtacttcgccatcatcacatgctgcctgctgcggagaaccgccttctgctgcaacggcgagaagtct

SEQ ID NO: 1131 - DNA, 483 bp, Artificial Sequence
  Synthetic Polynucleotide
accatcttcctgccctctatcgccgagacaaagctccagaaggccggcacctacctgtgcctgctggaaaagttcttcccagatgtgattaagatccactggcaggaaaagaagtccaacaccatcctgggcagccaggaaggcaacaccatgaagaccaacgacacctacatgaagttcagctggctgaccgtgcccgagaagtccctggacaaagaacacagatgcatcgtgcggcacgaaaacaacaagaacggcgtggaccaggaaatcatcttcccacccatcaagaccgatgtgattacaatggaccccaaggacaactgctccaaggacgccaacgataccctgctgctccagctgaccaacaccagcgcctactacatgtacttgttgctgctgctgaagtccgtggtgtacttcgccatcatcacatgctgcctgctgcggagaaccgccttctgctgcaacggcgagaagtct

SEQ ID NO: 1132 - DNA, 201 bp, Artificial Sequence
  Synthetic Polynucleotide
cccatcaagaccgatgtgattacaatggaccccaaggacaactgctccaaggacgccaacgataccctgctgctccagctgaccaacaccagcgcctactacatgtacttgttgctgctgctgaagtccgtggtgtacttcgccatcatcacatgctgcctgctgcggagaaccgccttctgctgcaacggcgagaagtct

SEQ ID NO: 1133 - DNA, 177 bp, Artificial Sequence
  Synthetic Polynucleotide
atggaccccaaggacaactgctccaaggacgccaacgataccctgctgctccagctgaccaacaccagcgcctactacatgtacttgttgctgctgctgaagtccgtggtgtacttcgccatcatcacatgctgcctgctgcggagaaccgccttctgctgcaacggcgagaagtct

SEQ ID NO: 1134 - DNA, 459 bp, Artificial Sequence; identical to SEQ ID NO: 1084
  Synthetic Polynucleotide

SEQ ID NO: 1135 - DNA, 453 bp, Artificial Sequence
  Synthetic Polynucleotide
cctcacaccaagcccagcgtgttcgtgatgaagaacggcaccaacgtggcctgcctcgtgaaagagttctaccccaaggacatcaggatcaacctggtgtccagcaagaagatcaccgagttcgaccccgccatcgtgatctcccccagcggcaagtacaacgccgtgaagctggggaagtacgaggacagcaacagcgtgacctgctccgtgcagcacgacaacaagaccgtgcacagcaccgactttgaagtgaaaaccgactccaccgaccacgtgaagcccaaagagacagagaacaccaagcagcccagcaagagctgccacaagcccaaggccatcgtgcacaccgagaaagtgaacatgatgagcctgaccgtgctgggcctgcggatgctgttcgccaaaaccgtggccgtgaacttcctgctgaccgccaagctgttcttcctc

SEQ ID NO: 1136 - DNA, 441 bp, Artificial Sequence
  Synthetic Polynucleotide
cccagcgtgttcgtgatgaagaacggcaccaacgtggcctgcctcgtgaaagagttctaccccaaggacatcaggatcaacctggtgtccagcaagaagatcaccgagttcgaccccgccatcgtgatctcccccagcggcaagtacaacgccgtgaagctggggaagtacgaggacagcaacagcgtgacctgctccgtgcagcacgacaacaagaccgtgcacagcaccgactttgaagtgaaaaccgactccaccgaccacgtgaagcccaaagagacagagaacaccaagcagcccagcaagagctgccacaagcccaaggccatcgtgcacaccgagaaagtgaacatgatgagcctgaccgtgctgggcctgcggatgctgttcgccaaaaccgtggccgtgaacttcctgctgaccgccaagctgttcttcctc

SEQ ID NO: 1137 - DNA, 435 bp, Artificial Sequence
  Synthetic Polynucleotide
gtgttcgtgatgaagaacggcaccaacgtggcctgcctcgtgaaagagttctaccccaaggacatcaggatcaacctggtgtccagcaagaagatcaccgagttcgaccccgccatcgtgatctcccccagcggcaagtacaacgccgtgaagctggggaagtacgaggacagcaacagcgtgacctgctccgtgcagcacgacaacaagaccgtgcacagcaccgactttgaagtgaaaaccgactccaccgaccacgtgaagcccaaagagacagagaacaccaagcagcccagcaagagctgccacaagcccaaggccatcgtgcacaccgagaaagtgaacatgatgagcctgaccgtgctgggcctgcggatgctgttcgccaaaaccgtggccgtgaacttcctgctgaccgccaagctgttcttcctc

SEQ ID NO: 1138 - DNA, 420 bp, Artificial Sequence
  Synthetic Polynucleotide
aacggcaccaacgtggcctgcctcgtgaaagagttctaccccaaggacatcaggatcaacctggtgtccagcaagaagatcaccgagttcgaccccgccatcgtgatctcccccagcggcaagtacaacgccgtgaagctggggaagtacgaggacagcaacagcgtgacctgctccgtgcagcacgacaacaagaccgtgcacagcaccgactttgaagtgaaaaccgactccaccgaccacgtgaagcccaaagagacagagaacaccaagcagcccagcaagagctgccacaagcccaaggccatcgtgcacaccgagaaagtgaacatgatgagcctgaccgtgctgggcctgcggatgctgttcgccaaaaccgtggccgtgaacttcctgctgaccgccaagctgttcttcctc

SEQ ID NO: 1139 - DNA, 204 bp, Artificial Sequence
  Synthetic Polynucleotide
gaagtgaaaaccgactccaccgaccacgtgaagcccaaagagacagagaacaccaagcagcccagcaagagctgccacaagcccaaggccatcgtgcacaccgagaaagtgaacatgatgagcctgaccgtgctgggcctgcggatgctgttcgccaaaaccgtggccgtgaacttcctgctgaccgccaagctgttcttcctc

SEQ ID NO: 1140 - DNA, 183 bp, Artificial Sequence
  Synthetic Polynucleotide
gaccacgtgaagcccaaagagacagagaacaccaagcagcccagcaagagctgccacaagcccaaggccatcgtgcacaccgagaaagtgaacatgatgagcctgaccgtgctgggcctgcggatgctgttcgccaaaaccgtggccgtgaacttcctgctgaccgccaagctgttcttcctc

SEQ ID NO: 1141 - DNA, 57 bp, Artificial Sequence
  Synthetic Polynucleotide
ggggggggggggggggggggggggggggggggggggggggggggggggggggggggg

SEQ ID NO: 1142 - DNA, 318 bp, Artificial Sequence
  Synthetic Polynucleotide
ggacagcctaaggccaatcctaccgtgacactgttccctccaagcagcgaagaactccaggccaacaaggccacacttgtgtgcctgatctccgacttctaccctggggctgtgacagtggcttggaaggccgatggatctcctgtgaaagccggcgtggaaaccaccaagccatccaagcagagcaacaacaaatacgccgccagctcctacctgagcctgacacctgagcagtggaagtcccacagatcctacagctgccaagtgacccacgaaggcagcaccgtggaaaagacagtggcccctacagagtgcagc

SEQ ID NO: 1143 - DNA, 309 bp, Artificial Sequence
  Synthetic Polynucleotide
gcctctacaaagggaccctccgtgtttcctctggctcccagcagcaagtctacaagcggaggaacagccgctctgggctgcctggtcaaggattactttcccgagcctgtgaccgtgtcctggaatagcggagcactgacaagcggcgtgcacacctttccagccgtgctgcaaagcagcggcctgtactctctgagcagcgtggtcacagtgcctagctctagcctgggcacccagacctacatctgcaatgtgaaccacaagcctagcaacaccaaggtggacaagagagtggaacccaagagctgt

SEQ ID NO: 1144 - DNA, 306 bp, Artificial Sequence
  Synthetic Polynucleotide
gcctctacaaagggaccctccgtgtttcctctggctcccagcagcaagtctacaagcggaggaacagccgctctgggctgcctggtcaaggattactttcccgagcctgtgaccgtgtcctggaatagcggagcactgacaagcggcgtgcacacctttccagccgtgctgcaaagcagcggcctgtactctctgagcagcgtggtcacagtgcctagctctagcctgggcacccagacctacatctgcaatgtgaaccacaagcctagcaacaccaaggtggacaagagagtggaacccaagagc

SEQ ID NO: 1145 - DNA, 339 bp, Artificial Sequence
  Synthetic Polynucleotide
gcctctacaaagggaccctccgtgtttcctctggctcccagcagcaagtctacaagcggaggaacagccgctctgggctgcctggtcaaggattactttcccgagcctgtgaccgtgtcctggaatagcggagcactgacaagcggcgtgcacacctttccagccgtgctgcaaagcagcggcctgtactctctgagcagcgtggtcacagtgcctagctctagcctgggcacccagacctacatctgcaatgtgaaccacaagcctagcaacaccaaggtggacaagagagtggaacccaagagctgtgataaaactcatacctgtccgccatgcccg

SEQ ID NO: 1146 - DNA, 309 bp, Artificial Sequence
  Synthetic Polynucleotide
gctagtaccaagggcccatcggtcttccccctggcaccctcctccaagagcacctctgggggcacagcggccctgggctgcctggtcaaggactacttccccgaaccggtgacggtgtcgtggaactcaggcgccctgaccagcggcgtgcacaccttcccggctgtcctacagtcctcaggactctactccctcagcagcgtggtgaccgtgccctccagcagcttgggcacccagacctacatctgcaacgtgaatcacaagcccagcaacaccaaggtggacaagaaagttgagcccaaatcttgt

SEQ ID NO: 1147 - DNA, 306 bp, Artificial Sequence
  Synthetic Polynucleotide
gctagtaccaagggcccatcggtcttccccctggcaccctcctccaagagcacctctgggggcacagcggccctgggctgcctggtcaaggactacttccccgaaccggtgacggtgtcgtggaactcaggcgccctgaccagcggcgtgcacaccttcccggctgtcctacagtcctcaggactctactccctcagcagcgtggtgaccgtgccctccagcagcttgggcacccagacctacatctgcaacgtgaatcacaagcccagcaacaccaaggtggacaagaaagttgagcccaaatct

SEQ ID NO: 1148 - DNA, 339 bp, Artificial Sequence
  Synthetic Polynucleotide
gctagtaccaagggcccatcggtcttccccctggcaccctcctccaagagcacctctgggggcacagcggccctgggctgcctggtcaaggactacttccccgaaccggtgacggtgtcgtggaactcaggcgccctgaccagcggcgtgcacaccttcccggctgtcctacagtcctcaggactctactccctcagcagcgtggtgaccgtgccctccagcagcttgggcacccagacctacatctgcaacgtgaatcacaagcccagcaacaccaaggtggacaagaaagttgagcccaaatcttgtgacaaaactcacacatgcccaccgtgccca

SEQ ID NO: 1149 - DNA, 303 bp, Artificial Sequence
  Synthetic Polynucleotide
gcctcaacgaaagggcctagcgtcttccccctggcgccgtgctcacgatccacaagcgaatccaccgccgctctcggatgcctcgtaaaggattatttccctgaaccagtcacggtgtcatggaacagcggtgcccttaccagcggcgtccatacctttcctgctgtgctccagtccagcggactttatagtctcagctctgtcgtgaccgtcccttcctctaattttggcacccagacttacacgtgcaacgtcgatcataagcccagtaacaccaaggtagacaagacggtggaacgaaag

SEQ ID NO: 1150 - DNA, 306 bp, Artificial Sequence
  Synthetic Polynucleotide
gcctccacgaagggaccatctgttttccctcttgccccctgctcacggtcaacgtctgaatccacggcagccctgggctgcctcgttaaggactactttccagagccggtaacagtctcctggaacagtggagcccttacatcaggtgttcacactttccctgccgtcttgcaaagtagcggactgtacagccttagttccgttgttacggttccttctagcaacttcggtacacagacatatacttgtaacgtagatcataagcctagcaacaccaaggtggacaaaaccgtagagagaaagtgt

SEQ ID NO: 1151 - DNA, 309 bp, Artificial Sequence
  Synthetic Polynucleotide
gcaagtacaaagggacccagtgttttcccgctcgccccctgttcacgatcaacgagtgagtccactgcggctctcggatgcctcgtcaaagactacttccccgagccggtgactgttagttggaactctggggctcttacttcaggcgtacacacattccccgccgtgcttcagtcaagtgggctctactcacttagcagtgtggtaacggttccctctagcaactttggcacccaaacatatacttgcaacgtcgatcacaagccgtcaaataccaaagttgacaagaccgttgaaaggaaatgttgt

SEQ ID NO: 1152 - DNA, 309 bp, Artificial Sequence
  Synthetic Polynucleotide
gcgtccactaagggtccgtcagtcttcccgctggcgccctgttcccgcagcacgagtgaatctaccgccgcccttgggtgcttggtaaaagactattttcctgagcccgttacagtatcatggaacagcggggctctgactagcggggtgcatacgttccctgcggttctgcaatctagcggactgtattctctctccagtgttgtgaccgtgccaagctccagcctcggtactaaaacttatacatgtaatgtggatcataaaccttcaaataccaaggttgacaaaagggtagagagtaagtacggt

SEQ ID NO: 1153 - DNA, 363 bp, Artificial Sequence
  Synthetic Polynucleotide
gcgtctcccacttctccgaaagttttccccctttccctctgtagcacacaacctgatggaaatgtggtcatcgcatgtctggtacaaggattctttccacaagagccattgagcgttacatggtcagagagcgggcagggagttaccgctaggaatttcccaccctcacaggatgcgagtggtgatctttataccacatcatcacaactcacgttgccagccactcagtgcctcgctggaaagtcagtaacatgccatgtcaaacattacactaatccctcacaagatgttaccgtgccttgcccagtaccttctacgccgcccaccccgtctccatctactccacccacgccatcacctagt

SEQ ID NO: 1154 - DNA, 324 bp, Artificial Sequence
  Synthetic Polynucleotide
gcgtcacctacgtccccaaaagtgttcccgctgtcactcgattccactccacaggacggtaacgtggtggttgcctgcctggtacaaggtttctttcctcaagaaccactctctgtgacgtggtctgaaagtggtcagaatgttacagcacggaacttcccaccgagtcaagatgcgagtggggatctctatacgacatccagtcaactcacactgcccgcaacacaatgccccgatggcaaatctgttacctgccatgtgaaacattacaccaatccatcccaggatgtgacagtaccttgtccggttccgccccctcccccg

SEQ ID NO: 1155 - DNA, 477 bp, Artificial Sequence
  Synthetic Polynucleotide
gctccgacaaaggcgccagacgtttttcctattatttcaggatgtcggcatccgaaagataattccccagttgttctggcgtgtcttatcacgggctaccatcctacatctgttaccgttacgtggtatatgggtacgcaaagccaacctcagcggacttttccagagatccaacggcgagattcatattatatgacatccagtcagttgagtacaccgctgcaacagtggcggcaaggtgagtataagtgtgtggtccaacacacagccagtaaaagtaagaaagagatattccggtggcctgaaagcccgaaggcacaagcatcttctgttccgacggcgcaaccgcaagctgaaggaagtcttgcaaaagcaaccacagcacccgcgacaacacgaaacacaggacgcggaggcgaggaaaagaaaaaagaaaaggaaaaggaagagcaagaggagagggaaactaagaccccc

SEQ ID NO: 1156 - DNA, 309 bp, Artificial Sequence
  Synthetic Polynucleotide
gctagtacccagtcaccttctgttttcccgcttactagatgctgcaagaacataccatccaatgccacttctgtcacactgggctgtcttgctacaggttattttcctgagccggtgatggtcacttgggataccggtagcctgaatggaactacaatgacgctgcctgccacgacgctcacattgagtgggcattacgcgacaattagtcttttgacggtaagcggagcttgggctaagcagatgttcacttgcagagtagcgcacactccctctagtactgactgggttgacaacaaaaccttttct

SEQ ID NO: 1157 - DNA, 312 bp, Artificial Sequence
  Synthetic Polynucleotide
gggtcagcaagtgcgcccacgctctttccattggtttcttgcgagaactctccctcagacacatcaagtgtcgcggtaggctgtctcgcccaagattttttgcccgatagtataacgctgtcatggaaatataagaacaatagtgatataagctccacaaggggttttccgagcgtactgcgaggcggtaaatatgcagcgacgagtcaagtcttgctcccatccaaggatgtcatgcaaggcaccgatgagcatgttgtttgcaaagtgcaacatccgaatggaaataaggaaaaaaacgtcccgctgccc

SEQ ID NO: 1158 - DNA, 240 bp, Artificial Sequence
  Synthetic Polynucleotide
atccagaaccctgatcctgccgtgtaccagctgcgggatagcaagagcagcgacaagagcgtgtgtctgttcaccgacttcgacagccagaccaacgtgtcccagagcaaggactccgacgtgtacatcaccgataagaccgtgctggacatgcggagcatggacttcaagagcaactccgccgtggcctggtccaacaagtccgatttcgcctgcgccaacgccttcaacaacagcatt

SEQ ID NO: 1159 - DNA, 270 bp, Artificial Sequence
  Synthetic Polynucleotide
atccagaaccctgatcctgccgtgtaccagctgcgggatagcaagagcagcgacaagagcgtgtgtctgttcaccgacttcgacagccagaccaacgtgtcccagagcaaggactccgacgtgtacatcaccgataagaccgtgctggacatgcggagcatggacttcaagagcaactccgccgtggcctggtccaacaagtccgatttcgcctgcgccaacgccttcaacaacagcattatccccgaggacacattcttcccaagcccc

SEQ ID NO: 1160 - DNA, 378 bp, Artificial Sequence
  Synthetic Polynucleotide
gaggacctgaagaacgtgttcccacctgaggtggccgtgttcgagcctagcgaggccgagatcagccacacccagaaagccaccctcgtgtgcctggctaccggcttctaccccgaccatgtggaactgtcttggtgggtcaacggcaaagaggtgcacagcggcgtgtctaccgacccccagccactgaaagaacagcccgccctgaacgacagccggtactgcctgagcagcagactgagagtgtccgccaccttctggcagaacccccggaaccacttcagatgccaggtgcagttctacggcctgagcgagaacgacgagtggacccaggacagagccaagcccgtgacccagatcgtgtctgccgaagcctgg

SEQ ID NO: 1161 - DNA, 384 bp, Artificial Sequence
  Synthetic Polynucleotide
gaggacctgaagaacgtgttcccacctgaggtggccgtgttcgagcctagcgaggccgagatcagccacacccagaaagccaccctcgtgtgcctggctaccggcttctaccccgaccatgtggaactgtcttggtgggtcaacggcaaagaggtgcacagcggcgtgtctaccgacccccagccactgaaagaacagcccgccctgaacgacagccggtactgcctgagcagcagactgagagtgtccgccaccttctggcagaacccccggaaccacttcagatgccaggtgcagttctacggcctgagcgagaacgacgagtggacccaggacagagccaagcccgtgacccagatcgtgtctgccgaagcctggggcaga

SEQ ID NO: 1162 - DNA, 318 bp, Artificial Sequence
  Synthetic Polynucleotide
gacaagcagctggacgccgacgtgtcccccaagcctaccatcttcctgccctctatcgccgagacaaagctccagaaggccggcacctacctgtgcctgctggaaaagttcttcccagatgtgattaagatccactggcaggaaaagaagtccaacaccatcctgggcagccaggaaggcaacaccatgaagaccaacgacacctacatgaagttcagctggctgaccgtgcccgagaagtccctggacaaagaacacagatgcatcgtgcggcacgaaaacaacaagaacggcgtggaccaggaaatcatcttccca

SEQ ID NO: 1163 - DNA, 342 bp, Artificial Sequence
  Synthetic Polynucleotide
gacaagcagctggacgccgacgtgtcccccaagcctaccatcttcctgccctctatcgccgagacaaagctccagaaggccggcacctacctgtgcctgctggaaaagttcttcccagatgtgattaagatccactggcaggaaaagaagtccaacaccatcctgggcagccaggaaggcaacaccatgaagaccaacgacacctacatgaagttcagctggctgaccgtgcccgagaagtccctggacaaagaacacagatgcatcgtgcggcacgaaaacaacaagaacggcgtggaccaggaaatcatcttcccacccatcaagaccgatgtgattaca

SEQ ID NO: 1164 - DNA, 255 bp, Artificial Sequence
  Synthetic Polynucleotide
agccagcctcacaccaagcccagcgtgttcgtgatgaagaacggcaccaacgtggcctgcctcgtgaaagagttctaccccaaggacatcaggatcaacctggtgtccagcaagaagatcaccgagttcgaccccgccatcgtgatctcccccagcggcaagtacaacgccgtgaagctggggaagtacgaggacagcaacagcgtgacctgctccgtgcagcacgacaacaagaccgtgcacagcaccgacttt

SEQ ID NO: 1165 - DNA, 276 bp, Artificial Sequence
  Synthetic Polynucleotide
agccagcctcacaccaagcccagcgtgttcgtgatgaagaacggcaccaacgtggcctgcctcgtgaaagagttctaccccaaggacatcaggatcaacctggtgtccagcaagaagatcaccgagttcgaccccgccatcgtgatctcccccagcggcaagtacaacgccgtgaagctggggaagtacgaggacagcaacagcgtgacctgctccgtgcagcacgacaacaagaccgtgcacagcaccgactttgaagtgaaaaccgactccacc

SEQ ID NO: 1166 - DNA, 393 bp, Artificial Sequence
  Synthetic Polynucleotide
gaggacctgaagaacgtgttcccacctgaggtggccgtgttcgagcctagcgaggccgagatcagccacacccagaaagccaccctcgtgtgcctggctaccggcttctaccccgaccatgtggaactgtcttggtgggtcaacggcaaagaggtgcacagcggcgtgtctaccgacccccagccactgaaagaacagcccgccctgaacgacagccggtactgcctgagcagcagactgagagtgtccgccaccttctggcagaacccccggaaccacttcagatgccaggtgcagttctacggcctgagcgagaacgacgagtggacccaggacagagccaagcccgtgacccagatcgtgtctgccgaagcctggggcagagccgattgc

SEQ ID NO: 1167 - DNA, 282 bp, Artificial Sequence
  Synthetic Polynucleotide
atccagaaccctgatcctgccgtgtaccagctgcgggatagcaagagcagcgacaagagcgtgtgtctgttcaccgacttcgacagccagaccaacgtgtcccagagcaaggactccgacgtgtacatcaccgataagaccgtgctggacatgcggagcatggacttcaagagcaactccgccgtggcctggtccaacaagtccgatttcgcctgcgccaacgccttcaacaacagcattatccccgaggacacattcttcccaagccccgagagcagctgc

SEQ ID NO: 1168 - DNA, 282 bp, Artificial Sequence; identical to SEQ ID NO: 1167
  Synthetic Polynucleotide

SEQ ID NO: 1169 - DNA, 237 bp, Artificial Sequence
  Synthetic Polynucleotide
aagagcagcgacaagagcgtgtgtctgttcaccgacttcgacagccagaccaacgtgtcccagagcaaggactccgacgtgtacatcaccgataagaccgtgctggacatgcggagcatggacttcaagagcaactccgccgtggcctggtccaacaagtccgatttcgcctgcgccaacgccttcaacaacagcattatccccgaggacacattcttcccaagccccgagagcagc

SEQ ID NO: 1170 - DNA, 378 bp, Artificial Sequence; identical to SEQ ID NO: 1160
  Synthetic Polynucleotide

SEQ ID NO: 1171 - DNA, 330 bp, Artificial Sequence
  Synthetic Polynucleotide
cctgaggtggccgtgttcgagcctagcgaggccgagatcagccacacccagaaagccaccctcgtgtgcctggctaccggcttctaccccgaccatgtggaactgtcttggtgggtcaacggcaaagaggtgcacagcggcgtgtctaccgacccccagccactgaaagaacagcccgccctgaacgacagccggtactgcctgagcagcagactgagagtgtccgccaccttctggcagaacccccggaaccacttcagatgccaggtgcagttctacggcctgagcgagaacgacgagtggacccaggacagagccaagcccgtgacc

SEQ ID NO: 1172 - DNA, 342 bp, Artificial Sequence; identical to SEQ ID NO: 1163
  Synthetic Polynucleotide

SEQ ID NO: 1173 - DNA, 285 bp, Artificial Sequence
  Synthetic Polynucleotide
cccaagcctaccatcttcctgccctctatcgccgagacaaagctccagaaggccggcacctacctgtgcctgctggaaaagttcttcccagatgtgattaagatccactggcaggaaaagaagtccaacaccatcctgggcagccaggaaggcaacaccatgaagaccaacgacacctacatgaagttcagctggctgaccgtgcccgagaagtccctggacaaagaacacagatgcatcgtgcggcacgaaaacaacaagaacggcgtggaccaggaaatcatc

SEQ ID NO: 1174 - DNA, 255 bp, Artificial Sequence; identical to SEQ ID NO: 1164
  Synthetic Polynucleotide

SEQ ID NO: 1175 - DNA, 276 bp, Artificial Sequence; identical to SEQ ID NO: 1165
  Synthetic Polynucleotide

SEQ ID NO: 1176 - DNA, 59 bp, Artificial Sequence
  Synthetic Polynucleotide
  misc_feature (59)..(59): n is a, c, g, or t
ggggggggggggggggggggggggggggggggggggggggggggggggggggggggggn

SEQ ID NO: 1177 - DNA, 63 bp, Artificial Sequence
  Synthetic Polynucleotide
gacgtgaagctggtggaaaagagcttcgagacagacaccaacctgaacttccagaacctgagc

SEQ ID NO: 1178 - DNA, 66 bp, Artificial Sequence
  Synthetic Polynucleotide
tgcgacgtgaagctggtggaaaagagcttcgagacagacaccaacctgaacttccagaacctgagc

SEQ ID NO: 1179 - DNA, 57 bp, Artificial Sequence
  Synthetic Polynucleotide
ggcagagccgattgcggctttaccagcgagagctaccagcagggcgtgctgagcgcc

SEQ ID NO: 1180 - DNA, 81 bp, Artificial Sequence
  Synthetic Polynucleotide
cagatcgtgtctgccgaagcctggggcagagccgattgcggctttaccagcgagagctaccagcagggcgtgctgagcgcc

SEQ ID NO: 1181 - DNA, 72 bp, Artificial Sequence
  Synthetic Polynucleotide
atggaccccaaggacaactgctccaaggacgccaacgataccctgctgctccagctgaccaacaccagcgcc

SEQ ID NO: 1182 - DNA, 102 bp, Artificial Sequence
  Synthetic Polynucleotide
ttcccacccatcaagaccgatgtgattacaatggaccccaaggacaactgctccaaggacgccaacgataccctgctgctccagctgaccaacaccagcgcc

SEQ ID NO: 1183 - DNA, 132 bp, Artificial Sequence
  Synthetic Polynucleotide
gaagtgaaaaccgactccaccgaccacgtgaagcccaaagagacagagaacaccaagcagcccagcaagagctgccacaagcccaaggccatcgtgcacaccgagaaagtgaacatgatgagcctgaccgtg

SEQ ID NO: 1184 - DNA, 111 bp, Artificial Sequence
  Synthetic Polynucleotide
gaccacgtgaagcccaaagagacagagaacaccaagcagcccagcaagagctgccacaagcccaaggccatcgtgcacaccgagaaagtgaacatgatgagcctgaccgtg

SEQ ID NO: 1185 - DNA, 30 bp, Artificial Sequence
  Synthetic Polynucleotide
cagagttttgggttgttggaccctaaattg

SEQ ID NO: 1186 - DNA, 15 bp, Artificial Sequence
  Synthetic Polynucleotide
ggggggggggggggg

SEQ ID NO: 1187 - DNA, 60 bp, Artificial Sequence
  Synthetic Polynucleotide
gtgatcggcttcagaatcctgctgctgaaagtggccggctttaacctgctgatgaccctg

SEQ ID NO: 1188 - DNA, 69 bp, Artificial Sequence
  Synthetic Polynucleotide
accatcctgtacgagatcctgctgggcaaggccaccctgtacgccgtgctggtgtctgccctggtgctg

SEQ ID NO: 1189 - DNA, 69 bp, Artificial Sequence
  Synthetic Polynucleotide
tactacatgtacttgttgctgctgctgaagtccgtggtgtacttcgccatcatcacatgctgcctgctg

SEQ ID NO: 1190 - DNA, 69 bp, Artificial Sequence
  Synthetic Polynucleotide
ctgggcctgcggatgctgttcgccaaaaccgtggccgtgaacttcctgctgaccgccaagctgttcttc

SEQ ID NO: 1191 - DNA, 60 bp, Artificial Sequence
  Synthetic Polynucleotide
tgctatctgttggacggaatcctgttcatttacggagtgatcctgaccgcattgttcctg

SEQ ID NO: 1192 - DNA, 32 bp, Artificial Sequence; identical to SEQ ID NO: 283
  Synthetic Polynucleotide
  misc_feature (30)..(32): n is a, c, g, or t

SEQ ID NO: 1193 - DNA, 15 bp, Artificial Sequence
  Synthetic Polynucleotide
cggctgtggtccagc

SEQ ID NO: 1194 - DNA, 33 bp, Artificial Sequence
  Synthetic Polynucleotide
atggctatggtcaagcggaaggacagccgggga

SEQ ID NO: 1195 - DNA, 36 bp, Artificial Sequence
  Synthetic Polynucleotide
cggagaaccgccttctgctgcaacggcgagaagtct

SEQ ID NO: 1196 - DNA, 339 bp, Artificial Sequence; identical to SEQ ID NO: 1095
  Synthetic Polynucleotide

SEQ ID NO: 1197 - DNA, 31 bp, Artificial Sequence
  Synthetic Polynucleotide
  misc_feature (30)..(31): n is a, c, g, or t
gggggggggggggggggggggggggggggnn

SEQ ID NO: 1198 - DNA, 30 bp, Artificial Sequence
  Synthetic Polynucleotide
gataaaactcatacctgtccgccatgcccg

SEQ ID NO: 1199 - DNA, 27 bp, Artificial Sequence
  Synthetic Polynucleotide
tgctgcgttgaatgtccgccgtgtcct

SEQ ID NO: 1200 - DNA, 702 bp, Artificial Sequence
  Synthetic Polynucleotide
cctgctgaacccaaatccccagacaagacacatacctgccccccttgccctgcgcctcccgtcgccgggccttctgtcttccttttccctcccaagcccaaagacacgttgatgattgcccgaactccagaggtaacgtgtgttgtcgtcgatgttagccatgaggacccagaggttaagttcaattggtatgtggacggtgttgaagttcataatgctaagacaaaacctagggaggaacaatacaattcaacatatcgggtcgtcagtgtcctcaccgtccttcaccaagattggctcaatggtaaagaatataagtgcaaagtctcaaataaggcgcttcctgcgcccatcgaaaaaaccatttccaaggccaagggacaacctagagagccacaggtgtatacgcttccgccgagtcgggatgaattgacgaaaaaccaggtgagcctgacatgcttggtcaaagggttttatccaagcgacattgctgtcgagtgggaatccaacggccagcctgaaaataactacaaaaccacaccgcccgtactggacagtgacggatcattcttcctgtactctaaactcaccgttgacaaatcccggtggcaacagggtaatgtctttagttgcagtgtcatgcatgaggctctgcacaatcattatacccagaaaagtctgagtctgtcacccggtaaaaaa

SEQ ID NO: 1201 - DNA, 705 bp, Artificial Sequence
  Synthetic Polynucleotide
ccagctgaaccaaaaagtcccgataaaacgcatacctgtccaccatgcccagcgccccctgtcgctgggccaagtgtttttctgtttcctccgaagccaaaggatacgctgatgattgcaagaactccagaagtcacctgcgtcgtcgtggatgtttctcacgaggacccagaggtaaagttcaactggtatgtagacggagtcgaagtacacaatgctaaaaccaaaccgcgcgaggaacaatacaattcaacttaccgggtcgtatctgtgcttaccgtcctccaccaagattggctgaatgggaaagaatacaaatgcaaagtcagtaataaggcgctgccggcacctatcgaaaagacgatctctaaggcaaaggggcagcccagagaaccgcaagtgtatacgcttccgccatcacgagatgagctgacgaagaaccaagtctcattgacttgcttggtgaaaggcttctacccgtccgacatagccgtggaatgggaaagcaatggtcaacctgagaataactacaagacaacacccccagttctcgacagcgatggtagcttctttttgtatagtaagttgacggtagataagtcacggtggcagcaaggcaacgtattcagttgtagtgtaatgcatgaagcactccataaccattatactcaaaagagcctttcttcactttctcctggaaagaaa

SEQ ID NO: 1202 - DNA, 687 bp, Artificial Sequence
  Synthetic Polynucleotide
gaaagtaagtatggccctccgtgccctccgtgccccgcaccggaatttgagggcggaccatccgtgttcctttttccaccaaaacccaaagacacacttatgatttccaggacccctgaagtcacctgcgtcgtggtagacgtttctcaggaagatccggaggttcaatttaactggtacgttgacggtgtagaagtacacaatgccaagactaagccacgggaggagcaatttaattcaacatacagggtagtatcagtcttgacagtattgcaccaggattggctgaacggaaaagagtataagtgtaaggtatctaacaagggtctcccgtcatccatcgagaaaacgatcagtaaagcaaaagggcagccacgggaaccacaagtgtacacactgccacccagtcaagaggagatgactaagaatcaagtaagtcttacgtgtctcgtcaaggggttttatccgtcagacattgctgttgagtgggaatccaatgggcaacccgagaacaattataagaccacaccaccagtccttgatagcgatggcagtttttttctgtactccagactcacagtagataagagccggtggcaggagggcaatgttttctcctgcagcgttatgcacgaagcgcttcataaccactatactcagaaatccttgagtctgagtctcggcaaa

SEQ ID NO: 1203 - DNA, 357 bp, Artificial Sequence
  Synthetic Polynucleotide
gagagtaaatacggtccgccgtgtccaccgtgccctggacagccgagggaaccacaggtttacactttgccaccgtcacaggaagaaatgactaaaaaccaggtcagcctcacttgtctggttaagggcttctaccccagcgacattgctgtggagtgggagagcaacggccagccagagaataattacaagaccacgccgcctgtgttggacagtgatggtagtttctttttgtactcacggcttacagtcgacaagagccggtggcaggaaggcaacgttttcagttgctcagtaatgcacgaagccttgcacaaccattatacccaaaaatcactgtcattgagtctcggtaag

SEQ ID NO: 1204 - DNA, 36 bp, Artificial Sequence
  Synthetic Polynucleotide
gaatcaaagtacggccccccgtgtcctccatgtcct

SEQ ID NO: 1205 - DNA, 16 bp, Artificial Sequence
  Synthetic Polynucleotide
gggggggggggggggg

SEQ ID NO: 1206 - DNA, 336 bp, Artificial Sequence
  Synthetic Polynucleotide
agagtgaagttcagcaggagcgcagacgcccccgcgtaccagcagggccagaaccagctctataacgagctgaatctaggacgaagagaggagtacgatgttttggacaagagacgtggccgggaccctgagatggggggaaagccgagaaggaagaaccctcaggaaggcctgtacaatgaactgcagaaagataagatggcggaggcctacagtgagattgggatgaaaggcgagcgccggaggggcaaggggcacgatggcctttaccagggtctcagtacagccaccaaggacacctacgacgcccttcacatgcaggccctgccccctcgc

SEQ ID NO: 1207 - DNA, 336 bp, Artificial Sequence
  Synthetic Polynucleotide
agagtgaagttcagcaggagcgcagacgcccccgcgtaccagcagggccagaaccagctctataacgagctcaatctaggacgaagagaggagtacgatgttttggacaagagacgtggccgggaccctgagatggggggaaagccgagaaggaagaaccctcaggaaggcctgtacaatgaactgcagaaagataagatggcggaggcctacagtgagattgggatgaaaggcgagcgccggaggggcaaggggcacgatggcctttaccagggtctcagtacagccaccaaggacacctacgacgcccttcacatgcaggccctgccccctcgc

SEQ ID NO: 1208 - DNA, 126 bp, Artificial Sequence; identical to SEQ ID NO: 1092
  Synthetic Polynucleotide

SEQ ID NO: 1209 - DNA, 216 bp, Artificial Sequence
  Synthetic Polynucleotide
gcgaagcccaccacgacgccagcgccgcgaccaccaacaccggcgcccaccatcgcgtcgcagcccctgtccctgcgcccagaggcgtgccggccagcggcggggggcgcagtgcacacgagggggctggacttcgcctgtgacatctacatctgggcgcccttggccgggacttgtggggtccttctcctgtcactggttatcaccctttactgc

SEQ ID NO: 1210 - DNA, 678 bp, Artificial Sequence
  Synthetic Polynucleotide
gcgaagcccaccacgacgccagcgccgcgaccaccaacaccggcgcccaccatcgcgtcgcagcccctgtccctgcgcccagaggcgtgccggccagcggcggggggcgcagtgcacacgagggggctggacttcgcctgtgacatctacatctgggcgcccttggccgggacttgtggggtccttctcctgtcactggttatcaccctttactgcaaacggggcagaaagaaactcctgtatatattcaaacaaccatttatgagaccagtacaaactactcaagaggaagatggctgtagctgccgatttccagaagaagaagaaggaggatgtgaactgagagtgaagttcagcaggagcgcagacgcccccgcgtaccagcagggccagaaccagctctataacgagctgaatctaggacgaagagaggagtacgatgttttggacaagagacgtggccgggaccctgagatggggggaaagccgagaaggaagaaccctcaggaaggcctgtacaatgaactgcagaaagataagatggcggaggcctacagtgagattgggatgaaaggcgagcgccggaggggcaaggggcacgatggcctttaccagggtctcagtacagccaccaaggacacctacgacgcccttcacatgcaggccctgccccctcgc

SEQ ID NO: 1211 - DNA, 342 bp, Artificial Sequence
  Synthetic Polynucleotide
gcgaagcccaccacgacgccagcgccgcgaccaccaacaccggcgcccaccatcgcgtcgcagcccctgtccctgcgcccagaggcgtgccggccagcggcggggggcgcagtgcacacgagggggctggacttcgcctgtgacatctacatctgggcgcccttggccgggacttgtggggtccttctcctgtcactggttatcaccctttactgcaaacggggcagaaagaaactcctgtatatattcaaacaaccatttatgagaccagtacaaactactcaagaggaagatggctgtagctgccgatttccagaagaagaagaaggaggatgtgaactg

SEQ ID NO: 1212 - DNA, 324 bp, Artificial Sequence
  Synthetic Polynucleotide
aaaattgaagttatgtatcctcctccttacctagacaatgagaagagcaatggaaccattatccatgtgaaagggaaacacctttgtccaagtcccctatttcccggaccttctaagcccttttgggtgctggtggtggttgggggagtcctggcttgctatagcttgctagtaacagtggcctttattattttctgggtgaggagtaagaggagcaggctcctgcacagtgactacatgaacatgactccacgccgccccggacccacccgcaagcattaccagccctatgccccaccacgcgacttcgcagcctatcgctcc

SEQ ID NO: 1213 - DNA, 450 bp, Artificial Sequence
  Synthetic Polynucleotide
ttcaagatccccatcgaggaactggaagatcgggtgttcgtgaactgcaacacctctatcacctgggtggaaggcaccgtgggaacactgctgagcgacatcaccagactggacctcggcaagcggattctggaccctcggggcatctacagatgcaacggcaccgacatctacaaggacaaagaaagcaccgtgcaggtccactacagaatgtgccagtcctgcgtggaactggaccctgctacagtggccggcatcatcgtgaccgatgtgatcgctactctgctgctggctctgggagtgttctgcttcgccggacacgaaacaggcagactgtctggcgctgccgatacacaggccctgctgagaaacgaccaagtgtatcagcccctgcgcgacagagatgatgcccagtattctcacctcggcggcaactgggctagaaacaag

SEQ ID NO: 1214 - DNA, 555 bp, Artificial Sequence
  Synthetic Polynucleotide
gacggtaacgaggagatgggaggaatcactcaaaccccttacaaagtctcaatttcaggaacaactgttatccttacatgtccccagtatcctggcagcgagatcctttggcagcataacgacaagaatatagggggagatgaagacgataagaatatcggatctgacgaggatcacttgagcctgaaagagttctccgagcttgaacaaagcggatattatgtgtgctatccgcgcgggtcaaagccggaagacgctaacttttacctttatctccgagccagagtgtgcgaaaattgcatggaaatggacgttatgtccgttgctacaatagttatcgtagatatatgcatcacgggtggactgcttctgctggtttattattggtccaagaatagaaaggccaaagctaaacccgtgaccagaggcgctggcgcaggcggaaggcaaaggggacaaaacaaagaacggccaccaccagtgcaaaatccagattatgagcctattcggaaaggacagagggacctgtactctggcctgaatcagagaagaatc

SEQ ID NO: 1215 - DNA, 480 bp, Artificial Sequence
  Synthetic Polynucleotide
cagagcatcaagggcaaccacctggtcaaggtgtacgactaccaagaggacggcagcgtgctgctgacatgtgatgccgaggccaagaacatcacctggtttaaggacggcaagatgatcggcttcctgaccgaggacaagaagaagtggaacctgggcagcaacgctaaggaccccagaggcatgtatcagtgcaagggcagccagaacaagagcaagcccctccaggtgtactaccggatgtgccagaactgcatcgagctgaacgccgctaccatcagcggctttctgttcgccgagatcgtgtccatcttcgtgctggccgtgggcgtgtactttatcgctggacaggatggcgtgcggcagagcagagcttccgataagcaaaccctgctgcctaacgaccagctgtaccagcctctgaaggacagagaggacgaccagtacagccacctccagggcaatcagctgagaagaaac

SEQ ID NO: 1216 - DNA, 429 bp, Artificial Sequence; identical to SEQ ID NO: 1096
  Synthetic Polynucleotide

SEQ ID NO: 1217 - DNA, 31 bp, Artificial Sequence; identical to SEQ ID NO: 1197
  Synthetic Polynucleotide
  misc_feature (30)..(31): n is a, c, g, or t

SEQ ID NO: 1218 - DNA, 27 bp, Artificial Sequence
  Synthetic Polynucleotide
ggcgcgatagggttccttcgaacagcg

SEQ ID NO: 1219 - DNA, 30 bp, Artificial Sequence
  Synthetic Polynucleotide
gccctgcgaagattgttgggactctttggt

SEQ ID NO: 1220 - DNA, 30 bp, Artificial Sequence
  Synthetic Polynucleotide
agggctgcccgagtccttggtcttgagaca

SEQ ID NO: 1221 - DNA, 24 bp, Artificial Sequence
  Synthetic Polynucleotide
ggtccccaaggcatctttggccag

SEQ ID NO: 1222 - DNA, 24 bp, Artificial Sequence
  Synthetic Polynucleotide
agagctatccacattcaggcggag

SEQ ID NO: 1223 - DNA, 24 bp, Artificial Sequence
  Synthetic Polynucleotide
gcacccggacaaatagccggacaa

SEQ ID NO: 1224 - DNA, 24 bp, Artificial Sequence
  Synthetic Polynucleotide
gggcctcaaggcttggcgggtcaa

SEQ ID NO: 1225 - DNA, 24 bp, Artificial Sequence
  Synthetic Polynucleotide
ggtccattgggtattgctgggatt

SEQ ID NO: 1226 - DNA, 24 bp, Artificial Sequence
  Synthetic Polynucleotide
attccagagaatttcttcggagta

SEQ ID NO: 1227 - DNA, 24 bp, Artificial Sequence
  Synthetic Polynucleotide
atggcggcttccgcgaagcgcgag

SEQ ID NO: 1228 - DNA, 24 bp, Artificial Sequence
  Synthetic Polynucleotide
ccgttctcaccgttggtcgcaaca

SEQ ID NO: 1229 - DNA, 24 bp, Artificial Sequence
  Synthetic Polynucleotide
gggccattgggtatcgctggtcaa

SEQ ID NO: 1230 - DNA, 24 bp, Artificial Sequence
  Synthetic Polynucleotide
ggtcctcaagcaatcgccggtcaa

SEQ ID NO: 1231 - DNA, 15 bp, Artificial Sequence
  Synthetic Polynucleotide
cccggctatataaac

SEQ ID NO: 1232 - DNA, 29 bp, Artificial Sequence
  Synthetic Polynucleotide
ggggggggggggggggggggggggggggg

SEQ ID NO: 1233 - DNA, 66 bp, Artificial Sequence
  Synthetic Polynucleotide
gtgaagcagaccctgaatttcgacctgctgaagctggctggcgacgtggaatccaacccaggccct

SEQ ID NO: 1234 - DNA, 54 bp, Artificial Sequence
  Synthetic Polynucleotide
gagggcagaggaagtctactaacctgcggagatgtggaagaaaatcctggccca

SEQ ID NO: 1235 - DNA, 54 bp, Artificial Sequence
  Synthetic Polynucleotide
gagggaagaggtagcctcctcacctgtggggacgttgaagagaaccccggccca

SEQ ID NO: 1236 - DNA, 57 bp, Artificial Sequence
  Synthetic Polynucleotide
gcaacaaacttctcactactcaaacaagcaggtgacgtggaggagaatcccgggcct

SEQ ID NO: 1237 - DNA, 57 bp, Artificial Sequence
  Synthetic Polynucleotide
gcaacaaacttctcactactcaaacaagcaggtgacgtggagcagaatcccgggcct

SEQ ID NO: 1238 - DNA, 60 bp, Artificial Sequence
  Synthetic Polynucleotide
caatgcactaattacgcattgctcaagctggccggtgacgttgagagtaatcctggcccc

SEQ ID NO: 1239 - DNA, 12 bp, Artificial Sequence
  Synthetic Polynucleotide
tctggatctgga

SEQ ID NO: 1240 - DNA, 12 bp, Artificial Sequence
  Synthetic Polynucleotide
agcggatctggc

SEQ ID NO: 1241 - DNA, 12 bp, Artificial Sequence
  Synthetic Polynucleotide
cgggccaagaga

SEQ ID NO: 1242 - DNA, 12 bp, Artificial Sequence
  Synthetic Polynucleotide
agggccaagcga

SEQ ID NO: 1243 - DNA, 12 bp, Artificial Sequence
  Synthetic Polynucleotide
cgcgccaagaga

SEQ ID NO: 1244 - DNA, 1866 bp, Artificial Sequence
  Synthetic Polynucleotide
atggccttaccagtgaccgccttgctcctgccgctggccttgctgctccacgccgccaggccggacatccagatgacacagagccctagcagcctgtctgccagcgtgggagacagagtgaccatcacatgcaaggccagcgaccacatcaacaactggctggcctggtatcagcagaagcctggcaaggcccctaagctgctgatctacggcgctaccacactggaaacaggcgtgcccagcagattttctggcagcggctctggcaccgacttcaccctgacaatatccagcctccagcctgaggacttcgccacctactactgtcagcagagctggaacaccccttggacattcggccagggcaccaaggtggaaatcaagagactcgaggacctgaagaacgtgttcccacctgaggtggccgtgttcgagcctagcgaggccgagatcagccacacccagaaagccaccctcgtgtgcctggctaccggcttctaccccgaccatgtggaactgtcttggtgggtcaacggcaaagaggtgcacagcggcgtgtgtaccgacccccagccactgaaagaacagcccgccctgaacgacagccggtactgcctgagcagcagactgagagtgtccgccaccttctggcagaacccccggaaccacttcagatgccaggtgcagttctacggcctgagcgagaacgacgagtggacccaggacagagccaagcccgtgacccagatcgtgtctgccgaagcctggggcagagccgattgcggctttaccagcgagagctaccagcagggcgtgctgagcgccaccatcctgtacgagatcctgctgggcaaggccaccctgtacgccgtgctggtgtctgccctggtgctgatggctatggtcaagcggaaggacagccggggaagggccaagcgatctggatctggagcaacaaacttctcactactcaaacaagcaggtgacgtggaggagaatcccgggcctactagtatggactggatttggcgcatccttttccttgtcggcgctgctaccggcgcgcattccttcgaagaagttcagctggttgaatctggcggcggactggttcaacctggcggatctctgagactgagctgtgccgcctctggctacgcctttagcagctactgggtcaactgggttcgacaggcccctggcaaaggactggaatgggtcgcccaaatctatcccggcgacggcgacaccaactacaacggcaagttcaagggcagattcaccatcagccgggacaacagcaagaacaccctgtacctccagatgaactccctgagagccgaggacaccgccgtgtactattgtgccagatccatcaccaccgtcgtgggctgcgctatggattattggggccagggaaccctggtcaccgtgtcctctacgcgtatccagaaccctgatcctgccgtgtaccagctgcgggatagcaagagcagcgacaagagcgtgtgtctgttcaccgacttcgacagccagaccaacgtgtcccagagcaaggactccgacgtgtacatcaccgataagtgcgtgctggacatgcggagcatggacttcaagagcaactccgccgtggcctggtccaacaagtccgatttcgcctgcgccaacgccttcaacaacagcattatccccgaggacacattcttcccaagccccgagagcagctgcgacgtgaagctggtggaaaagagcttcgagacagacaccaacctgaacttccagaacctgagcgtgatcggcttcagaatcctgctgctgaaagtggccggctttaacctgctgatgaccctgcggctgtggtccagc

SEQ ID NO: 1245 - DNA, 2193 bp, Artificial Sequence
  Synthetic Polynucleotide
atggccttaccagtgaccgccttgctcctgccgctggccttgctgctccacgccgccaggccggacatccagatgacacagactacatcctccctgtctgcctctctgggagacagagtcaccatcagttgcagggcaagtcaggacattagtaaatatttaaattggtatcagcagaaaccagatggaactgttaaactcctgatctaccatacatcaagattacactcaggagtcccatcaaggttcagtggcagtgggtctggaacagattattctctcaccattagcaacctggagcaagaagatattgccacttacttttgccaacagggtaatacgcttccgtacacgttcggaggggggaccaagctggagatcacaggtggcggtggctcgggcggtggtgggtcgggtggcggcggatctgaggtgaaactgcaggagtcaggacctggcctggtggcgccctcacagagcctgtccgtcacatgcactgtctcaggggtctcattacccgactatggtgtaagctggattcgccagcctccacgaaagggtctggagtggctgggagtaatatggggtagtgaaaccacatactataattcagctctcaaatccagactgaccatcatcaaggacaactccaagagccaagttttcttaaaaatgaacagtctgcaaactgatgacacagccatttactactgtgccaaacattattactacggtggtagctatgctatggactactggggtcaaggaacctcagtcaccgtctcctcaacgcgtggaggcagtggtgtcttcacactcgaagatttcgttggggactggcgacagacagccggctacaacctggaccaagtccttgaacagggaggtgtgtccagtttgtttcagaatctcggggtgtccgtaactccgatccaaaggattgtcctgagcggtgaaaatgggctgaagatcgacatccatgtcatcatcccgtatgaaggtctgagcggcgaccaaatgggccagatcgaaaaaatttttaaggtggtgtaccctgtggatgatcatcactttaaggtgatcctgcactatggcacactggtaatcgacggggttacgccgaacatgatcgactatttcggacggccgtatgaaggcatcgccgtgttcgacggcaaaaagatcactgtaacagggaccctgtggaacggcaacaaaattatcgacgagcgcctgatcaaccccgacggctccctgctgttccgagtaaccatcaacggagtgaccggctggcggctgtgcgaacgcattctggcgctcgagggaggcagctggagccaccctcagtttgaaaaagactacaaagacgatgacgataagggatcagattacaaggatgatgatgacaaggggtcagattataaagacgacgatgataaagggagcgactacaaggacgacgatgacaaggcctggtcccatccccagttcgagaaacaccatcaccaccaccatcatcacactagtggctccggcgagggcagaggaagtctactaacctgcggagatgtggaagaaaatcctggcccacatatgaccgagtacaagcccacggtgcgcctcgccacccgcgacgacgtccccagggccgtacgcaccctcgccgccgcgttcgccgactaccccgccacgcgccacaccgtcgatccggaccgccacatcgagcgggtcaccgagctgcaagaactcttcctcacgcgcgtcgggctcgacatcggcaaggtgtgggtcgcggacgacggcgccgcggtggcggtctggaccacgccggagagcgtcgaagcgggggcggtgttcgccgagatcggcccgcgcatggccgagttgagcggttcccggctggccgcgcagcaacagatggaaggcctcctggcgccgcaccggcccaaggagcccgcgtggttcctggccaccgtcggcgtctcgcccgaccaccagggcaagggtctgggcagcgccgtcgtgctccccggagtggaggcggccgagcgcgccggggtgcccgccttcctggagacctccgcgccccgcaacctccccttctacgagcggctcggcttcaccgtcaccgccgacgtcgaggtgcccgaaggaccgcgcacctggtgcatgacccgcaagcccggtgcctga

SEQ ID NO: 1246 - DNA, 2193 bp, Artificial Sequence
  Synthetic Polynucleotide
atggccttaccagtgaccgccttgctcctgccgctggccttgctgctccacgccgccaggccggagatcgtgatgacccagagccctgccaccctgtctctgagccctggcgaaagagccaccctgagctgtagagccagccaggacatcagcaagtacctgaactggtatcagcagaagcccggccaggcccccagactgctgatctaccacaccagcagactgcacagcggcatccccgccagattttctggctctggcagcggcaccgactacaccctgacaatcagcagcctccagcccgaggacttcgccgtgtacttctgtcagcaaggcaacaccctgccctacaccttcggccagggcaccaagctggaaatcaagggcggaggcggaagtggaggcggaggatctggcggcggaggctctcaggtgcaactccaggaatctggccctggcctcgtgaagcccagcgagacactgagcctgacctgtaccgtgtccggcgtgtccctgcctgactatggcgtgtcctggatcagacagccccctggcaagggcctggaatggatcggagtgatttggggcagcgaaaccacctactacaacagctccctgaagtccagagtgaccatctccaaggacaactccaagaaccaggtgtccctgaagctgagcagcgtgacagccgccgacaccgccgtgtattactgcgccaagcactactactacggcggcagctacgctatggactactggggccagggaaccctcgtgaccgtgtctagtacgcgtggaggcagtggtgtcttcacactcgaagatttcgttggggactggcgacagacagccggctacaacctggaccaagtccttgaacagggaggtgtgtccagtttgtttcagaatctcggggtgtccgtaactccgatccaaaggattgtcctgagcggtgaaaatgggctgaagatcgacatccatgtcatcatcccgtatgaaggtctgagcggcgaccaaatgggccagatcgaaaaaatttttaaggtggtgtaccctgtggatgatcatcactttaaggtgatcctgcactatggcacactggtaatcgacggggttacgccgaacatgatcgactatttcggacggccgtatgaaggcatcgccgtgttcgacggcaaaaagatcactgtaacagggaccctgtggaacggcaacaaaattatcgacgagcgcctgatcaaccccgacggctccctgctgttccgagtaaccatcaacggagtgaccggctggcggctgtgcgaacgcattctggcgctcgagggaggcagctggagccaccctcagtttgaaaaagactacaaagacgatgacgataagggatcagattacaaggatgatgatgacaaggggtcagattataaagacgacgatgataaagggagcgactacaaggacgacgatgacaaggcctggtcccatccccagttcgagaaacaccatcaccaccaccatcatcacactagtggctccggcgagggcagaggaagtctactaacctgcggagatgtggaagaaaatcctggcccacatatgaccgagtacaagcccacggtgcgcctcgccacccgcgacgacgtccccagggccgtacgcaccctcgccgccgcgttcgccgactaccccgccacgcgccacaccgtcgatccggaccgccacatcgagcgggtcaccgagctgcaagaactcttcctcacgcgcgtcgggctcgacatcggcaaggtgtgggtcgcggacgacggcgccgcggtggcggtctggaccacgccggagagcgtcgaagcgggggcggtgttcgccgagatcggcccgcgcatggccgagttgagcggttcccggctggccgcgcagcaacagatggaaggcctcctggcgccgcaccggcccaaggagcccgcgtggttcctggccaccgtcggcgtctcgcccgaccaccagggcaagggtctgggcagcgccgtcgtgctccccggagtggaggcggccgagcgcgccggggtgcccgccttcctggagacctccgcgccccgcaacctccccttctacgagcggctcggcttcaccgtcaccgccgacgtcgaggtgcccgaaggaccgcgcacctggtgcatgacccgcaagcccggtgcctga

SEQ ID NO: 1247 - DNA, 2199 bp, Artificial Sequence
  Synthetic Polynucleotide
atggccttaccagtgaccgccttgctcctgccgctggccttgctgctccacgccgccaggccggacatccagatgacccagagccctagctcactgagcgccagcgtgggcgacagggtgaccattacctgctccgccagccaggacatcagcaactacctgaactggtaccagcagaagcccggcaaggcccccaagctgctgatctactacacctccaacctgcactccggcgtgcccagcaggttcagcggaagcggcagcggcaccgatttcaccctgaccatctccagcctgcagcccgaggacttcgccacctactactgccagcagtacaggaagctcccctggactttcggccagggcaccaaactggagatcaagcgtggcggaggcggaagtggaggcggaggatctggcggcggaggctctcaggtgcagctggtccagagcggcgccgaagtgaagaagcccggcagctccgtgaaagtgagctgcaaggccagcggcggcaccttcagcaactactggatgcactgggtgaggcaggcccccggacagggcctggagtggatgggcgccacctacaggggccacagcgacacctactacaaccagaagttcaagggccgggtgaccatcaccgccgacaagagcaccagcaccgcctacatggaactgagcagcctcaggagcgaggacaccgctgtgtattactgcgccaggggcgccatctacgacggctacgacgtgctggacaactggggccagggcacactggtgaccgtgtccagcacgcgtggaggcagtggtgtcttcacactcgaagatttcgttggggactggcgacagacagccggctacaacctggaccaagtccttgaacagggaggtgtgtccagtttgtttcagaatctcggggtgtccgtaactccgatccaaaggattgtcctgagcggtgaaaatgggctgaagatcgacatccatgtcatcatcccgtatgaaggtctgagcggcgaccaaatgggccagatcgaaaaaatttttaaggtggtgtaccctgtggatgatcatcactttaaggtgatcctgcactatggcacactggtaatcgacggggttacgccgaacatgatcgactatttcggacggccgtatgaaggcatcgccgtgttcgacggcaaaaagatcactgtaacagggaccctgtggaacggcaacaaaattatcgacgagcgcctgatcaaccccgacggctccctgctgttccgagtaaccatcaacggagtgaccggctggcggctgtgcgaacgcattctggcgctcgagggaggcagctggagccaccctcagtttgaaaaagactacaaagacgatgacgataagggatcagattacaaggatgatgatgacaaggggtcagattataaagacgacgatgataaagggagcgactacaaggacgacgatgacaaggcctggtcccatccccagttcgagaaacaccatcaccaccaccatcatcacactagtggctccggcgagggcagaggaagtctactaacctgcggagatgtggaagaaaatcctggcccacatatgaccgagtacaagcccacggtgcgcctcgccacccgcgacgacgtccccagggccgtacgcaccctcgccgccgcgttcgccgactaccccgccacgcgccacaccgtcgatccggaccgccacatcgagcgggtcaccgagctgcaagaactcttcctcacgcgcgtcgggctcgacatcggcaaggtgtgggtcgcggacgacggcgccgcggtggcggtctggaccacgccggagagcgtcgaagcgggggcggtgttcgccgagatcggcccgcgcatggccgagttgagcggttcccggctggccgcgcagcaacagatggaaggcctcctggcgccgcaccggcccaaggagcccgcgtggttcctggccaccgtcggcgtctcgcccgaccaccagggcaagggtctgggcagcgccgtcgtgctccccggagtggaggcggccgagcgcgccggggtgcccgccttcctggagacctccgcgccccgcaacctccccttctacgagcggctcggcttcaccgtcaccgccgacgtcgaggtgcccgaaggaccgcgcacctggtgcatgacccgcaagcccggtgcctga

SEQ ID NO: 1248 - DNA, 2199 bp, Artificial Sequence
  Synthetic Polynucleotide
atggccttaccagtgaccgccttgctcctgccgctggccttgctgctccacgccgccaggccggacatcgtgctgacacagagccctgccaccctgtctctgagccctggcgatagagccaccatcagctgtagagccagcgagagcgtgaccatcctgggcagccacctgatctactggtatcagcagaagcccggccagccccccagactgctgattcagctggcctccaatgtgcagaccggcgtgccagccagattttccggcagcggcagcagaaccgacttcaccctgaccatcagcagcgtggaacccgaggacttcgccgtgtactactgcctccagagccggaccatccccagaacattcggccagggcaccaagctggaaatcaagagaggcggaggcggaagtggaggcggaggatctggcggcggaggctctcaggtgcagctggtgcagtctggccccgaagtgaagaaacccggcgagtccgtgaagatcagctgcaaggccagcggctacaccttccggcactacagcatgaactgggtcaagcaggccccaggccagggcctgaagtggatgggcagaatcaacaccgagagcggcgtgcccatctacgccgacgacttcaagggccggttcagcttcaccgtggacaccagcgccagcaccgcctacctggaaatctccagcctgaccagcgaggataccgccgtgtatttctgctccaacgactacctgtacagcctggatttctggggccagggaaccaccctgacagtgtcctctacgcgtggaggcagtggtgtcttcacactcgaagatttcgttggggactggcgacagacagccggctacaacctggaccaagtccttgaacagggaggtgtgtccagtttgtttcagaatctcggggtgtccgtaactccgatccaaaggattgtcctgagcggtgaaaatgggctgaagatcgacatccatgtcatcatcccgtatgaaggtctgagcggcgaccaaatgggccagatcgaaaaaatttttaaggtggtgtaccctgtggatgatcatcactttaaggtgatcctgcactatggcacactggtaatcgacggggttacgccgaacatgatcgactatttcggacggccgtatgaaggcatcgccgtgttcgacggcaaaaagatcactgtaacagggaccctgtggaacggcaacaaaattatcgacgagcgcctgatcaaccccgacggctccctgctgttccgagtaaccatcaacggagtgaccggctggcggctgtgcgaacgcattctggcgctcgagggaggcagctggagccaccctcagtttgaaaaagactacaaagacgatgacgataagggatcagattacaaggatgatgatgacaaggggtcagattataaagacgacgatgataaagggagcgactacaaggacgacgatgacaaggcctggtcccatccccagttcgagaaacaccatcaccaccaccatcatcacactagtggctccggcgagggcagaggaagtctactaacctgcggagatgtggaagaaaatcctggcccacatatgaccgagtacaagcccacggtgcgcctcgccacccgcgacgacgtccccagggccgtacgcaccctcgccgccgcgttcgccgactaccccgccacgcgccacaccgtcgatccggaccgccacatcgagcgggtcaccgagctgcaagaactcttcctcacgcgcgtcgggctcgacatcggcaaggtgtgggtcgcggacgacggcgccgcggtggcggtctggaccacgccggagagcgtcgaagcgggggcggtgttcgccgagatcggcccgcgcatggccgagttgagcggttcccggctggccgcgcagcaacagatggaaggcctcctggcgccgcaccggcccaaggagcccgcgtggttcctggccaccgtcggcgtctcgcccgaccaccagggcaagggtctgggcagcgccgtcgtgctccccggagtggaggcggccgagcgcgccggggtgcccgccttcctggagacctccgcgccccgcaacctccccttctacgagcggctcggcttcaccgtcaccgccgacgtcgaggtgcccgaaggaccgcgcacctggtgcatgacccgcaagcccggtgcctga

SEQ ID NO: 1249 - DNA, 2202 bp, Artificial Sequence
  Synthetic Polynucleotide
atggccttaccagtgaccgccttgctcctgccgctggccttgctgctccacgccgccaggccggacgagatcgtgctgacacagagccctgccaccctgtctctgagccctggcgaaagagccaccctgagctgtagagccagccagagcgtgtccagctacctggcctggtatcagcagaagcccggccaggctccccggctgctgatctacgatgccagcaatagagccaccggcatccccgccagattttccggctctggcagcggcaccgacttcaccctgaccatcagctccctggaacccgaggacttcgccgtgtactactgccagcagcggagcaactggcccatcacattcggccagggcacccggctggaaatcaaaggcggaggcggaagtggaggcggaggatctggcggcggaggctctgaagtgcagctggtggaatcaggcggcggactggtgcagcctggcagaagcctgagactgagctgtgccgccagcggcttcaccttcaacgactacgccatgcactgggtgcgccaggcccctggaaaaggactggaatgggtgtccacaatcagctggaacagcggcagcatcggctacgccgatagcgtgaagggccggttcaccatcagccgggacaacgccaagaagtccctgtacctccagatgaacagcctgcgggccgaggacacagccctgtactattgcgccaaggacatccagtacggcaactactactacggcatggacgtgtggggccagggaaccaccgtgaccgtgtcatctacgcgtggaggcagtggtgtcttcacactcgaagatttcgttggggactggcgacagacagccggctacaacctggaccaagtccttgaacagggaggtgtgtccagtttgtttcagaatctcggggtgtccgtaactccgatccaaaggattgtcctgagcggtgaaaatgggctgaagatcgacatccatgtcatcatcccgtatgaaggtctgagcggcgaccaaatgggccagatcgaaaaaatttttaaggtggtgtaccctgtggatgatcatcactttaaggtgatcctgcactatggcacactggtaatcgacggggttacgccgaacatgatcgactatttcggacggccgtatgaaggcatcgccgtgttcgacggcaaaaagatcactgtaacagggaccctgtggaacggcaacaaaattatcgacgagcgcctgatcaaccccgacggctccctgctgttccgagtaaccatcaacggagtgaccggctggcggctgtgcgaacgcattctggcgctcgagggaggcagctggagccaccctcagtttgaaaaagactacaaagacgatgacgataagggatcagattacaaggatgatgatgacaaggggtcagattataaagacgacgatgataaagggagcgactacaaggacgacgatgacaaggcctggtcccatccccagttcgagaaacaccatcaccaccaccatcatcacactagtggctccggcgagggcagaggaagtctactaacctgcggagatgtggaagaaaatcctggcccacatatgaccgagtacaagcccacggtgcgcctcgccacccgcgacgacgtccccagggccgtacgcaccctcgccgccgcgttcgccgactaccccgccacgcgccacaccgtcgatccggaccgccacatcgagcgggtcaccgagctgcaagaactcttcctcacgcgcgtcgggctcgacatcggcaaggtgtgggtcgcggacgacggcgccgcggtggcggtctggaccacgccggagagcgtcgaagcgggggcggtgttcgccgagatcggcccgcgcatggccgagttgagcggttcccggctggccgcgcagcaacagatggaaggcctcctggcgccgcaccggcccaaggagcccgcgtggttcctggccaccgtcggcgtctcgcccgaccaccagggcaagggtctgggcagcgccgtcgtgctccccggagtggaggcggccgagcgcgccggggtgcccgccttcctggagacctccgcgccccgcaacctccccttctacgagcggctcggcttcaccgtcaccgccgacgtcgaggtgcccgaaggaccgcgcacctggtgcatgacccgcaagcccggtgcctga

SEQ ID NO: 1250 - DNA, 33 bp, Artificial Sequence; identical to SEQ ID NO: 903
  Synthetic Polynucleotide
  misc_feature (30)..(33): n is a, c, g, or t

SEQ ID NO: 1251 - DNA, 1830 bp, Artificial Sequence
  Synthetic Polynucleotide
atggccctgcctgtgacagctctgctgctgcctctggcactgctgctgcacgccgccagacctgaagttcagctggttgaatctggcggcggactggttcaacctggcggatctctgagactgagctgtgccgcctctggctacgcctttagcagctactgcgtcaactgggttcgacaggcccctggcaaagaagaggaatgggtcgcccaaatctgtcccggcgacggcgacaccaactacaacggcaagttcaagggcagattcaccatcagccgggacaacagcaagaacaccctgtacctccagatgaactccctgagagccgaggacaccgccgtgtactattgtgccagatccatcaccaccgtcgtgggctgcgcttacgattattggggccagggaaccctggtcaccgtgtcctctacgcgtggaggcagtggtgtcttcacactcgaagatttcgttggggactggcgacagacagccggctacaacctggaccaagtccttgaacagggaggtgtgtccagtttgtttcagaatctcggggtgtccgtaactccgatccaaaggattgtcctgagcggtgaaaatgggctgaagatcgacatccatgtcatcatcccgtatgaaggtctgagcggcgaccaaatgggccagatcgaaaaaatttttaaggtggtgtaccctgtggatgatcatcactttaaggtgatcctgcactatggcacactggtaatcgacggggttacgccgaacatgatcgactatttcggacggccgtatgaaggcatcgccgtgttcgacggcaaaaagatcactgtaacagggaccctgtggaacggcaacaaaattatcgacgagcgcctgatcaaccccgacggctccctgctgttccgagtaaccatcaacggagtgaccggctggcggctgtgcgaacgcattctggcgctcgagggaggcagctggagccaccctcagtttgaaaaagactacaaagacgatgacgataagggatcagattacaaggatgatgatgacaaggggtcagattataaagacgacgatgataaagggagcgactacaaggacgacgatgacaaggcctggtcccatccccagttcgagaaacaccatcaccaccaccatcatcacactagtggctccggcgagggcagaggaagtctactaacctgcggagatgtggaagaaaatcctggcccacatatgaccgagtacaagcccacggtgcgcctcgccacccgcgacgacgtccccagggccgtacgcaccctcgccgccgcgttcgccgactaccccgccacgcgccacaccgtcgatccggaccgccacatcgagcgggtcaccgagctgcaagaactcttcctcacgcgcgtcgggctcgacatcggcaaggtgtgggtcgcggacgacggcgccgcggtggcggtctggaccacgccggagagcgtcgaagcgggggcggtgttcgccgagatcggcccgcgcatggccgagttgagcggttcccggctggccgcgcagcaacagatggaaggcctcctggcgccgcaccggcccaaggagcccgcgtggttcctggccaccgtcggcgtctcgcccgaccaccagggcaagggtctgggcagcgccgtcgtgctccccggagtggaggcggccgagcgcgccggggtgcccgccttcctggagacctccgcgccccgcaacctccccttctacgagcggctcggcttcaccgtcaccgccgacgtcgaggtgcccgaaggaccgcgcacctggtgcatgacccgcaagcccggtgcctga

SEQ ID NO: 1252 - DNA, 1824 bp, Artificial Sequence
  Synthetic Polynucleotide
atggccttaccagtgaccgccttgctcctgccgctggccttgctgctccacgccgccaggccggaagtgcaactggtggaatcaggcggcggactggtgcagcctggcggatctctgagactgagctgtgccgccagcggcttcgacttcagccggtactgtatgagctgggtgcgccaggcccctggcaaagaagaggaatggatcggcgaaatctgccccgacagcagcaccatcaactacgcccccagcctgaaggacaagttcatcatcagccgggacaacgccaagaacagcctgtacctccagatgaactccctgcgggccgaggacaccgccgtgtactattgcgccagacccgacggcaactactggtactacgacgtgtggggccagggaaccctcgtgaccgtgtcatctacgcgtggaggcagtggtgtcttcacactcgaagatttcgttggggactggcgacagacagccggctacaacctggaccaagtccttgaacagggaggtgtgtccagtttgtttcagaatctcggggtgtccgtaactccgatccaaaggattgtcctgagcggtgaaaatgggctgaagatcgacatccatgtcatcatcccgtatgaaggtctgagcggcgaccaaatgggccagatcgaaaaaatttttaaggtggtgtaccctgtggatgatcatcactttaaggtgatcctgcactatggcacactggtaatcgacggggttacgccgaacatgatcgactatttcggacggccgtatgaaggcatcgccgtgttcgacggcaaaaagatcactgtaacagggaccctgtggaacggcaacaaaattatcgacgagcgcctgatcaaccccgacggctccctgctgttccgagtaaccatcaacggagtgaccggctggcggctgtgcgaacgcattctggcgctcgagggaggcagctggagccaccctcagtttgaaaaagactacaaagacgatgacgataagggatcagattacaaggatgatgatgacaaggggtcagattataaagacgacgatgataaagggagcgactacaaggacgacgatgacaaggcctggtcccatccccagttcgagaaacaccatcaccaccaccatcatcacactagtggctccggcgagggcagaggaagtctactaacctgcggagatgtggaagaaaatcctggcccacatatgaccgagtacaagcccacggtgcgcctcgccacccgcgacgacgtccccagggccgtacgcaccctcgccgccgcgttcgccgactaccccgccacgcgccacaccgtcgatccggaccgccacatcgagcgggtcaccgagctgcaagaactcttcctcacgcgcgtcgggctcgacatcggcaaggtgtgggtcgcggacgacggcgccgcggtggcggtctggaccacgccggagagcgtcgaagcgggggcggtgttcgccgagatcggcccgcgcatggccgagttgagcggttcccggctggccgcgcagcaacagatggaaggcctcctggcgccgcaccggcccaaggagcccgcgtggttcctggccaccgtcggcgtctcgcccgaccaccagggcaagggtctgggcagcgccgtcgtgctccccggagtggaggcggccgagcgcgccggggtgcccgccttcctggagacctccgcgccccgcaacctccccttctacgagcggctcggcttcaccgtcaccgccgacgtcgaggtgcccgaaggaccgcgcacctggtgcatgacccgcaagcccggtgcctga

SEQ ID NO: 1253 - DNA, 2235 bp, Artificial Sequence
  Synthetic Polynucleotide
atggccttaccagtgaccgccttgctcctgccgctggccttgctgctccacgccgccaggccgcaggttcagctggttcagtctggggccgaagtgaagaaacctggggcctctgtgaaggtgtcctgcaaagcaagcggcggcaccttcagcaactactggatgcactgggtccgacaggcccctggacaaggacttgaatggatgggctggacctacagaggccacagcgacaccaattacgcccagaaattccagggcagagtgaccatgaccagagacaccagcatcagcaccgcctacatggaactgagccggctgagatccgatgacaccgccgtgtactattgcgccagaggggccatctacgacggctacgacgtgctggataatagaggccagggcaccctggtcacagtgtctagcggatccggcggaggcggaagtggaggcggaggatctttcgaagtgcagctgctggaatctggtggcggactggttcaacctggcggctctctgagactgtcttgtgccgccagcggcttcaccttcaacagctttgccatgagctgggttcgacaagctcccggcaaagggctcgaatgggtgtccgccatttctggctctggcggcggaacctactacgccgattctgtgaaaggccggttcaccatcagccgggacatcagcaagaacaccctgtacctccagatgaacagcctgagagccgaggatacagctgtgtactactgtgccaaggacaagatcctttggttcggcgagcccgtgttcgactacagaggacagggaacactcgtgaccgtgtcctctacgcgtggaggcagtggtgtcttcacactcgaagatttcgttggggactggcgacagacagccggctacaacctggaccaagtccttgaacagggaggtgtgtccagtttgtttcagaatctcggggtgtccgtaactccgatccaaaggattgtcctgagcggtgaaaatgggctgaagatcgacatccatgtcatcatcccgtatgaaggtctgagcggcgaccaaatgggccagatcgaaaaaatttttaaggtggtgtaccctgtggatgatcatcactttaaggtgatcctgcactatggcacactggtaatcgacggggttacgccgaacatgatcgactatttcggacggccgtatgaaggcatcgccgtgttcgacggcaaaaagatcactgtaacagggaccctgtggaacggcaacaaaattatcgacgagcgcctgatcaaccccgacggctccctgctgttccgagtaaccatcaacggagtgaccggctggcggctgtgcgaacgcattctggcgctcgagggaggcagctggagccaccctcagtttgaaaaagactacaaagacgatgacgataagggatcagattacaaggatgatgatgacaaggggtcagattataaagacgacgatgataaagggagcgactacaaggacgacgatgacaaggcctggtcccatccccagttcgagaaacaccatcaccaccaccatcatcacactagtggctccggcgagggcagaggaagtctactaacctgcggagatgtggaagaaaatcctggcccacatatgaccgagtacaagcccacggtgcgcctcgccacccgcgacgacgtccccagggccgtacgcaccctcgccgccgcgttcgccgactaccccgccacgcgccacaccgtcgatccggaccgccacatcgagcgggtcaccgagctgcaagaactcttcctcacgcgcgtcgggctcgacatcggcaaggtgtgggtcgcggacgacggcgccgcggtggcggtctggaccacgccggagagcgtcgaagcgggggcggtgttcgccgagatcggcccgcgcatggccgagttgagcggttcccggctggccgcgcagcaacagatggaaggcctcctggcgccgcaccggcccaaggagcccgcgtggttcctggccaccgtcggcgtctcgcccgaccaccagggcaagggtctgggcagcgccgtcgtgctccccggagtggaggcggccgagcgcgccggggtgcccgccttcctggagacctccgcgccccgcaacctccccttctacgagcggctcggcttcaccgtcaccgccgacgtcgaggtgcccgaaggaccgcgcacctggtgcatgacccgcaagcccggtgcctga

SEQ ID NO: 1254 - DNA, 1830 bp, Artificial Sequence
  Synthetic Polynucleotide
atggccttaccagtgaccgccttgctcctgccgctggccttgctgctccacgccgccaggccgcaggttcagctggttcagtctggggccgaagtgaagaaacctggggcctctgtgaaggtgtcctgcaaagcaagcggcggcaccttcagcaactactggatgcactgggtccgacaggcccctggacaaggacttgaatggatgggctggacctacagaggccacagcgacaccaattacgcccagaaattccagggcagagtgaccatgaccagagacaccagcatcagcaccgcctacatggaactgagccggctgagatccgatgacaccgccgtgtactattgcgccagaggggccatctacgacggctacgacgtgctggataatagaggccagggcaccctggtcacagtgtctagcacgcgtggaggcagtggtgtcttcacactcgaagatttcgttggggactggcgacagacagccggctacaacctggaccaagtccttgaacagggaggtgtgtccagtttgtttcagaatctcggggtgtccgtaactccgatccaaaggattgtcctgagcggtgaaaatgggctgaagatcgacatccatgtcatcatcccgtatgaaggtctgagcggcgaccaaatgggccagatcgaaaaaatttttaaggtggtgtaccctgtggatgatcatcactttaaggtgatcctgcactatggcacactggtaatcgacggggttacgccgaacatgatcgactatttcggacggccgtatgaaggcatcgccgtgttcgacggcaaaaagatcactgtaacagggaccctgtggaacggcaacaaaattatcgacgagcgcctgatcaaccccgacggctccctgctgttccgagtaaccatcaacggagtgaccggctggcggctgtgcgaacgcattctggcgctcgagggaggcagctggagccaccctcagtttgaaaaagactacaaagacgatgacgataagggatcagattacaaggatgatgatgacaaggggtcagattataaagacgacgatgataaagggagcgactacaaggacgacgatgacaaggcctggtcccatccccagttcgagaaacaccatcaccaccaccatcatcacactagtggctccggcgagggcagaggaagtctactaacctgcggagatgtggaagaaaatcctggcccacatatgaccgagtacaagcccacggtgcgcctcgccacccgcgacgacgtccccagggccgtacgcaccctcgccgccgcgttcgccgactaccccgccacgcgccacaccgtcgatccggaccgccacatcgagcgggtcaccgagctgcaagaactcttcctcacgcgcgtcgggctcgacatcggcaaggtgtgggtcgcggacgacggcgccgcggtggcggtctggaccacgccggagagcgtcgaagcgggggcggtgttcgccgagatcggcccgcgcatggccgagttgagcggttcccggctggccgcgcagcaacagatggaaggcctcctggcgccgcaccggcccaaggagcccgcgtggttcctggccaccgtcggcgtctcgcccgaccaccagggcaagggtctgggcagcgccgtcgtgctccccggagtggaggcggccgagcgcgccggggtgcccgccttcctggagacctccgcgccccgcaacctccccttctacgagcggctcggcttcaccgtcaccgccgacgtcgaggtgcccgaaggaccgcgcacctggtgcatgacccgcaagcccggtgcctga

SEQ ID NO: 1255 - DNA, 1827 bp, Artificial Sequence
  Synthetic Polynucleotide
atggactggatttggcgcatccttttccttgtcggcgctgctaccggcgcccattcccaggtgcagctggttgaatctggcggaggactggttcagcctggcggatctctgagactgtcttgtgccgccagcggcttcaccttcagcaactacggcatgagctgggtccgacaggcccctggaaaaggactggaactggtgtccagcatcagaagcgacggcagctggacctactacgccgattctgtgaagggcagattcaccatcagccgggacatcagcaagaacaccctggacctccagatgaacagcctgagagccgaggataccgccgtgtactactgcgccagacggtactggtctaagagccacgccagcgtgaccgactatagaggccagggaacactggtcaccgtgtctagcacgcgtggaggcagtggtgtcttcacactcgaagatttcgttggggactggcgacagacagccggctacaacctggaccaagtccttgaacagggaggtgtgtccagtttgtttcagaatctcggggtgtccgtaactccgatccaaaggattgtcctgagcggtgaaaatgggctgaagatcgacatccatgtcatcatcccgtatgaaggtctgagcggcgaccaaatgggccagatcgaaaaaatttttaaggtggtgtaccctgtggatgatcatcactttaaggtgatcctgcactatggcacactggtaatcgacggggttacgccgaacatgatcgactatttcggacggccgtatgaaggcatcgccgtgttcgacggcaaaaagatcactgtaacagggaccctgtggaacggcaacaaaattatcgacgagcgcctgatcaaccccgacggctccctgctgttccgagtaaccatcaacggagtgaccggctggcggctgtgcgaacgcattctggcgctcgagggaggcagctggagccaccctcagtttgaaaaagactacaaagacgatgacgataagggatcagattacaaggatgatgatgacaaggggtcagattataaagacgacgatgataaagggagcgactacaaggacgacgatgacaaggcctggtcccatccccagttcgagaaacaccatcaccaccaccatcatcacactagtggctccggcgagggcagaggaagtctactaacctgcggagatgtggaagaaaatcctggcccacatatgaccgagtacaagcccacggtgcgcctcgccacccgcgacgacgtccccagggccgtacgcaccctcgccgccgcgttcgccgactaccccgccacgcgccacaccgtcgatccggaccgccacatcgagcgggtcaccgagctgcaagaactcttcctcacgcgcgtcgggctcgacatcggcaaggtgtgggtcgcggacgacggcgccgcggtggcggtctggaccacgccggagagcgtcgaagcgggggcggtgttcgccgagatcggcccgcgcatggccgagttgagcggttcccggctggccgcgcagcaacagatggaaggcctcctggcgccgcaccggcccaaggagcccgcgtggttcctggccaccgtcggcgtctcgcccgaccaccagggcaagggtctgggcagcgccgtcgtgctccccggagtggaggcggccgagcgcgccggggtgcccgccttcctggagacctccgcgccccgcaacctccccttctacgagcggctcggcttcaccgtcaccgccgacgtcgaggtgcccgaaggaccgcgcacctggtgcatgacccgcaagcccggtgcctga

SEQ ID NO: 1256 - DNA, 2235 bp, Artificial Sequence
  Synthetic Polynucleotide
atggactggatttggcgcatccttttccttgtcggcgctgctaccggcgcccattcccaggtgcagctggttgaatctggcggaggactggttcagcctggcggatctctgagactgtcttgtgccgccagcggcttcaccttcagcaactacggcatgagctgggtccgacaggcccctggaaaaggactggaactggtgtccagcatcagaagcgacggcagctggacctactacgccgattctgtgaagggcagattcaccatcagccgggacatcagcaagaacaccctggacctccagatgaacagcctgagagccgaggataccgccgtgtactactgcgccagacggtactggtctaagagccacgccagcgtgaccgactatagaggccagggaacactggtcaccgtgtctagcggatccggcggaggcggaagtggaggcggaggatctttcgaacaactgcaactgcaagagtctggccctggcctggtcaagcctagcgaaacactgagcctgacctgtacagtgtctggcggctctgtgtccagcggcagctattactggggctggatcagacagcctcctggcaagggactcgaatggatcggccacatcagctactccggcagcacctactacaaccccagcctgaagtccagagtgaccatctccgtggacacctccagaaaccagttctccctgaagctgagcagcgtgacagccgccgatacagctgtgtattattgtgccagaggcagaggctacgccaccagcctggccttcgatattagaggacagggcacccttgtgacagtgtcctctacgcgtggaggcagtggtgtcttcacactcgaagatttcgttggggactggcgacagacagccggctacaacctggaccaagtccttgaacagggaggtgtgtccagtttgtttcagaatctcggggtgtccgtaactccgatccaaaggattgtcctgagcggtgaaaatgggctgaagatcgacatccatgtcatcatcccgtatgaaggtctgagcggcgaccaaatgggccagatcgaaaaaatttttaaggtggtgtaccctgtggatgatcatcactttaaggtgatcctgcactatggcacactggtaatcgacggggttacgccgaacatgatcgactatttcggacggccgtatgaaggcatcgccgtgttcgacggcaaaaagatcactgtaacagggaccctgtggaacggcaacaaaattatcgacgagcgcctgatcaaccccgacggctccctgctgttccgagtaaccatcaacggagtgaccggctggcggctgtgcgaacgcattctggcgctcgagggaggcagctggagccaccctcagtttgaaaaagactacaaagacgatgacgataagggatcagattacaaggatgatgatgacaaggggtcagattataaagacgacgatgataaagggagcgactacaaggacgacgatgacaaggcctggtcccatccccagttcgagaaacaccatcaccaccaccatcatcacactagtggctccggcgagggcagaggaagtctactaacctgcggagatgtggaagaaaatcctggcccacatatgaccgagtacaagcccacggtgcgcctcgccacccgcgacgacgtccccagggccgtacgcaccctcgccgccgcgttcgccgactaccccgccacgcgccacaccgtcgatccggaccgccacatcgagcgggtcaccgagctgcaagaactcttcctcacgcgcgtcgggctcgacatcggcaaggtgtgggtcgcggacgacggcgccgcggtggcggtctggaccacgccggagagcgtcgaagcgggggcggtgttcgccgagatcggcccgcgcatggccgagttgagcggttcccggctggccgcgcagcaacagatggaaggcctcctggcgccgcaccggcccaaggagcccgcgtggttcctggccaccgtcggcgtctcgcccgaccaccagggcaagggtctgggcagcgccgtcgtgctccccggagtggaggcggccgagcgcgccggggtgcccgccttcctggagacctccgcgccccgcaacctccccttctacgagcggctcggcttcaccgtcaccgccgacgtcgaggtgcccgaaggaccgcgcacctggtgcatgacccgcaagcccggtgcctga

SEQ ID NO: 1257 - DNA, 1830 bp, Artificial Sequence
  Synthetic Polynucleotide
atggccttaccagtgaccgccttgctcctgccgctggccttgctgctccacgccgccaggccggaagtgcaactggttgaatctggcggcggactggttaagcctggcggatctctgaagctgagctgtgccgccagcggctacacctttaccagctacgtgatgggctgggtccgacgagcccctggcaaagaagaggagctgatcggctacatcaacccctacaacgatggcaccaagtacaacgagaagttccagggcagagtgaccatcagctccgacaagagcatcagcaccgcctacatggaactgagcagcctgagaagcgaggataccgccatgtactattgcgccagaggcacctactactacggcaccagagtgttcgactacagaggccagggaaccctggtcacagtctcttctacgcgtggaggcagtggtgtcttcacactcgaagatttcgttggggactggcgacagacagccggctacaacctggaccaagtccttgaacagggaggtgtgtccagtttgtttcagaatctcggggtgtccgtaactccgatccaaaggattgtcctgagcggtgaaaatgggctgaagatcgacatccatgtcatcatcccgtatgaaggtctgagcggcgaccaaatgggccagatcgaaaaaatttttaaggtggtgtaccctgtggatgatcatcactttaaggtgatcctgcactatggcacactggtaatcgacggggttacgccgaacatgatcgactatttcggacggccgtatgaaggcatcgccgtgttcgacggcaaaaagatcactgtaacagggaccctgtggaacggcaacaaaattatcgacgagcgcctgatcaaccccgacggctccctgctgttccgagtaaccatcaacggagtgaccggctggcggctgtgcgaacgcattctggcgctcgagggaggcagctggagccaccctcagtttgaaaaagactacaaagacgatgacgataagggatcagattacaaggatgatgatgacaaggggtcagattataaagacgacgatgataaagggagcgactacaaggacgacgatgacaaggcctggtcccatccccagttcgagaaacaccatcaccaccaccatcatcacactagtggctccggcgagggcagaggaagtctactaacctgcggagatgtggaagaaaatcctggcccacatatgaccgagtacaagcccacggtgcgcctcgccacccgcgacgacgtccccagggccgtacgcaccctcgccgccgcgttcgccgactaccccgccacgcgccacaccgtcgatccggaccgccacatcgagcgggtcaccgagctgcaagaactcttcctcacgcgcgtcgggctcgacatcggcaaggtgtgggtcgcggacgacggcgccgcggtggcggtctggaccacgccggagagcgtcgaagcgggggcggtgttcgccgagatcggcccgcgcatggccgagttgagcggttcccggctggccgcgcagcaacagatggaaggcctcctggcgccgcaccggcccaaggagcccgcgtggttcctggccaccgtcggcgtctcgcccgaccaccagggcaagggtctgggcagcgccgtcgtgctccccggagtggaggcggccgagcgcgccggggtgcccgccttcctggagacctccgcgccccgcaacctccccttctacgagcggctcggcttcaccgtcaccgccgacgtcgaggtgcccgaaggaccgcgcacctggtgcatgacccgcaagcccggtgcctga

SEQ ID NO: 1258 - DNA, 1836 bp, Artificial Sequence
  Synthetic Polynucleotide
atggccttaccagtgaccgccttgctcctgccgctggccttgctgctccacgccgccaggccggaagtgcagctggttgagtctggcggcggacttgtgaaacctggcggaagcctgaagctgagctgtgccgcttctggcttcgccttcagcatctacgacatgggctgggtccgaagagcccctggcaaagaagaggagctggtcgcctacatcagctctggcggagggacaacctactatcccgacaccgtgaagggcagattcaccatcagccgggacaacgccaagaacaccctgtacctccagatgagcagcctgagagccgaggacaccgccatgtactactgtgccagacacagcggctacggcagctcttacggcgtgctgtttgcctatagaggccagggcacactggtcaccgttagctctacgcgtggaggcagtggtgtcttcacactcgaagatttcgttggggactggcgacagacagccggctacaacctggaccaagtccttgaacagggaggtgtgtccagtttgtttcagaatctcggggtgtccgtaactccgatccaaaggattgtcctgagcggtgaaaatgggctgaagatcgacatccatgtcatcatcccgtatgaaggtctgagcggcgaccaaatgggccagatcgaaaaaatttttaaggtggtgtaccctgtggatgatcatcactttaaggtgatcctgcactatggcacactggtaatcgacggggttacgccgaacatgatcgactatttcggacggccgtatgaaggcatcgccgtgttcgacggcaaaaagatcactgtaacagggaccctgtggaacggcaacaaaattatcgacgagcgcctgatcaaccccgacggctccctgctgttccgagtaaccatcaacggagtgaccggctggcggctgtgcgaacgcattctggcgctcgagggaggcagctggagccaccctcagtttgaaaaagactacaaagacgatgacgataagggatcagattacaaggatgatgatgacaaggggtcagattataaagacgacgatgataaagggagcgactacaaggacgacgatgacaaggcctggtcccatccccagttcgagaaacaccatcaccaccaccatcatcacactagtggctccggcgagggcagaggaagtctactaacctgcggagatgtggaagaaaatcctggcccacatatgaccgagtacaagcccacggtgcgcctcgccacccgcgacgacgtccccagggccgtacgcaccctcgccgccgcgttcgccgactaccccgccacgcgccacaccgtcgatccggaccgccacatcgagcgggtcaccgagctgcaagaactcttcctcacgcgcgtcgggctcgacatcggcaaggtgtgggtcgcggacgacggcgccgcggtggcggtctggaccacgccggagagcgtcgaagcgggggcggtgttcgccgagatcggcccgcgcatggccgagttgagcggttcccggctggccgcgcagcaacagatggaaggcctcctggcgccgcaccggcccaaggagcccgcgtggttcctggccaccgtcggcgtctcgcccgaccaccagggcaagggtctgggcagcgccgtcgtgctccccggagtggaggcggccgagcgcgccggggtgcccgccttcctggagacctccgcgccccgcaacctccccttctacgagcggctcggcttcaccgtcaccgccgacgtcgaggtgcccgaaggaccgcgcacctggtgcatgacccgcaagcccggtgcctga

SEQ ID NO: 1259 - DNA, 1839 bp, Artificial Sequence
  Synthetic Polynucleotide
atggccttaccagtgaccgccttgctcctgccgctggccttgctgctccacgccgccaggccggaggtgcaactggttgagtctggcggaggactggtgcagcctggaagaagcctgagactgtcttgtgccgccagcggcttcaccttcgacgattatgccatgggctgggtccgaagagcccctggcaaagaagaggaactggtgtccggcatctcctggaacagcggctctatcggctacgccgattccgtgaagggcagattcaccatcagccgggacaacgccaagaacagcctgtacctccagatgaactccctgagagccgaggacacagccctgtactactgcgccaaagacaaaggcggaggctactacgacttttggagcggcagcgattatagaggccagggcacactggtcacagtgtctagcacgcgtggaggcagtggtgtcttcacactcgaagatttcgttggggactggcgacagacagccggctacaacctggaccaagtccttgaacagggaggtgtgtccagtttgtttcagaatctcggggtgtccgtaactccgatccaaaggattgtcctgagcggtgaaaatgggctgaagatcgacatccatgtcatcatcccgtatgaaggtctgagcggcgaccaaatgggccagatcgaaaaaatttttaaggtggtgtaccctgtggatgatcatcactttaaggtgatcctgcactatggcacactggtaatcgacggggttacgccgaacatgatcgactatttcggacggccgtatgaaggcatcgccgtgttcgacggcaaaaagatcactgtaacagggaccctgtggaacggcaacaaaattatcgacgagcgcctgatcaaccccgacggctccctgctgttccgagtaaccatcaacggagtgaccggctggcggctgtgcgaacgcattctggcgctcgagggaggcagctggagccaccctcagtttgaaaaagactacaaagacgatgacgataagggatcagattacaaggatgatgatgacaaggggtcagattataaagacgacgatgataaagggagcgactacaaggacgacgatgacaaggcctggtcccatccccagttcgagaaacaccatcaccaccaccatcatcacactagtggctccggcgagggcagaggaagtctactaacctgcggagatgtggaagaaaatcctggcccacatatgaccgagtacaagcccacggtgcgcctcgccacccgcgacgacgtccccagggccgtacgcaccctcgccgccgcgttcgccgactaccccgccacgcgccacaccgtcgatccggaccgccacatcgagcgggtcaccgagctgcaagaactcttcctcacgcgcgtcgggctcgacatcggcaaggtgtgggtcgcggacgacggcgccgcggtggcggtctggaccacgccggagagcgtcgaagcgggggcggtgttcgccgagatcggcccgcgcatggccgagttgagcggttcccggctggccgcgcagcaacagatggaaggcctcctggcgccgcaccggcccaaggagcccgcgtggttcctggccaccgtcggcgtctcgcccgaccaccagggcaagggtctgggcagcgccgtcgtgctccccggagtggaggcggccgagcgcgccggggtgcccgccttcctggagacctccgcgccccgcaacctccccttctacgagcggctcggcttcaccgtcaccgccgacgtcgaggtgcccgaaggaccgcgcacctggtgcatgacccgcaagcccggtgcctga

SEQ ID NO: 1260 - DNA, 1830 bp, Artificial Sequence
  Synthetic Polynucleotide
atggccttaccagtgaccgccttgctcctgccgctggccttgctgctccacgccgccaggccggaggtgcagctggttgaatctggcggaggactggttcagcctggcggatctctgagactgtcttgtgccgccagcggcttcaccttcagcagctatgctatgggctgggttcgcagagcccctggcaaagaggaagaactggtcgccagcatcagcggcagcggcgactatatcagatacgccgacagcgtgaagggcagattcaccatcagcgccgacaccagcaagaacaccgcctacctccagatgaacagcctgagagccgaggacaccgccgtgtactactgtgccaaagaaggcaccggcgctaacagcagcctggccgattatagaggccagggcacactggtcaccgtgtctagtacgcgtggaggcagtggtgtcttcacactcgaagatttcgttggggactggcgacagacagccggctacaacctggaccaagtccttgaacagggaggtgtgtccagtttgtttcagaatctcggggtgtccgtaactccgatccaaaggattgtcctgagcggtgaaaatgggctgaagatcgacatccatgtcatcatcccgtatgaaggtctgagcggcgaccaaatgggccagatcgaaaaaatttttaaggtggtgtaccctgtggatgatcatcactttaaggtgatcctgcactatggcacactggtaatcgacggggttacgccgaacatgatcgactatttcggacggccgtatgaaggcatcgccgtgttcgacggcaaaaagatcactgtaacagggaccctgtggaacggcaacaaaattatcgacgagcgcctgatcaaccccgacggctccctgctgttccgagtaaccatcaacggagtgaccggctggcggctgtgcgaacgcattctggcgctcgagggaggcagctggagccaccctcagtttgaaaaagactacaaagacgatgacgataagggatcagattacaaggatgatgatgacaaggggtcagattataaagacgacgatgataaagggagcgactacaaggacgacgatgacaaggcctggtcccatccccagttcgagaaacaccatcaccaccaccatcatcacactagtggctccggcgagggcagaggaagtctactaacctgcggagatgtggaagaaaatcctggcccacatatgaccgagtacaagcccacggtgcgcctcgccacccgcgacgacgtccccagggccgtacgcaccctcgccgccgcgttcgccgactaccccgccacgcgccacaccgtcgatccggaccgccacatcgagcgggtcaccgagctgcaagaactcttcctcacgcgcgtcgggctcgacatcggcaaggtgtgggtcgcggacgacggcgccgcggtggcggtctggaccacgccggagagcgtcgaagcgggggcggtgttcgccgagatcggcccgcgcatggccgagttgagcggttcccggctggccgcgcagcaacagatggaaggcctcctggcgccgcaccggcccaaggagcccgcgtggttcctggccaccgtcggcgtctcgcccgaccaccagggcaagggtctgggcagcgccgtcgtgctccccggagtggaggcggccgagcgcgccggggtgcccgccttcctggagacctccgcgccccgcaacctccccttctacgagcggctcggcttcaccgtcaccgccgacgtcgaggtgcccgaaggaccgcgcacctggtgcatgacccgcaagcccggtgcctga

SEQ ID NO: 1261 - DNA, 1830 bp, Artificial Sequence
  Synthetic Polynucleotide
atggccttaccagtgaccgccttgctcctgccgctggccttgctgctccacgccgccaggccggaggtgcagctggttgaatctggcggaggactggttcagcctggcggatctctgagactgtcttgtgccgccagcggcttcacctttagcagctacgccatgacctggttcagacaggcccctggcaaaggactggaatgggtcgcctctatcagcggcagcggcgactacatcagatacgaggatagcgtggaaggccggttcaccgtgtccagagacaacgccaagaacagcgtgtacctccagatgaacagcctgagagccgaggacaccgccgtgtactactgtgccaaagaaggcaccggcgctaacagcagcctggccgattattggggccagggcacaaccgtgacagtgtctagtacgcgtggaggcagtggtgtcttcacactcgaagatttcgttggggactggcgacagacagccggctacaacctggaccaagtccttgaacagggaggtgtgtccagtttgtttcagaatctcggggtgtccgtaactccgatccaaaggattgtcctgagcggtgaaaatgggctgaagatcgacatccatgtcatcatcccgtatgaaggtctgagcggcgaccaaatgggccagatcgaaaaaatttttaaggtggtgtaccctgtggatgatcatcactttaaggtgatcctgcactatggcacactggtaatcgacggggttacgccgaacatgatcgactatttcggacggccgtatgaaggcatcgccgtgttcgacggcaaaaagatcactgtaacagggaccctgtggaacggcaacaaaattatcgacgagcgcctgatcaaccccgacggctccctgctgttccgagtaaccatcaacggagtgaccggctggcggctgtgcgaacgcattctggcgctcgagggaggcagctggagccaccctcagtttgaaaaagactacaaagacgatgacgataagggatcagattacaaggatgatgatgacaaggggtcagattataaagacgacgatgataaagggagcgactacaaggacgacgatgacaaggcctggtcccatccccagttcgagaaacaccatcaccaccaccatcatcacactagtggctccggcgagggcagaggaagtctactaacctgcggagatgtggaagaaaatcctggcccacatatgaccgagtacaagcccacggtgcgcctcgccacccgcgacgacgtccccagggccgtacgcaccctcgccgccgcgttcgccgactaccccgccacgcgccacaccgtcgatccggaccgccacatcgagcgggtcaccgagctgcaagaactcttcctcacgcgcgtcgggctcgacatcggcaaggtgtgggtcgcggacgacggcgccgcggtggcggtctggaccacgccggagagcgtcgaagcgggggcggtgttcgccgagatcggcccgcgcatggccgagttgagcggttcccggctggccgcgcagcaacagatggaaggcctcctggcgccgcaccggcccaaggagcccgcgtggttcctggccaccgtcggcgtctcgcccgaccaccagggcaagggtctgggcagcgccgtcgtgctccccggagtggaggcggccgagcgcgccggggtgcccgccttcctggagacctccgcgccccgcaacctccccttctacgagcggctcggcttcaccgtcaccgccgacgtcgaggtgcccgaaggaccgcgcacctggtgcatgacccgcaagcccggtgcctga

SEQ ID NO: 1262 - DNA, 1830 bp, Artificial Sequence
  Synthetic Polynucleotide
atggccttaccagtgaccgccttgctcctgccgctggccttgctgctccacgccgccaggccggaagtgcaactggttgaatctggcggcggactggttaagcctggcggatctctgaagctgagctgtgccgccagcggctacacctttaccagctactgtatgggctgggtccgacgagcccctggcaaagaagaggagctgatcggctacatctgcccctacaacgatggcaccaagtacaacgagaagttccagggcagagtgaccatcagctccgacaagagcatcagcaccgcctacatggaactgagcagcctgagaagcgaggataccgccatgtactattgcgccagaggcacctactactacggcaccagagtgttcgactacagaggccagggaaccctggtcacagtctcttctacgcgtggaggcagtggtgtcttcacactcgaagatttcgttggggactggcgacagacagccggctacaacctggaccaagtccttgaacagggaggtgtgtccagtttgtttcagaatctcggggtgtccgtaactccgatccaaaggattgtcctgagcggtgaaaatgggctgaagatcgacatccatgtcatcatcccgtatgaaggtctgagcggcgaccaaatgggccagatcgaaaaaatttttaaggtggtgtaccctgtggatgatcatcactttaaggtgatcctgcactatggcacactggtaatcgacggggttacgccgaacatgatcgactatttcggacggccgtatgaaggcatcgccgtgttcgacggcaaaaagatcactgtaacagggaccctgtggaacggcaacaaaattatcgacgagcgcctgatcaaccccgacggctccctgctgttccgagtaaccatcaacggagtgaccggctggcggctgtgcgaacgcattctggcgctcgagggaggcagctggagccaccctcagtttgaaaaagactacaaagacgatgacgataagggatcagattacaaggatgatgatgacaaggggtcagattataaagacgacgatgataaagggagcgactacaaggacgacgatgacaaggcctggtcccatccccagttcgagaaacaccatcaccaccaccatcatcacactagtggctccggcgagggcagaggaagtctactaacctgcggagatgtggaagaaaatcctggcccacatatgaccgagtacaagcccacggtgcgcctcgccacccgcgacgacgtccccagggccgtacgcaccctcgccgccgcgttcgccgactaccccgccacgcgccacaccgtcgatccggaccgccacatcgagcgggtcaccgagctgcaagaactcttcctcacgcgcgtcgggctcgacatcggcaaggtgtgggtcgcggacgacggcgccgcggtggcggtctggaccacgccggagagcgtcgaagcgggggcggtgttcgccgagatcggcccgcgcatggccgagttgagcggttcccggctggccgcgcagcaacagatggaaggcctcctggcgccgcaccggcccaaggagcccgcgtggttcctggccaccgtcggcgtctcgcccgaccaccagggcaagggtctgggcagcgccgtcgtgctccccggagtggaggcggccgagcgcgccggggtgcccgccttcctggagacctccgcgccccgcaacctccccttctacgagcggctcggcttcaccgtcaccgccgacgtcgaggtgcccgaaggaccgcgcacctggtgcatgacccgcaagcccggtgcctga

SEQ ID NO: 1263 - DNA, 2232 bp, Artificial Sequence
  Synthetic Polynucleotide
atggccttaccagtgaccgccttgctcctgccgctggccttgctgctccacgccgccaggccggaggtgcagctggttgaatctggtggcggagttgtgcagcctggcagaagcctgagactgtcttgtgccgccagcggctacaccttcaccagctatgtgatgggctgggttcgcagagcccctggcaaagaggaagaactgatcggctacatcaacccctacaacgacggcacctactacgccgactctgtgaagggcagattcaccatcagccgggacaacagcaagaacaccctgtacctccagatgaacagcctgagagccgaggacaccgccgtgtactattgtgccagaggcacctattactacggcaccagagtgttcgactacagaggccagggcacaatggtcaccgtttctagcggatccggcggaggcggaagtggaggcggaggatctttcgaagttcagctggtggaaagtggcggaggcgttgtgcaacccggaagatcactgagactgagctgtgccgcttccggctatacctttacctcctacgtgatgcactgggtccgacaggctccaggcaaaggactggaatggatcggatatatcaatccgtacaatgatgggacgtactatgccgacagcgtgaaaggccggttcaccatctccagagacaactccaagaacacgctctatctgcaaatgaactctctgcgggccgaagatacagccgtgtattactgcgctcggggaacctactactatggcacacgggttttcgattactggggccagggaactatggttacagtgtccagcacgcgtggaggcagtggtgtcttcacactcgaagatttcgttggggactggcgacagacagccggctacaacctggaccaagtccttgaacagggaggtgtgtccagtttgtttcagaatctcggggtgtccgtaactccgatccaaaggattgtcctgagcggtgaaaatgggctgaagatcgacatccatgtcatcatcccgtatgaaggtctgagcggcgaccaaatgggccagatcgaaaaaatttttaaggtggtgtaccctgtggatgatcatcactttaaggtgatcctgcactatggcacactggtaatcgacggggttacgccgaacatgatcgactatttcggacggccgtatgaaggcatcgccgtgttcgacggcaaaaagatcactgtaacagggaccctgtggaacggcaacaaaattatcgacgagcgcctgatcaaccccgacggctccctgctgttccgagtaaccatcaacggagtgaccggctggcggctgtgcgaacgcattctggcgctcgagggaggcagctggagccaccctcagtttgaaaaagactacaaagacgatgacgataagggatcagattacaaggatgatgatgacaaggggtcagattataaagacgacgatgataaagggagcgactacaaggacgacgatgacaaggcctggtcccatccccagttcgagaaacaccatcaccaccaccatcatcacactagtggctccggcgagggcagaggaagtctactaacctgcggagatgtggaagaaaatcctggcccacatatgaccgagtacaagcccacggtgcgcctcgccacccgcgacgacgtccccagggccgtacgcaccctcgccgccgcgttcgccgactaccccgccacgcgccacaccgtcgatccggaccgccacatcgagcgggtcaccgagctgcaagaactcttcctcacgcgcgtcgggctcgacatcggcaaggtgtgggtcgcggacgacggcgccgcggtggcggtctggaccacgccggagagcgtcgaagcgggggcggtgttcgccgagatcggcccgcgcatggccgagttgagcggttcccggctggccgcgcagcaacagatggaaggcctcctggcgccgcaccggcccaaggagcccgcgtggttcctggccaccgtcggcgtctcgcccgaccaccagggcaagggtctgggcagcgccgtcgtgctccccggagtggaggcggccgagcgcgccggggtgcccgccttcctggagacctccgcgccccgcaacctccccttctacgagcggctcggcttcaccgtcaccgccgacgtcgaggtgcccgaaggaccgcgcacctggtgcatgacccgcaagcccggtgcctga

SEQ ID NO: 1264 - DNA, 1830 bp, Artificial Sequence
  Synthetic Polynucleotide
atggccttaccagtgaccgccttgctcctgccgctggccttgctgctccacgccgccaggccggaggtgcagctggttgaatctggtggcggagttgtgcagcctggcagaagcctgagactgtcttgtgccgccagcggctacaccttcaccagctatgtgatgggctgggttcgcagagcccctggcaaagaggaagaactgatcggctacatcaacccctacaacgacggcacctactacgccgactctgtgaagggcagattcaccatcagccgggacaacagcaagaacaccctgtacctccagatgaacagcctgagagccgaggacaccgccgtgtactattgtgccagaggcacctattactacggcaccagagtgttcgactacagaggccagggcacaatggtcaccgtttctagcacgcgtggaggcagtggtgtcttcacactcgaagatttcgttggggactggcgacagacagccggctacaacctggaccaagtccttgaacagggaggtgtgtccagtttgtttcagaatctcggggtgtccgtaactccgatccaaaggattgtcctgagcggtgaaaatgggctgaagatcgacatccatgtcatcatcccgtatgaaggtctgagcggcgaccaaatgggccagatcgaaaaaatttttaaggtggtgtaccctgtggatgatcatcactttaaggtgatcctgcactatggcacactggtaatcgacggggttacgccgaacatgatcgactatttcggacggccgtatgaaggcatcgccgtgttcgacggcaaaaagatcactgtaacagggaccctgtggaacggcaacaaaattatcgacgagcgcctgatcaaccccgacggctccctgctgttccgagtaaccatcaacggagtgaccggctggcggctgtgcgaacgcattctggcgctcgagggaggcagctggagccaccctcagtttgaaaaagactacaaagacgatgacgataagggatcagattacaaggatgatgatgacaaggggtcagattataaagacgacgatgataaagggagcgactacaaggacgacgatgacaaggcctggtcccatccccagttcgagaaacaccatcaccaccaccatcatcacactagtggctccggcgagggcagaggaagtctactaacctgcggagatgtggaagaaaatcctggcccacatatgaccgagtacaagcccacggtgcgcctcgccacccgcgacgacgtccccagggccgtacgcaccctcgccgccgcgttcgccgactaccccgccacgcgccacaccgtcgatccggaccgccacatcgagcgggtcaccgagctgcaagaactcttcctcacgcgcgtcgggctcgacatcggcaaggtgtgggtcgcggacgacggcgccgcggtggcggtctggaccacgccggagagcgtcgaagcgggggcggtgttcgccgagatcggcccgcgcatggccgagttgagcggttcccggctggccgcgcagcaacagatggaaggcctcctggcgccgcaccggcccaaggagcccgcgtggttcctggccaccgtcggcgtctcgcccgaccaccagggcaagggtctgggcagcgccgtcgtgctccccggagtggaggcggccgagcgcgccggggtgcccgccttcctggagacctccgcgccccgcaacctccccttctacgagcggctcggcttcaccgtcaccgccgacgtcgaggtgcccgaaggaccgcgcacctggtgcatgacccgcaagcccggtgcctga

SEQ ID NO: 1265 - DNA, 2205 bp, Artificial Sequence
  Synthetic Polynucleotide
atggccttaccagtgaccgccttgctcctgccgctggccttgctgctccacgccgccaggccggaggtgcagctggttgaatctggcggaggactggttcagcctggcggatctctgagactgtcttgtgccgccagcggcttcaacatcaaggatacctgtatcggctgggttcgcagagcccctggcaaagaggaagaactggtcgccaaaatctgcaagtacagcggccacaccagatacgccgacagcgtgaagggcagattcaccatcagcgccgacaccagcaagaacaccgcctacctccagatgaacagcctgagagccgaggacaccgccgtgtactattgtgccgctgtgtccgtcagagatgggcactacaattactggggccagggcaccaccgtgaccgtttcttcaggcggaggaagcggcggaggatctgaagtgcaactggtggaaagcggaggcggacttgttcaaccaggcggaagcctgagactgagctgtgccgcttccggctttaatatcaaagacacatgcatcggatgggttcgccgcgctccagggaaagaagaggaactggttgccgacatctgtccctacaagggcagcacaagatatgccgactccgtgaaaggccggtttaccatctctgccgacacctctaagaatacggcctatctgcaaatgaactctctgcgggccgaagatacagccgtgtattactgcgccatcgtgtctgccagagatggctactataactattggggacagggaaccacagtcacagtgtcctctacgcgtggaggcagtggtgtcttcacactcgaagatttcgttggggactggcgacagacagccggctacaacctggaccaagtccttgaacagggaggtgtgtccagtttgtttcagaatctcggggtgtccgtaactccgatccaaaggattgtcctgagcggtgaaaatgggctgaagatcgacatccatgtcatcatcccgtatgaaggtctgagcggcgaccaaatgggccagatcgaaaaaatttttaaggtggtgtaccctgtggatgatcatcactttaaggtgatcctgcactatggcacactggtaatcgacggggttacgccgaacatgatcgactatttcggacggccgtatgaaggcatcgccgtgttcgacggcaaaaagatcactgtaacagggaccctgtggaacggcaacaaaattatcgacgagcgcctgatcaaccccgacggctccctgctgttccgagtaaccatcaacggagtgaccggctggcggctgtgcgaacgcattctggcgctcgagggaggcagctggagccaccctcagtttgaaaaagactacaaagacgatgacgataagggatcagattacaaggatgatgatgacaaggggtcagattataaagacgacgatgataaagggagcgactacaaggacgacgatgacaaggcctggtcccatccccagttcgagaaacaccatcaccaccaccatcatcacactagtggctccggcgagggcagaggaagtctactaacctgcggagatgtggaagaaaatcctggcccacatatgaccgagtacaagcccacggtgcgcctcgccacccgcgacgacgtccccagggccgtacgcaccctcgccgccgcgttcgccgactaccccgccacgcgccacaccgtcgatccggaccgccacatcgagcgggtcaccgagctgcaagaactcttcctcacgcgcgtcgggctcgacatcggcaaggtgtgggtcgcggacgacggcgccgcggtggcggtctggaccacgccggagagcgtcgaagcgggggcggtgttcgccgagatcggcccgcgcatggccgagttgagcggttcccggctggccgcgcagcaacagatggaaggcctcctggcgccgcaccggcccaaggagcccgcgtggttcctggccaccgtcggcgtctcgcccgaccaccagggcaagggtctgggcagcgccgtcgtgctccccggagtggaggcggccgagcgcgccggggtgcccgccttcctggagacctccgcgccccgcaacctccccttctacgagcggctcggcttcaccgtcaccgccgacgtcgaggtgcccgaaggaccgcgcacctggtgcatgacccgcaagcccggtgcctga

SEQ ID NO: 1266 - DNA, 1824 bp, Artificial Sequence
  Synthetic Polynucleotide
atggccttaccagtgaccgccttgctcctgccgctggccttgctgctccacgccgccaggccggaggtgcagctggttgaatctggcggaggactggttcagcctggcggatctctgagactgtcttgtgccgccagcggcttcaacatcaaggatacctgtatcggctgggttcgcagagcccctggcaaagaggaagaactggtcgccaaaatctgcaagtacagcggccacaccagatacgccgacagcgtgaagggcagattcaccatcagcgccgacaccagcaagaacaccgcctacctccagatgaacagcctgagagccgaggacaccgccgtgtactattgtgccgctgtgtccgtcagagatgggcactacaattactggggccagggcaccaccgtgaccgtttcttcaacgcgtggaggcagtggtgtcttcacactcgaagatttcgttggggactggcgacagacagccggctacaacctggaccaagtccttgaacagggaggtgtgtccagtttgtttcagaatctcggggtgtccgtaactccgatccaaaggattgtcctgagcggtgaaaatgggctgaagatcgacatccatgtcatcatcccgtatgaaggtctgagcggcgaccaaatgggccagatcgaaaaaatttttaaggtggtgtaccctgtggatgatcatcactttaaggtgatcctgcactatggcacactggtaatcgacggggttacgccgaacatgatcgactatttcggacggccgtatgaaggcatcgccgtgttcgacggcaaaaagatcactgtaacagggaccctgtggaacggcaacaaaattatcgacgagcgcctgatcaaccccgacggctccctgctgttccgagtaaccatcaacggagtgaccggctggcggctgtgcgaacgcattctggcgctcgagggaggcagctggagccaccctcagtttgaaaaagactacaaagacgatgacgataagggatcagattacaaggatgatgatgacaaggggtcagattataaagacgacgatgataaagggagcgactacaaggacgacgatgacaaggcctggtcccatccccagttcgagaaacaccatcaccaccaccatcatcacactagtggctccggcgagggcagaggaagtctactaacctgcggagatgtggaagaaaatcctggcccacatatgaccgagtacaagcccacggtgcgcctcgccacccgcgacgacgtccccagggccgtacgcaccctcgccgccgcgttcgccgactaccccgccacgcgccacaccgtcgatccggaccgccacatcgagcgggtcaccgagctgcaagaactcttcctcacgcgcgtcgggctcgacatcggcaaggtgtgggtcgcggacgacggcgccgcggtggcggtctggaccacgccggagagcgtcgaagcgggggcggtgttcgccgagatcggcccgcgcatggccgagttgagcggttcccggctggccgcgcagcaacagatggaaggcctcctggcgccgcaccggcccaaggagcccgcgtggttcctggccaccgtcggcgtctcgcccgaccaccagggcaagggtctgggcagcgccgtcgtgctccccggagtggaggcggccgagcgcgccggggtgcccgccttcctggagacctccgcgccccgcaacctccccttctacgagcggctcggcttcaccgtcaccgccgacgtcgaggtgcccgaaggaccgcgcacctggtgcatgacccgcaagcccggtgcctga

SEQ ID NO: 1267 - DNA, 2205 bp, Artificial Sequence
  Synthetic Polynucleotide
atggccttaccagtgaccgccttgctcctgccgctggccttgctgctccacgccgccaggccggaggtgcagctggttgaatctggcggaggactggttcagcctggcggatctctgagactgtcctgcacattttccggcggcaccttcagcagctacacaatgggctggttcagacaggcccctggcaaagaacgggaatttgtggccgaagtccgatggggcggagtgaccacatacagcaacagcctgaaggacagattcagcatcagcgaggacagcgtgaagaacgccgtgtacctccagatgaactccctgaagcctgaggacacagccgtgtactattgtgccgctgtgcggcagatgtacatgaccgtggtgcctgattattggggccagggcacactggtcacagtgtctagcagcggcggaggcggatctttcgaacagctccagttgcaagagagcggccctggcttggtaaaaccttccgagacccttagcctcacatgcacggttagtgggggcagcatttcctcaggtgattactattggggatggattcggcaacccccgggtaaaggattggagtggattggtcatatttattatagtggagcgacgtactacaacccaagtctcaaatccagggttacaatatccgtcgatacgagcaggaaccaattcagcttgaaactttctagtgtcaccgcagcagacacagccgtctattactgtacgcgggatgactccagtaattggcggtcccgagggcaagggacactggtcacggtctcctcaacgcgtggaggcagtggtgtcttcacactcgaagatttcgttggggactggcgacagacagccggctacaacctggaccaagtccttgaacagggaggtgtgtccagtttgtttcagaatctcggggtgtccgtaactccgatccaaaggattgtcctgagcggtgaaaatgggctgaagatcgacatccatgtcatcatcccgtatgaaggtctgagcggcgaccaaatgggccagatcgaaaaaatttttaaggtggtgtaccctgtggatgatcatcactttaaggtgatcctgcactatggcacactggtaatcgacggggttacgccgaacatgatcgactatttcggacggccgtatgaaggcatcgccgtgttcgacggcaaaaagatcactgtaacagggaccctgtggaacggcaacaaaattatcgacgagcgcctgatcaaccccgacggctccctgctgttccgagtaaccatcaacggagtgaccggctggcggctgtgcgaacgcattctggcgctcgagggaggcagctggagccaccctcagtttgaaaaagactacaaagacgatgacgataagggatcagattacaaggatgatgatgacaaggggtcagattataaagacgacgatgataaagggagcgactacaaggacgacgatgacaaggcctggtcccatccccagttcgagaaacaccatcaccaccaccatcatcacactagtggctccggcgagggcagaggaagtctactaacctgcggagatgtggaagaaaatcctggcccacatatgaccgagtacaagcccacggtgcgcctcgccacccgcgacgacgtccccagggccgtacgcaccctcgccgccgcgttcgccgactaccccgccacgcgccacaccgtcgatccggaccgccacatcgagcgggtcaccgagctgcaagaactcttcctcacgcgcgtcgggctcgacatcggcaaggtgtgggtcgcggacgacggcgccgcggtggcggtctggaccacgccggagagcgtcgaagcgggggcggtgttcgccgagatcggcccgcgcatggccgagttgagcggttcccggctggccgcgcagcaacagatggaaggcctcctggcgccgcaccggcccaaggagcccgcgtggttcctggccaccgtcggcgtctcgcccgaccaccagggcaagggtctgggcagcgccgtcgtgctccccggagtggaggcggccgagcgcgccggggtgcccgccttcctggagacctccgcgccccgcaacctccccttctacgagcggctcggcttcaccgtcaccgccgacgtcgaggtgcccgaaggaccgcgcacctggtgcatgacccgcaagcccggtgcctga

SEQ ID NO: 1268 - DNA, 1827 bp, Artificial Sequence
  Synthetic Polynucleotide
atggccttaccagtgaccgccttgctcctgccgctggccttgctgctccacgccgccaggccggaggtgcagctggttgaatctggcggaggactggttcagcctggcggatctctgagactgtcctgcacattttccggcggcaccttcagcagctacacaatgggctggttcagacaggcccctggcaaagaacgggaatttgtggccgaagtccgatggggcggagtgaccacatacagcaacagcctgaaggacagattcagcatcagcgaggacagcgtgaagaacgccgtgtacctccagatgaactccctgaagcctgaggacacagccgtgtactattgtgccgctgtgcggcagatgtacatgaccgtggtgcctgattattggggccagggcacactggtcacagtgtctagcacgcgtggaggcagtggtgtcttcacactcgaagatttcgttggggactggcgacagacagccggctacaacctggaccaagtccttgaacagggaggtgtgtccagtttgtttcagaatctcggggtgtccgtaactccgatccaaaggattgtcctgagcggtgaaaatgggctgaagatcgacatccatgtcatcatcccgtatgaaggtctgagcggcgaccaaatgggccagatcgaaaaaatttttaaggtggtgtaccctgtggatgatcatcactttaaggtgatcctgcactatggcacactggtaatcgacggggttacgccgaacatgatcgactatttcggacggccgtatgaaggcatcgccgtgttcgacggcaaaaagatcactgtaacagggaccctgtggaacggcaacaaaattatcgacgagcgcctgatcaaccccgacggctccctgctgttccgagtaaccatcaacggagtgaccggctggcggctgtgcgaacgcattctggcgctcgagggaggcagctggagccaccctcagtttgaaaaagactacaaagacgatgacgataagggatcagattacaaggatgatgatgacaaggggtcagattataaagacgacgatgataaagggagcgactacaaggacgacgatgacaaggcctggtcccatccccagttcgagaaacaccatcaccaccaccatcatcacactagtggctccggcgagggcagaggaagtctactaacctgcggagatgtggaagaaaatcctggcccacatatgaccgagtacaagcccacggtgcgcctcgccacccgcgacgacgtccccagggccgtacgcaccctcgccgccgcgttcgccgactaccccgccacgcgccacaccgtcgatccggaccgccacatcgagcgggtcaccgagctgcaagaactcttcctcacgcgcgtcgggctcgacatcggcaaggtgtgggtcgcggacgacggcgccgcggtggcggtctggaccacgccggagagcgtcgaagcgggggcggtgttcgccgagatcggcccgcgcatggccgagttgagcggttcccggctggccgcgcagcaacagatggaaggcctcctggcgccgcaccggcccaaggagcccgcgtggttcctggccaccgtcggcgtctcgcccgaccaccagggcaagggtctgggcagcgccgtcgtgctccccggagtggaggcggccgagcgcgccggggtgcccgccttcctggagacctccgcgccccgcaacctccccttctacgagcggctcggcttcaccgtcaccgccgacgtcgaggtgcccgaaggaccgcgcacctggtgcatgacccgcaagcccggtgcctga

SEQ ID NO: 1269 - DNA, 2241 bp, Artificial Sequence
  Synthetic Polynucleotide
atggccttaccagtgaccgccttgctcctgccgctggccttgctgctccacgccgccaggccggaggtgcagctggttgaatctggtggcggagttgtgcagcctggcagaagcctgagactgtcttgtgccgccagcggctttagcttcagcggctatggaatgcactgggtccgacaggcccctggcaaaggacttgagtgggtcgcctacatcagctacgacggcagcaacaagtattacgccgacagcgtgaagggcagattcaccatcagccgggacaacagcaagaacaccctgtacctccagatgaacagcctgagagccgaggacaccgccgtgtactactgcgccaaagatcctgcctggggactgagactgggcgagagcagcagctacgatttcgacatctggggccagggcacaatggtcacagtttctagcggatccggcggaggcggaagtggaggcggaggatctggcggcggaggctctttcgaagttcagctgctggaatctggcggaggactcgttcaacctggcggctctctgagactgagctgtgccgcttctggcttcagcttctctagctacgccctgagctgggttcgacaagctcccggaaagggccttgaatgggtgtccagcatcggcgagaatgacggcaccacagactatgccgatgccgtgaaaggccggtttaccatcagcagagacaattccaagaacacgctctatctgcaaatgaactccctgcgcgtggaagatacagccgtgtattattgcgtgaaggacggcgtgcactggggacagggaaccctggttacagtgtctagcacgcgtggaggcagtggtgtcttcacactcgaagatttcgttggggactggcgacagacagccggctacaacctggaccaagtccttgaacagggaggtgtgtccagtttgtttcagaatctcggggtgtccgtaactccgatccaaaggattgtcctgagcggtgaaaatgggctgaagatcgacatccatgtcatcatcccgtatgaaggtctgagcggcgaccaaatgggccagatcgaaaaaatttttaaggtggtgtaccctgtggatgatcatcactttaaggtgatcctgcactatggcacactggtaatcgacggggttacgccgaacatgatcgactatttcggacggccgtatgaaggcatcgccgtgttcgacggcaaaaagatcactgtaacagggaccctgtggaacggcaacaaaattatcgacgagcgcctgatcaaccccgacggctccctgctgttccgagtaaccatcaacggagtgaccggctggcggctgtgcgaacgcattctggcgctcgagggaggcagctggagccaccctcagtttgaaaaagactacaaagacgatgacgataagggatcagattacaaggatgatgatgacaaggggtcagattataaagacgacgatgataaagggagcgactacaaggacgacgatgacaaggcctggtcccatccccagttcgagaaacaccatcaccaccaccatcatcacactagtggctccggcgagggcagaggaagtctactaacctgcggagatgtggaagaaaatcctggcccacatatgaccgagtacaagcccacggtgcgcctcgccacccgcgacgacgtccccagggccgtacgcaccctcgccgccgcgttcgccgactaccccgccacgcgccacaccgtcgatccggaccgccacatcgagcgggtcaccgagctgcaagaactcttcctcacgcgcgtcgggctcgacatcggcaaggtgtgggtcgcggacgacggcgccgcggtggcggtctggaccacgccggagagcgtcgaagcgggggcggtgttcgccgagatcggcccgcgcatggccgagttgagcggttcccggctggccgcgcagcaacagatggaaggcctcctggcgccgcaccggcccaaggagcccgcgtggttcctggccaccgtcggcgtctcgcccgaccaccagggcaagggtctgggcagcgccgtcgtgctccccggagtggaggcggccgagcgcgccggggtgcccgccttcctggagacctccgcgccccgcaacctccccttctacgagcggctcggcttcaccgtcaccgccgacgtcgaggtgcccgaaggaccgcgcacctggtgcatgacccgcaagcccggtgcctga

SEQ ID NO: 1270 - DNA, 1848 bp, Artificial Sequence
  Synthetic Polynucleotide
atggccttaccagtgaccgccttgctcctgccgctggccttgctgctccacgccgccaggccggaggtgcagctggttgaatctggtggcggagttgtgcagcctggcagaagcctgagactgtcttgtgccgccagcggctttagcttcagcggctatggaatgcactgggtccgacaggcccctggcaaaggacttgagtgggtcgcctacatcagctacgacggcagcaacaagtattacgccgacagcgtgaagggcagattcaccatcagccgggacaacagcaagaacaccctgtacctccagatgaacagcctgagagccgaggacaccgccgtgtactactgcgccaaagatcctgcctggggactgagactgggcgagagcagcagctacgatttcgacatctggggccagggcacaatggtcacagtttctagcacgcgtggaggcagtggtgtcttcacactcgaagatttcgttggggactggcgacagacagccggctacaacctggaccaagtccttgaacagggaggtgtgtccagtttgtttcagaatctcggggtgtccgtaactccgatccaaaggattgtcctgagcggtgaaaatgggctgaagatcgacatccatgtcatcatcccgtatgaaggtctgagcggcgaccaaatgggccagatcgaaaaaatttttaaggtggtgtaccctgtggatgatcatcactttaaggtgatcctgcactatggcacactggtaatcgacggggttacgccgaacatgatcgactatttcggacggccgtatgaaggcatcgccgtgttcgacggcaaaaagatcactgtaacagggaccctgtggaacggcaacaaaattatcgacgagcgcctgatcaaccccgacggctccctgctgttccgagtaaccatcaacggagtgaccggctggcggctgtgcgaacgcattctggcgctcgagggaggcagctggagccaccctcagtttgaaaaagactacaaagacgatgacgataagggatcagattacaaggatgatgatgacaaggggtcagattataaagacgacgatgataaagggagcgactacaaggacgacgatgacaaggcctggtcccatccccagttcgagaaacaccatcaccaccaccatcatcacactagtggctccggcgagggcagaggaagtctactaacctgcggagatgtggaagaaaatcctggcccacatatgaccgagtacaagcccacggtgcgcctcgccacccgcgacgacgtccccagggccgtacgcaccctcgccgccgcgttcgccgactaccccgccacgcgccacaccgtcgatccggaccgccacatcgagcgggtcaccgagctgcaagaactcttcctcacgcgcgtcgggctcgacatcggcaaggtgtgggtcgcggacgacggcgccgcggtggcggtctggaccacgccggagagcgtcgaagcgggggcggtgttcgccgagatcggcccgcgcatggccgagttgagcggttcccggctggccgcgcagcaacagatggaaggcctcctggcgccgcaccggcccaaggagcccgcgtggttcctggccaccgtcggcgtctcgcccgaccaccagggcaagggtctgggcagcgccgtcgtgctccccggagtggaggcggccgagcgcgccggggtgcccgccttcctggagacctccgcgccccgcaacctccccttctacgagcggctcggcttcaccgtcaccgccgacgtcgaggtgcccgaaggaccgcgcacctggtgcatgacccgcaagcccggtgcctga

SEQ ID NO: 1271 - DNA, 2220 bp, Artificial Sequence
  Synthetic Polynucleotide
atggactggatttggcgcatccttttccttgtcggcgctgctaccggcgcccattccgaggttcagctgcttgagtctggcggaggactggttcaacctggcggaagcctgagactgtcttgtgccgcttccggcttcagcttcagcagctatgccctgagctgggtccgacaggctcctggcaaaggactggaatgggtgtccagcatcggcgagaatgacggcaccaccgattatgccgatgccgtgaagggcagattcaccatctctcgggacaacagcaagaacaccctgtacctccagatgaacagcctcagagtggaagataccgccgtgtactactgcgtgaaggacggcgttcactggggccagggaacactggttacagtgtctagcggatccggcggaggcggaagtggaggcggaggatctttcgaagttcagttggtagagtctggaggcggagtggtacaaccggggcggtctcttagacttagttgcgcagcaagcggtttctctttctctggctatgggatgcactgggtgagacaggcccctgggaaaggactggagtgggtggcctacatttcatacgacgggagtaataaatactatgcagactccgttaagggcaggttcacgatctctcgggacaattccaagaatacattgtatcttcagatgaatagtctccgagctgaagacacggcggtttactactgcgctaaagacccggcctggggacttcgacttggagagagttctagctacgattttgacatttggggacaagggacaatggtcactgtctcaagtacgcgtggaggcagtggtgtcttcacactcgaagatttcgttggggactggcgacagacagccggctacaacctggaccaagtccttgaacagggaggtgtgtccagtttgtttcagaatctcggggtgtccgtaactccgatccaaaggattgtcctgagcggtgaaaatgggctgaagatcgacatccatgtcatcatcccgtatgaaggtctgagcggcgaccaaatgggccagatcgaaaaaatttttaaggtggtgtaccctgtggatgatcatcactttaaggtgatcctgcactatggcacactggtaatcgacggggttacgccgaacatgatcgactatttcggacggccgtatgaaggcatcgccgtgttcgacggcaaaaagatcactgtaacagggaccctgtggaacggcaacaaaattatcgacgagcgcctgatcaaccccgacggctccctgctgttccgagtaaccatcaacggagtgaccggctggcggctgtgcgaacgcattctggcgctcgagggaggcagctggagccaccctcagtttgaaaaagactacaaagacgatgacgataagggatcagattacaaggatgatgatgacaaggggtcagattataaagacgacgatgataaagggagcgactacaaggacgacgatgacaaggcctggtcccatccccagttcgagaaacaccatcaccaccaccatcatcacactagtggctccggcgagggcagaggaagtctactaacctgcggagatgtggaagaaaatcctggcccacatatgaccgagtacaagcccacggtgcgcctcgccacccgcgacgacgtccccagggccgtacgcaccctcgccgccgcgttcgccgactaccccgccacgcgccacaccgtcgatccggaccgccacatcgagcgggtcaccgagctgcaagaactcttcctcacgcgcgtcgggctcgacatcggcaaggtgtgggtcgcggacgacggcgccgcggtggcggtctggaccacgccggagagcgtcgaagcgggggcggtgttcgccgagatcggcccgcgcatggccgagttgagcggttcccggctggccgcgcagcaacagatggaaggcctcctggcgccgcaccggcccaaggagcccgcgtggttcctggccaccgtcggcgtctcgcccgaccaccagggcaagggtctgggcagcgccgtcgtgctccccggagtggaggcggccgagcgcgccggggtgcccgccttcctggagacctccgcgccccgcaacctccccttctacgagcggctcggcttcaccgtcaccgccgacgtcgaggtgcccgaaggaccgcgcacctggtgcatgacccgcaagcccggtgcctga

SEQ ID NO: 1272 - DNA, 1800 bp, Artificial Sequence
  Synthetic Polynucleotide
atggactggatttggcgcatccttttccttgtcggcgctgctaccggcgcccattccgaggttcagctgcttgagtctggcggaggactggttcaacctggcggaagcctgagactgtcttgtgccgcttccggcttcagcttcagcagctatgccctgagctgggtccgacaggctcctggcaaaggactggaatgggtgtccagcatcggcgagaatgacggcaccaccgattatgccgatgccgtgaagggcagattcaccatctctcgggacaacagcaagaacaccctgtacctccagatgaacagcctcagagtggaagataccgccgtgtactactgcgtgaaggacggcgttcactggggccagggaacactggttacagtgtctagcacgcgtggaggcagtggtgtcttcacactcgaagatttcgttggggactggcgacagacagccggctacaacctggaccaagtccttgaacagggaggtgtgtccagtttgtttcagaatctcggggtgtccgtaactccgatccaaaggattgtcctgagcggtgaaaatgggctgaagatcgacatccatgtcatcatcccgtatgaaggtctgagcggcgaccaaatgggccagatcgaaaaaatttttaaggtggtgtaccctgtggatgatcatcactttaaggtgatcctgcactatggcacactggtaatcgacggggttacgccgaacatgatcgactatttcggacggccgtatgaaggcatcgccgtgttcgacggcaaaaagatcactgtaacagggaccctgtggaacggcaacaaaattatcgacgagcgcctgatcaaccccgacggctccctgctgttccgagtaaccatcaacggagtgaccggctggcggctgtgcgaacgcattctggcgctcgagggaggcagctggagccaccctcagtttgaaaaagactacaaagacgatgacgataagggatcagattacaaggatgatgatgacaaggggtcagattataaagacgacgatgataaagggagcgactacaaggacgacgatgacaaggcctggtcccatccccagttcgagaaacaccatcaccaccaccatcatcacactagtggctccggcgagggcagaggaagtctactaacctgcggagatgtggaagaaaatcctggcccacatatgaccgagtacaagcccacggtgcgcctcgccacccgcgacgacgtccccagggccgtacgcaccctcgccgccgcgttcgccgactaccccgccacgcgccacaccgtcgatccggaccgccacatcgagcgggtcaccgagctgcaagaactcttcctcacgcgcgtcgggctcgacatcggcaaggtgtgggtcgcggacgacggcgccgcggtggcggtctggaccacgccggagagcgtcgaagcgggggcggtgttcgccgagatcggcccgcgcatggccgagttgagcggttcccggctggccgcgcagcaacagatggaaggcctcctggcgccgcaccggcccaaggagcccgcgtggttcctggccaccgtcggcgtctcgcccgaccaccagggcaagggtctgggcagcgccgtcgtgctccccggagtggaggcggccgagcgcgccggggtgcccgccttcctggagacctccgcgccccgcaacctccccttctacgagcggctcggcttcaccgtcaccgccgacgtcgaggtgcccgaaggaccgcgcacctggtgcatgacccgcaagcccggtgcctga

SEQ ID NO: 1273 - DNA, 1839 bp, Artificial Sequence
  Synthetic Polynucleotide
atggccttaccagtgaccgccttgctcctgccgctggccttgctgctccacgccgccaggccgcagctgcaactgcaagagtctggccccggactggtcaagccttctgaaacactggccctgacctgcaatgtgtccggcggctctatcagcagcagctcctattactggggctggatcagacagcctccaggcaagagactggaatggatcggcagcatctactacagcggcagcacatacttcaaccccagcctgaagtccagagtgaccatcagcgtggacacctccaagaaccagttctccctgaagctgagcagcgtgacagccgccgatacagccgtgtattactgtgctggcggcgactactatggccccgttggacaatggcccagcgattacagaggacagggaacccttgtgaccgtgtcctctacgcgtggaggcagtggtgtcttcacactcgaagatttcgttggggactggcgacagacagccggctacaacctggaccaagtccttgaacagggaggtgtgtccagtttgtttcagaatctcggggtgtccgtaactccgatccaaaggattgtcctgagcggtgaaaatgggctgaagatcgacatccatgtcatcatcccgtatgaaggtctgagcggcgaccaaatgggccagatcgaaaaaatttttaaggtggtgtaccctgtggatgatcatcactttaaggtgatcctgcactatggcacactggtaatcgacggggttacgccgaacatgatcgactatttcggacggccgtatgaaggcatcgccgtgttcgacggcaaaaagatcactgtaacagggaccctgtggaacggcaacaaaattatcgacgagcgcctgatcaaccccgacggctccctgctgttccgagtaaccatcaacggagtgaccggctggcggctgtgcgaacgcattctggcgctcgagggaggcagctggagccaccctcagtttgaaaaagactacaaagacgatgacgataagggatcagattacaaggatgatgatgacaaggggtcagattataaagacgacgatgataaagggagcgactacaaggacgacgatgacaaggcctggtcccatccccagttcgagaaacaccatcaccaccaccatcatcacactagtggctccggcgagggcagaggaagtctactaacctgcggagatgtggaagaaaatcctggcccacatatgaccgagtacaagcccacggtgcgcctcgccacccgcgacgacgtccccagggccgtacgcaccctcgccgccgcgttcgccgactaccccgccacgcgccacaccgtcgatccggaccgccacatcgagcgggtcaccgagctgcaagaactcttcctcacgcgcgtcgggctcgacatcggcaaggtgtgggtcgcggacgacggcgccgcggtggcggtctggaccacgccggagagcgtcgaagcgggggcggtgttcgccgagatcggcccgcgcatggccgagttgagcggttcccggctggccgcgcagcaacagatggaaggcctcctggcgccgcaccggcccaaggagcccgcgtggttcctggccaccgtcggcgtctcgcccgaccaccagggcaagggtctgggcagcgccgtcgtgctccccggagtggaggcggccgagcgcgccggggtgcccgccttcctggagacctccgcgccccgcaacctccccttctacgagcggctcggcttcaccgtcaccgccgacgtcgaggtgcccgaaggaccgcgcacctggtgcatgacccgcaagcccggtgcctga

SEQ ID NO: 1274 - DNA, 2229 bp, Artificial Sequence
  Synthetic Polynucleotide
atggactggatttggcgcatccttttccttgtcggcgctgctaccggcgcccattcccagctccagctgcaagagtctggacctggcctggtcaagcctagcgagacactgagcctgacctgtacagttagcggcggctctgtgtccagcagcagctattactggggctggatcagacagcctcctggcaagagactggaactgatcggcagcatctactacggcggctccacctacttcaaccccagcctgaaaagcagagtgaccatcagcgtggacaccagcaagaaccagttcagcctgaagctgagcagcgtgacagccgccgatacagccgtgtactattgtgccggcggagacacatacggccctgttggacaatggcccagcgactatagaggccagggcacactggtcacagtgtctagcggtggcggaggaagtggcggcggatctttcgaagttcagctgcttgaaagcggtggcggcctggttcaacctggcggatctctgagactgagctgtgccgccagcggcttcatcttctccatctacgccatgtcctgggtccgacaggcccctggaaaaggactggaatgggtgtccggcatctctggcagcggcgtgaacacctactacgccgattctgtgaagggccgcttcatcatcagccgggacaacagcagaaacaccgtgtacctccagatgaacagcctgagagccgatgacaccgccgtgtaccactgcgccaatggcaaaggctgggacggcaacacttggtacgaggattacagaggacagggaaccctcgtgaccgtgtctagtacgcgtggaggcagtggtgtcttcacactcgaagatttcgttggggactggcgacagacagccggctacaacctggaccaagtccttgaacagggaggtgtgtccagtttgtttcagaatctcggggtgtccgtaactccgatccaaaggattgtcctgagcggtgaaaatgggctgaagatcgacatccatgtcatcatcccgtatgaaggtctgagcggcgaccaaatgggccagatcgaaaaaatttttaaggtggtgtaccctgtggatgatcatcactttaaggtgatcctgcactatggcacactggtaatcgacggggttacgccgaacatgatcgactatttcggacggccgtatgaaggcatcgccgtgttcgacggcaaaaagatcactgtaacagggaccctgtggaacggcaacaaaattatcgacgagcgcctgatcaaccccgacggctccctgctgttccgagtaaccatcaacggagtgaccggctggcggctgtgcgaacgcattctggcgctcgagggaggcagctggagccaccctcagtttgaaaaagactacaaagacgatgacgataagggatcagattacaaggatgatgatgacaaggggtcagattataaagacgacgatgataaagggagcgactacaaggacgacgatgacaaggcctggtcccatccccagttcgagaaacaccatcaccaccaccatcatcacactagtggctccggcgagggcagaggaagtctactaacctgcggagatgtggaagaaaatcctggcccacatatgaccgagtacaagcccacggtgcgcctcgccacccgcgacgacgtccccagggccgtacgcaccctcgccgccgcgttcgccgactaccccgccacgcgccacaccgtcgatccggaccgccacatcgagcgggtcaccgagctgcaagaactcttcctcacgcgcgtcgggctcgacatcggcaaggtgtgggtcgcggacgacggcgccgcggtggcggtctggaccacgccggagagcgtcgaagcgggggcggtgttcgccgagatcggcccgcgcatggccgagttgagcggttcccggctggccgcgcagcaacagatggaaggcctcctggcgccgcaccggcccaaggagcccgcgtggttcctggccaccgtcggcgtctcgcccgaccaccagggcaagggtctgggcagcgccgtcgtgctccccggagtggaggcggccgagcgcgccggggtgcccgccttcctggagacctccgcgccccgcaacctccccttctacgagcggctcggcttcaccgtcaccgccgacgtcgaggtgcccgaaggaccgcgcacctggtgcatgacccgcaagcccggtgcctga

SEQ ID NO: 1275 - DNA, 1833 bp, Artificial Sequence
  Synthetic Polynucleotide
atggactggatttggcgcatccttttccttgtcggcgctgctaccggcgcccattcccagctccagctgcaagagtctggacctggcctggtcaagcctagcgagacactgagcctgacctgtacagttagcggcggctctgtgtccagcagcagctattactggggctggatcagacagcctcctggcaagagactggaactgatcggcagcatctactacggcggctccacctacttcaaccccagcctgaaaagcagagtgaccatcagcgtggacaccagcaagaaccagttcagcctgaagctgagcagcgtgacagccgccgatacagccgtgtactattgtgccggcggagacacatacggccctgttggacaatggcccagcgactatagaggccagggcacactggtcacagtgtctagcacgcgtggaggcagtggtgtcttcacactcgaagatttcgttggggactggcgacagacagccggctacaacctggaccaagtccttgaacagggaggtgtgtccagtttgtttcagaatctcggggtgtccgtaactccgatccaaaggattgtcctgagcggtgaaaatgggctgaagatcgacatccatgtcatcatcccgtatgaaggtctgagcggcgaccaaatgggccagatcgaaaaaatttttaaggtggtgtaccctgtggatgatcatcactttaaggtgatcctgcactatggcacactggtaatcgacggggttacgccgaacatgatcgactatttcggacggccgtatgaaggcatcgccgtgttcgacggcaaaaagatcactgtaacagggaccctgtggaacggcaacaaaattatcgacgagcgcctgatcaaccccgacggctccctgctgttccgagtaaccatcaacggagtgaccggctggcggctgtgcgaacgcattctggcgctcgagggaggcagctggagccaccctcagtttgaaaaagactacaaagacgatgacgataagggatcagattacaaggatgatgatgacaaggggtcagattataaagacgacgatgataaagggagcgactacaaggacgacgatgacaaggcctggtcccatccccagttcgagaaacaccatcaccaccaccatcatcacactagtggctccggcgagggcagaggaagtctactaacctgcggagatgtggaagaaaatcctggcccacatatgaccgagtacaagcccacggtgcgcctcgccacccgcgacgacgtccccagggccgtacgcaccctcgccgccgcgttcgccgactaccccgccacgcgccacaccgtcgatccggaccgccacatcgagcgggtcaccgagctgcaagaactcttcctcacgcgcgtcgggctcgacatcggcaaggtgtgggtcgcggacgacggcgccgcggtggcggtctggaccacgccggagagcgtcgaagcgggggcggtgttcgccgagatcggcccgcgcatggccgagttgagcggttcccggctggccgcgcagcaacagatggaaggcctcctggcgccgcaccggcccaaggagcccgcgtggttcctggccaccgtcggcgtctcgcccgaccaccagggcaagggtctgggcagcgccgtcgtgctccccggagtggaggcggccgagcgcgccggggtgcccgccttcctggagacctccgcgccccgcaacctccccttctacgagcggctcggcttcaccgtcaccgccgacgtcgaggtgcccgaaggaccgcgcacctggtgcatgacccgcaagcccggtgcctga

SEQ ID NO: 1276 - DNA, 1830 bp, Artificial Sequence
  Synthetic Polynucleotide
atggccttaccagtgaccgccttgctcctgccgctggccttgctgctccacgccgccaggccggaggttcagctgcttgagtctggcggaggactggttcaacctggcggaagcctgagactgtcttgtgccgccagcggcttcacctttagcagctacgccatgagctgggtccgacaggctcctggcaaaggactggaatgggtgtccagcatcagcggcagcggcgactacatctactacgccgatagcgtgaagggcagattcaccatcagccgggacatcagcaagaacaccctgtacctccagatgaacagcctgagagccgaggacaccgccgtgtactactgtgccaaagaaggcaccggcgctaacagcagcctggccgattatagaggccagggcacactggtcaccgtgtctagtacgcgtggaggcagtggtgtcttcacactcgaagatttcgttggggactggcgacagacagccggctacaacctggaccaagtccttgaacagggaggtgtgtccagtttgtttcagaatctcggggtgtccgtaactccgatccaaaggattgtcctgagcggtgaaaatgggctgaagatcgacatccatgtcatcatcccgtatgaaggtctgagcggcgaccaaatgggccagatcgaaaaaatttttaaggtggtgtaccctgtggatgatcatcactttaaggtgatcctgcactatggcacactggtaatcgacggggttacgccgaacatgatcgactatttcggacggccgtatgaaggcatcgccgtgttcgacggcaaaaagatcactgtaacagggaccctgtggaacggcaacaaaattatcgacgagcgcctgatcaaccccgacggctccctgctgttccgagtaaccatcaacggagtgaccggctggcggctgtgcgaacgcattctggcgctcgagggaggcagctggagccaccctcagtttgaaaaagactacaaagacgatgacgataagggatcagattacaaggatgatgatgacaaggggtcagattataaagacgacgatgataaagggagcgactacaaggacgacgatgacaaggcctggtcccatccccagttcgagaaacaccatcaccaccaccatcatcacactagtggctccggcgagggcagaggaagtctactaacctgcggagatgtggaagaaaatcctggcccacatatgaccgagtacaagcccacggtgcgcctcgccacccgcgacgacgtccccagggccgtacgcaccctcgccgccgcgttcgccgactaccccgccacgcgccacaccgtcgatccggaccgccacatcgagcgggtcaccgagctgcaagaactcttcctcacgcgcgtcgggctcgacatcggcaaggtgtgggtcgcggacgacggcgccgcggtggcggtctggaccacgccggagagcgtcgaagcgggggcggtgttcgccgagatcggcccgcgcatggccgagttgagcggttcccggctggccgcgcagcaacagatggaaggcctcctggcgccgcaccggcccaaggagcccgcgtggttcctggccaccgtcggcgtctcgcccgaccaccagggcaagggtctgggcagcgccgtcgtgctccccggagtggaggcggccgagcgcgccggggtgcccgccttcctggagacctccgcgccccgcaacctccccttctacgagcggctcggcttcaccgtcaccgccgacgtcgaggtgcccgaaggaccgcgcacctggtgcatgacccgcaagcccggtgcctga

SEQ ID NO: 1277 - DNA, 1821 bp, Artificial Sequence
  Synthetic Polynucleotide
atggccttaccagtgaccgccttgctcctgccgctggccttgctgctccacgccgccaggccgcaggtgcagctggttgaatctggcggaggactggttcagcctggcggatctctgagactgtcttgtgccgccagcggcttcaccttcaccaatcacgccatgagctgggtccgacaggcccctggaaaaggactggaactggtgtctagcatcagcggcaacggcagaaccacctactacgccgatagcgtgaagggcagattcaccatcagccgggacatcagcaagaacaccctggacctccagatgaacagcctgagagccgaggataccgccgtgtactactgtgccaaggatggcggagagacactggtggatagcagaggccagggcacactggtcacagtgtcatctacgcgtggaggcagtggtgtcttcacactcgaagatttcgttggggactggcgacagacagccggctacaacctggaccaagtccttgaacagggaggtgtgtccagtttgtttcagaatctcggggtgtccgtaactccgatccaaaggattgtcctgagcggtgaaaatgggctgaagatcgacatccatgtcatcatcccgtatgaaggtctgagcggcgaccaaatgggccagatcgaaaaaatttttaaggtggtgtaccctgtggatgatcatcactttaaggtgatcctgcactatggcacactggtaatcgacggggttacgccgaacatgatcgactatttcggacggccgtatgaaggcatcgccgtgttcgacggcaaaaagatcactgtaacagggaccctgtggaacggcaacaaaattatcgacgagcgcctgatcaaccccgacggctccctgctgttccgagtaaccatcaacggagtgaccggctggcggctgtgcgaacgcattctggcgctcgagggaggcagctggagccaccctcagtttgaaaaagactacaaagacgatgacgataagggatcagattacaaggatgatgatgacaaggggtcagattataaagacgacgatgataaagggagcgactacaaggacgacgatgacaaggcctggtcccatccccagttcgagaaacaccatcaccaccaccatcatcacactagtggctccggcgagggcagaggaagtctactaacctgcggagatgtggaagaaaatcctggcccacatatgaccgagtacaagcccacggtgcgcctcgccacccgcgacgacgtccccagggccgtacgcaccctcgccgccgcgttcgccgactaccccgccacgcgccacaccgtcgatccggaccgccacatcgagcgggtcaccgagctgcaagaactcttcctcacgcgcgtcgggctcgacatcggcaaggtgtgggtcgcggacgacggcgccgcggtggcggtctggaccacgccggagagcgtcgaagcgggggcggtgttcgccgagatcggcccgcgcatggccgagttgagcggttcccggctggccgcgcagcaacagatggaaggcctcctggcgccgcaccggcccaaggagcccgcgtggttcctggccaccgtcggcgtctcgcccgaccaccagggcaagggtctgggcagcgccgtcgtgctccccggagtggaggcggccgagcgcgccggggtgcccgccttcctggagacctccgcgccccgcaacctccccttctacgagcggctcggcttcaccgtcaccgccgacgtcgaggtgcccgaaggaccgcgcacctggtgcatgacccgcaagcccggtgcctga

SEQ ID NO: 1278 - DNA, 2205 bp, Artificial Sequence
  Synthetic Polynucleotide
atggccttaccagtgaccgccttgctcctgccgctggccttgctgctccacgccgccaggccgcagctccagctgcaagagtctggacctggcctggtcaagcctagcgagacactgagcctgacctgtaccgtgtccggcgatagcatcagcagcggcgattactactggggctggatcagacagcctcctggcaaaggactggaatggatcggccacatctactacagcggcgtgacctactacaaccccagcctgaagtccagagtgaccatcagcgtggacaccagccggaaccagttctccctgaagctgtctagcgtgacagccgccgataccgccgtgtactactgcaccagagaggacagcagcaactggcggagtagaggccagggaacactggtcacagttagctctctcgagagcggcggaggcggatctttcgaagtgcagctgcttgaaagtggcggcggactgattcagcctggcggatctctgagactgagctgtgccgccagcggcttcaccttttctagccacgccatgacctgggtccgacaggcacctggaaaagggcttgaatgggtgtccgccatcagcggctctggcgattacacacactacgccgacagcgtgaagggcagattcaccatcagcagagacaacagcaagaacaccgtgtacctccagatgaacagcctgagagccgaggacagcgccgtgtattattgcgccaaggatgaggatggcggcagcctgcttggacacagaggacaaggcaccctggtcaccgtttcttccacgcgtggaggcagtggtgtcttcacactcgaagatttcgttggggactggcgacagacagccggctacaacctggaccaagtccttgaacagggaggtgtgtccagtttgtttcagaatctcggggtgtccgtaactccgatccaaaggattgtcctgagcggtgaaaatgggctgaagatcgacatccatgtcatcatcccgtatgaaggtctgagcggcgaccaaatgggccagatcgaaaaaatttttaaggtggtgtaccctgtggatgatcatcactttaaggtgatcctgcactatggcacactggtaatcgacggggttacgccgaacatgatcgactatttcggacggccgtatgaaggcatcgccgtgttcgacggcaaaaagatcactgtaacagggaccctgtggaacggcaacaaaattatcgacgagcgcctgatcaaccccgacggctccctgctgttccgagtaaccatcaacggagtgaccggctggcggctgtgcgaacgcattctggcgctcgagggaggcagctggagccaccctcagtttgaaaaagactacaaagacgatgacgataagggatcagattacaaggatgatgatgacaaggggtcagattataaagacgacgatgataaagggagcgactacaaggacgacgatgacaaggcctggtcccatccccagttcgagaaacaccatcaccaccaccatcatcacactagtggctccggcgagggcagaggaagtctactaacctgcggagatgtggaagaaaatcctggcccacatatgaccgagtacaagcccacggtgcgcctcgccacccgcgacgacgtccccagggccgtacgcaccctcgccgccgcgttcgccgactaccccgccacgcgccacaccgtcgatccggaccgccacatcgagcgggtcaccgagctgcaagaactcttcctcacgcgcgtcgggctcgacatcggcaaggtgtgggtcgcggacgacggcgccgcggtggcggtctggaccacgccggagagcgtcgaagcgggggcggtgttcgccgagatcggcccgcgcatggccgagttgagcggttcccggctggccgcgcagcaacagatggaaggcctcctggcgccgcaccggcccaaggagcccgcgtggttcctggccaccgtcggcgtctcgcccgaccaccagggcaagggtctgggcagcgccgtcgtgctccccggagtggaggcggccgagcgcgccggggtgcccgccttcctggagacctccgcgccccgcaacctccccttctacgagcggctcggcttcaccgtcaccgccgacgtcgaggtgcccgaaggaccgcgcacctggtgcatgacccgcaagcccggtgcctga

SEQ ID NO: 1279 - DNA, 32 bp, Artificial Sequence; identical to SEQ ID NO: 283
  Synthetic Polynucleotide
  misc_feature (30)..(32): n is a, c, g, or t

SEQ ID NO: 1280 - DNA, 2025 bp, Artificial Sequence
  Synthetic Polynucleotide
atgccctcctgggccctcttcatggtcacctcctgcctcctcctggcccctcaaaacctggcccaagtcagcagccaagatgtctccttgctggcatcagactcagagcccctgaagtgtttctcccgaacatttgaggacctcacttgcttctgggatgaggaagaggcagcgcccagtgggacataccagctgctgtatgcctacccgcgggagaagccccgtgcttgccccctgagttcccagagcatgccccactttggaacccgatacgtgtgccagtttccagaccaggaggaagtgcgtctcttctttccgctgcacctctgggtgaagaatgtgttcctaaaccagactcggactcagcgagtcctctttgtggacagtgtaggcctgccggctccccccagtatcatcaaggccatgggtgggagccagccaggggaacttcagatcagctgggaggagccagctccagaaatcagtgatttcctgaggtacgaactccgctatggccccagagatcccaagaactccactggtcccacggtcatacagctgattgccacagaaacctgctgccctgctctgcagaggcctcactcagcctctgctctggaccagtctccatgtgctcagcccacaatgccctggcaagatggaccaaagcagacctccccaagtagagaagcttcagctctgacagcagagggtggaagctgcctcatctcaggactccagcctggcaactcctactggctgcagctgcgcagcgaacctgatgggatctccctcggtggctcctggggatcctggtccctccctgtgactgtggacctgcctggagatgcagtggcacttggactgcaatgctttaccttggacctgaagaatgttacctgtcaatggcagcaacaggaccatgctagctcccaaggcttcttctaccacagcagggcacggtgctgccccagagacaggtaccccatctgggagaactgcgaagaggaagagaaaacaaatccaggactacagaccccacagttctctcgctgccacttcaagtcacgaaatgacagcattattcacatccttgtggaggtgaccacagccccgggtactgttcacagctacctgggctcccctttctggatccaccaggctgtgcgcctccccaccccaaacttgcactggagggagatctccagtgggcatctggaattggagtggcagcacccatcgtcctgggcagcccaagagacctgttatcaactccgatacacaggagaaggccatcaggactggaaggtgctggagccgcctctcggggcccgaggagggaccctggagctgcgcccgcgatctcgctaccgtttacagctgcgcgccaggctcaacggccccacctaccaaggtccctggagctcgtggtcggacccaactagggtggagaccgccaccgagaccgccacgcgtggaggcagtggtgtcttcacactcgaagatttcgttggggactggcgacagacagccggctacaacctggaccaagtccttgaacagggaggtgtgtccagtttgtttcagaatctcggggtgtccgtaactccgatccaaaggattgtcctgagcggtgaaaatgggctgaagatcgacatccatgtcatcatcccgtatgaaggtctgagcggcgaccaaatgggccagatcgaaaaaatttttaaggtggtgtaccctgtggatgatcatcactttaaggtgatcctgcactatggcacactggtaatcgacggggttacgccgaacatgatcgactatttcggacggccgtatgaaggcatcgccgtgttcgacggcaaaaagatcactgtaacagggaccctgtggaacggcaacaaaattatcgacgagcgcctgatcaaccccgacggctccctgctgttccgagtaaccatcaacggagtgaccggctggcggctgtgcgaacgcattctggcgagttggaaggatgcctctggatggtcc

SEQ ID NO: 1281 - DNA, 1449 bp, Artificial Sequence
  Synthetic Polynucleotide
atgccacctcctcgcctcctcttcttcctcctcttcctcacccccatggaagtcaggcccgactacaaggacgacgatgacaaggaggaacctctagtggtgaaggtggaagagggagataacgctgtgctgcagtgcctcaaggggacctcagatggccccactcagcagctgacctggtctcgggagtccccgcttaaacccttcttaaaactcagcctggggctgccaggcctgggaatccacatgaggcccctggccatctggcttttcatcttcaacgtctctcaacagatggggggcttctacctgtgccagccggggcccccctctgagaaggcctggcagcctggctggacagtcaatgtggagggcagcggggagctgttccggtggaatgtttcggacctaggtggcctgggctgtggcctgaagaacaggtcctcagagggccccagctccccttccgggaagctcatgagccccaagctgtatgtgtgggccaaagaccgccctgaaatctgggagggagagcctccgtgtctcccaccgagggacagcctgaaccagagcctcagccaggacctcaccatggcccctggctccacactctggctgtcctgtggggtaccccctgactctgtgtccaggggccccctctcctggacccatgtgcaccccaaggggcctaagtcattgctgagcctagagctgaaggacgatcgcccggccagagatatgtgggtaatggagacgggtctgttgttgccccgggccacagctcaagacgctggaaagtattattgtcaccgtggcaacctgaccatgtcattccacctcgagatcactgctcggccagtactatggcactggctgctgaggactggtggctggacgcgtggaggcagtggtgtcttcacactcgaagatttcgttggggactggcgacagacagccggctacaacctggaccaagtccttgaacagggaggtgtgtccagtttgtttcagaatctcggggtgtccgtaactccgatccaaaggattgtcctgagcggtgaaaatgggctgaagatcgacatccatgtcatcatcccgtatgaaggtctgagcggcgaccaaatgggccagatcgaaaaaatttttaaggtggtgtaccctgtggatgatcatcactttaaggtgatcctgcactatggcacactggtaatcgacggggttacgccgaacatgatcgactatttcggacggccgtatgaaggcatcgccgtgttcgacggcaaaaagatcactgtaacagggaccctgtggaacggcaacaaaattatcgacgagcgcctgatcaaccccgacggctccctgctgttccgagtaaccatcaacggagtgaccggctggcggctgtgcgaacgcattctggcgagttggaaggatgcctctggatggtcc

SEQ ID NO: 1282 - DNA, 2298 bp, Artificial Sequence
  Synthetic Polynucleotide
atgccacctcctcgcctcctcttcttcctcctcttcctcacccccatggaagtcaggcccgactacaaggacgacgatgacaaggaggaacctctagtggtgaaggtggaagagggagataacgctgtgctgcagtgcctcaaggggacctcagatggccccactcagcagctgacctggtctcgggagtccccgcttaaacccttcttaaaactcagcctggggctgccaggcctgggaatccacatgaggcccctggccatctggcttttcatcttcaacgtctctcaacagatggggggcttctacctgtgccagccggggcccccctctgagaaggcctggcagcctggctggacagtcaatgtggagggcagcggggagctgttccggtggaatgtttcggacctaggtggcctgggctgtggcctgaagaacaggtcctcagagggccccagctccccttccgggaagctcatgagccccaagctgtatgtgtgggccaaagaccgccctgaaatctgggagggagagcctccgtgtctcccaccgagggacagcctgaaccagagcctcagccaggacctcaccatggcccctggctccacactctggctgtcctgtggggtaccccctgactctgtgtccaggggccccctctcctggacccatgtgcaccccaaggggcctaagtcattgctgagcctagagctgaaggacgatcgcccggccagagatatgtgggtaatggagacgggtctgttgttgccccgggccacagctcaagacgctggaaagtattattgtcaccgtggcaacctgaccatgtcattccacctcgagatcactgctcggccagtactatggcactggctgctgaggactggtggctggacgcgtggaggcagtggtgtcttcacactcgaagatttcgttggggactggcgacagacagccggctacaacctggaccaagtccttgaacagggaggtgtgtccagtttgtttcagaatctcggggtgtccgtaactccgatccaaaggattgtcctgagcggtgaaaatgggctgaagatcgacatccatgtcatcatcccgtatgaaggtctgagcggcgaccaaatgggccagatcgaaaaaatttttaaggtggtgtaccctgtggatgatcatcactttaaggtgatcctgcactatggcacactggtaatcgacggggttacgccgaacatgatcgactatttcggacggccgtatgaaggcatcgccgtgttcgacggcaaaaagatcactgtaacagggaccctgtggaacggcaacaaaattatcgacgagcgcctgatcaaccccgacggctccctgctgttccgagtaaccatcaacggagtgaccggctggcggctgtgcgaacgcattctggcgctcgagggaggcagctggagccaccctcagtttgaaaaagactacaaagacgatgacgataagggatcagattacaaggatgatgatgacaaggggtcagattataaagacgacgatgataaagggagcgactacaaggacgacgatgacaaggcctggtcccatccccagttcgagaaacaccatcaccaccaccatcatcacactagtggctccggcgagggcagaggaagtctactaacctgcggagatgtggaagaaaatcctggcccacatatgaccgagtacaagcccacggtgcgcctcgccacccgcgacgacgtccccagggccgtacgcaccctcgccgccgcgttcgccgactaccccgccacgcgccacaccgtcgatccggaccgccacatcgagcgggtcaccgagctgcaagaactcttcctcacgcgcgtcgggctcgacatcggcaaggtgtgggtcgcggacgacggcgccgcggtggcggtctggaccacgccggagagcgtcgaagcgggggcggtgttcgccgagatcggcccgcgcatggccgagttgagcggttcccggctggccgcgcagcaacagatggaaggcctcctggcgccgcaccggcccaaggagcccgcgtggttcctggccaccgtcggcgtctcgcccgaccaccagggcaagggtctgggcagcgccgtcgtgctccccggagtggaggcggccgagcgcgccggggtgcccgccttcctggagacctccgcgccccgcaacctccccttctacgagcggctcggcttcaccgtcaccgccgacgtcgaggtgcccgaaggaccgcgcacctggtgcatgacccgcaagcccggtgcctga

SEQ ID NO: 1283 - DNA, 2160 bp, Artificial Sequence
  Synthetic Polynucleotide
atgccgctgctgctactgctgcccctgctgtgggcaggggccctggctatggatccaaatttctggctgcaagtgcaggagtcagtgacggtacaggagggtttgtgcgtcctcgtgccctgcactttcttccatcccataccctactacgacaagaactccccagttcatggttactggttccgggaaggagccattatatccggggactctccagtggccacaaacaagctagatcaagaagtacaggaggagactcagggcagattccgcctccttggggatcccagtaggaacaactgctccctgagcatcgtagacgccaggaggagggataatggttcatacttctttcggatggagagaggaagtaccaaatacagttacaaatctccccagctctctgtgcatgtgacagacttgacccacaggcccaaaatcctcatccctggcactctagaacccggccactccaaaaacctgacctgctctgtgtcctgggcctgtgagcagggaacacccccgatcttctcctggttgtcagctgcccccacctccctgggccccaggactactcactcctcggtgctcataatcaccccacggccccaggaccacggcaccaacctgacctgtcaggtgaagttcgctggagctggtgtgactacggagagaaccatccagctcaacgtcacctatgttccacagaacccaacaactggtatctttccaggagatggctcagggaaacaagagacgcgtggaggcagtggtgtcttcacactcgaagatttcgttggggactggcgacagacagccggctacaacctggaccaagtccttgaacagggaggtgtgtccagtttgtttcagaatctcggggtgtccgtaactccgatccaaaggattgtcctgagcggtgaaaatgggctgaagatcgacatccatgtcatcatcccgtatgaaggtctgagcggcgaccaaatgggccagatcgaaaaaatttttaaggtggtgtaccctgtggatgatcatcactttaaggtgatcctgcactatggcacactggtaatcgacggggttacgccgaacatgatcgactatttcggacggccgtatgaaggcatcgccgtgttcgacggcaaaaagatcactgtaacagggaccctgtggaacggcaacaaaattatcgacgagcgcctgatcaaccccgacggctccctgctgttccgagtaaccatcaacggagtgaccggctggcggctgtgcgaacgcattctggcgctcgagggaggcagctggagccaccctcagtttgaaaaagactacaaagacgatgacgataagggatcagattacaaggatgatgatgacaaggggtcagattataaagacgacgatgataaagggagcgactacaaggacgacgatgacaaggcctggtcccatccccagttcgagaaacaccatcaccaccaccatcatcacactagtggctccggcgagggcagaggaagtctactaacctgcggagatgtggaagaaaatcctggcccacatatgaccgagtacaagcccacggtgcgcctcgccacccgcgacgacgtccccagggccgtacgcaccctcgccgccgcgttcgccgactaccccgccacgcgccacaccgtcgatccggaccgccacatcgagcgggtcaccgagctgcaagaactcttcctcacgcgcgtcgggctcgacatcggcaaggtgtgggtcgcggacgacggcgccgcggtggcggtctggaccacgccggagagcgtcgaagcgggggcggtgttcgccgagatcggcccgcgcatggccgagttgagcggttcccggctggccgcgcagcaacagatggaaggcctcctggcgccgcaccggcccaaggagcccgcgtggttcctggccaccgtcggcgtctcgcccgaccaccagggcaagggtctgggcagcgccgtcgtgctccccggagtggaggcggccgagcgcgccggggtgcccgccttcctggagacctccgcgccccgcaacctccccttctacgagcggctcggcttcaccgtcaccgccgacgtcgaggtgcccgaaggaccgcgcacctggtgcatgacccgcaagcccggtgcctga

SEQ ID NO: 1284 - DNA, 2088 bp, Artificial Sequence
  Synthetic Polynucleotide
atgccgctgctgctactgctgcccctgctgtgggcaggggccctggctatggatccaaatttctggctgcaagtgcaggagtcagtgacggtacaggagggtttgtgcgtcctcgtgccctgcactttcttccatcccataccctactacgacaagaactccccagttcatggttactggttccgggaaggagccattatatccggggactctccagtggccacaaacaagctagatcaagaagtacaggaggagactcagggcagattccgcctccttggggatcccagtaggaacaactgctccctgagcatcgtagacgccaggaggagggataatggttcatacttctttcggatggagagaggaagtaccaaatacagttacaaatctccccagctctctgtgcatgtgacagacttgacccacaggcccaaaatcctcatccctggcactctagaacccggccactccaaaaacctgacctgctctgtgtcctgggcctgtgagcagggaacacccccgatcttctcctggttgtcagctgcccccacctccctgggccccaggactactcactcctcggtgctcataatcaccccacggccccaggaccacggcaccaacctgacctgtcaggtgaagttcgctggagctggtgtgactacggagagaaccatccagctcaacgtcacctatgttccacagaacccaacaactggtatctttccaggagatggctcagggaaacaagagacgcgtggaggcagtgaagccgaggccgagagaggcaagctgcccggcaaaaagctgcccctggaagtgctgatcgagctggaagccaacgccagaaaggccggctgcaccagaggctgcctgatctgcctgagcaagatcaagtgcaccgccaagatgaagaagtacatccccggcagatgcgccgactacggcggcgataagaaaacaggccaggccggcatcgtgggagccatcgtggatatccctgagatcagcggcttcaaagaaatggaacccatggaacagtttatcgcccaggtggaccgctgcgccgattgcacaacaggctgtctgaagggcctggctaacgtgaagtgcagcgacctgctgaagaagtggctgcctggcagatgtgccaccttcgccgacaagatccagagcgaggtggacaacatcaagggactggccggcgacctcgagggaggcagctggagccaccctcagtttgaaaaagactacaaagacgatgacgataagggatcagattacaaggatgatgatgacaaggggtcagattataaagacgacgatgataaagggagcgactacaaggacgacgatgacaaggcctggtcccatccccagttcgagaaacaccatcaccaccaccatcatcacactagtggctccggcgagggcagaggaagtctactaacctgcggagatgtggaagaaaatcctggcccacatatgaccgagtacaagcccacggtgcgcctcgccacccgcgacgacgtccccagggccgtacgcaccctcgccgccgcgttcgccgactaccccgccacgcgccacaccgtcgatccggaccgccacatcgagcgggtcaccgagctgcaagaactcttcctcacgcgcgtcgggctcgacatcggcaaggtgtgggtcgcggacgacggcgccgcggtggcggtctggaccacgccggagagcgtcgaagcgggggcggtgttcgccgagatcggcccgcgcatggccgagttgagcggttcccggctggccgcgcagcaacagatggaaggcctcctggcgccgcaccggcccaaggagcccgcgtggttcctggccaccgtcggcgtctcgcccgaccaccagggcaagggtctgggcagcgccgtcgtgctccccggagtggaggcggccgagcgcgccggggtgcccgccttcctggagacctccgcgccccgcaacctccccttctacgagcggctcggcttcaccgtcaccgccgacgtcgaggtgcccgaaggaccgcgcacctggtgcatgacccgcaagcccggtgcctga

SEQ ID NO: 1285 - DNA, 2190 bp, Artificial Sequence
  Synthetic Polynucleotide
atgccgctgctgctactgctgcccctgctgtgggcaggggccctggctatggatccaaatttctggctgcaagtgcaggagtcagtgacggtacaggagggtttgtgcgtcctcgtgccctgcactttcttccatcccataccctactacgacaagaactccccagttcatggttactggttccgggaaggagccattatatccggggactctccagtggccacaaacaagctagatcaagaagtacaggaggagactcagggcagattccgcctccttggggatcccagtaggaacaactgctccctgagcatcgtagacgccaggaggagggataatggttcatacttctttcggatggagagaggaagtaccaaatacagttacaaatctccccagctctctgtgcatgtgacagacttgacccacaggcccaaaatcctcatccctggcactctagaacccggccactccaaaaacctgacctgctctgtgtcctgggcctgtgagcagggaacacccccgatcttctcctggttgtcagctgcccccacctccctgggccccaggactactcactcctcggtgctcataatcaccccacggccccaggaccacggcaccaacctgacctgtcaggtgaagttcgctggagctggtgtgactacggagagaaccatccagctcaacgtcacctatgttccacagaacccaacaactggtatctttccaggagatggctcagggaaacaagagacgcgtggaggcagtcagcccaccgagaacaagcaggaaagccagatcgaggacatcgacagaagcaccagcctgggcctgatgtgctacgagcagtgtacaggccagagcggcctggatctgaagtgctacaaagagtgcgccgacttcaccggcgaccggaacagaggcagaaagctgcccggcaagaaactgcccctggaagtgctgaagatcatggaagccaacgccagaagggccggctgcaccagaggctgcctgatctgcctgagcaagatcaagtgcaccgccaagatgaagcagtacatccccggcagatgccacacctacgagggcgacaagtctatcggccagggcggcatcggaggccccatcgtggatatccctgagatcatcggcttccagaacatggaacctatggaacagtttatcgcccaggtggacctgtgcgccgattgcacaaccggctgtctgaagggcctggctaacgtgcggtgcaacgacctgctgaagaagtggctgcccgacagatgcgccggcttcgccaacaagatccagagcgaggtggacaacatcaagggactggccggcgacagactcgagtacccctacgatgtgcccgattacgcttggagccaccctcagtttgaaaaatacccctatgacgtgccggactacgctggctatccttacgacgtcccagactacgcaggctacccctacgacgtcccagattaccaccatcaccaccaccatcatcacactagtggctccggcgagggcagaggaagtctactaacctgcggagatgtggaagaaaatcctggcccacatatgaccgagtacaagcccacggtgcgcctcgccacccgcgacgacgtccccagggccgtacgcaccctcgccgccgcgttcgccgactaccccgccacgcgccacaccgtcgatccggaccgccacatcgagcgggtcaccgagctgcaagaactcttcctcacgcgcgtcgggctcgacatcggcaaggtgtgggtcgcggacgacggcgccgcggtggcggtctggaccacgccggagagcgtcgaagcgggggcggtgttcgccgagatcggcccgcgcatggccgagttgagcggttcccggctggccgcgcagcaacagatggaaggcctcctggcgccgcaccggcccaaggagcccgcgtggttcctggccaccgtcggcgtctcgcccgaccaccagggcaagggtctgggcagcgccgtcgtgctccccggagtggaggcggccgagcgcgccggggtgcccgccttcctggagacctccgcgccccgcaacctccccttctacgagcggctcggcttcaccgtcaccgccgacgtcgaggtgcccgaaggaccgcgcacctggtgcatgacccgcaagcccggtgcctga

SEQ ID NO: 1286 - DNA, 1386 bp, Artificial Sequence
  Synthetic Polynucleotide
atgccgctgctgctactgctgcccctgctgtgggcaggggccctggctatggatccaaatttctggctgcaagtgcaggagtcagtgacggtacaggagggtttgtgcgtcctcgtgccctgcactttcttccatcccataccctactacgacaagaactccccagttcatggttactggttccgggaaggagccattatatccggggactctccagtggccacaaacaagctagatcaagaagtacaggaggagactcagggcagattccgcctccttggggatcccagtaggaacaactgctccctgagcatcgtagacgccaggaggagggataatggttcatacttctttcggatggagagaggaagtaccaaatacagttacaaatctccccagctctctgtgcatgtgacagacttgacccacaggcccaaaatcctcatccctggcactctagaacccggccactccaaaaacctgacctgctctgtgtcctgggcctgtgagcagggaacacccccgatcttctcctggttgtcagctgcccccacctccctgggccccaggactactcactcctcggtgctcataatcaccccacggccccaggaccacggcaccaacctgacctgtcaggtgaagttcgctggagctggtgtgactacggagagaaccatccagctcaacgtcacctatgttccacagaacccaacaactggtatctttccaggagatggctcagggaaacaagagacgcgtggaggcagtgccgcctctgaagaggccgatgacgatcacgtgtccctcgtgaagaactactggcggatcggcgtgggcaacgagcgggatgtgtctctggatagaggcggccctcccaagctgagcaaagaactgctggccgagatgcacgccattgccagcaatgccggctgctccagagtgtgcctgatcggcctgagcaagatcaagtgcacccccaagatgaagaccttcctgcccggcagatgcaacaccttcgcccctaaacctgccaccggcgacggaccttttgccgccgctgctgccatccctggcttcagcgatctgaccgctatggaacagtacaaggcccaggtggcccagtgcgactgctccaacagatgcctcgtgggcctggctaacatcaagtgttctgccgccctgaaggccgccctgcctcagagatgtaccacctttgccaccaacatccagaaagagggcgaggtggacagcatcaagggctacggcagaaagctcgagaccgatttctacgactacaaggacgacgatgacaaggattataaagatgatgacgataaagtcgagaccgatttctacgactacaaggacgacgatgacaagtag

SEQ ID NO: 1287 - DNA, 2127 bp, Artificial Sequence
  Synthetic Polynucleotide
atgaggcgcgcggcgctctggctctggctgtgcgcgctggcgctgagcctgcagccggccctgccgcaaattgtggctactaatttgccccctgaagatcaagatggctctggggatgactctgacaacttctccggctcaggtgcaggtgctttgcaagatatcaccttgtcacagcagaccccctccacttggaaggacacgcagctcctgacggctattcccacgtctccagaacccaccggcctggaggctacagctgcctccacctccaccctgccggctggagaggggcccaaggagggagaggctgtagtcctgccagaagtggagcctggcctcaccgcccgggagcaggaggccaccccccgacccagggagaccacacagctcccgaccactcatcaggcctcaacgaccacagccaccacggcccaggagcccgccacctcccacccccacagggacatgcagcctggccaccatgagacctcaacccctgcaggacccagccaagctgaccttcacactccccacacagaggatggaggtccttctgccaccgagagggctgctgaggatggagcctccagtcagctcccagcagcagagggctctggggagcaggacttcacctttgaaacctcgggggagaatacggctgtagtggccgtggagcctgaccgccggaaccagtccccagtggatcagggggccacggggacgcgtggaggcagtggtgtcttcacactcgaagatttcgttggggactggcgacagacagccggctacaacctggaccaagtccttgaacagggaggtgtgtccagtttgtttcagaatctcggggtgtccgtaactccgatccaaaggattgtcctgagcggtgaaaatgggctgaagatcgacatccatgtcatcatcccgtatgaaggtctgagcggcgaccaaatgggccagatcgaaaaaatttttaaggtggtgtaccctgtggatgatcatcactttaaggtgatcctgcactatggcacactggtaatcgacggggttacgccgaacatgatcgactatttcggacggccgtatgaaggcatcgccgtgttcgacggcaaaaagatcactgtaacagggaccctgtggaacggcaacaaaattatcgacgagcgcctgatcaaccccgacggctccctgctgttccgagtaaccatcaacggagtgaccggctggcggctgtgcgaacgcattctggcgctcgagggaggcagctggagccaccctcagtttgaaaaagactacaaagacgatgacgataagggatcagattacaaggatgatgatgacaaggggtcagattataaagacgacgatgataaagggagcgactacaaggacgacgatgacaaggcctggtcccatccccagttcgagaaacaccatcaccaccaccatcatcacactagtggctccggcgagggcagaggaagtctactaacctgcggagatgtggaagaaaatcctggcccacatatgaccgagtacaagcccacggtgcgcctcgccacccgcgacgacgtccccagggccgtacgcaccctcgccgccgcgttcgccgactaccccgccacgcgccacaccgtcgatccggaccgccacatcgagcgggtcaccgagctgcaagaactcttcctcacgcgcgtcgggctcgacatcggcaaggtgtgggtcgcggacgacggcgccgcggtggcggtctggaccacgccggagagcgtcgaagcgggggcggtgttcgccgagatcggcccgcgcatggccgagttgagcggttcccggctggccgcgcagcaacagatggaaggcctcctggcgccgcaccggcccaaggagcccgcgtggttcctggccaccgtcggcgtctcgcccgaccaccagggcaagggtctgggcagcgccgtcgtgctccccggagtggaggcggccgagcgcgccggggtgcccgccttcctggagacctccgcgccccgcaacctccccttctacgagcggctcggcttcaccgtcaccgccgacgtcgaggtgcccgaaggaccgcgcacctggtgcatgacccgcaagcccggtgcctga

SEQ ID NO: 1288 - DNA, 2304 bp, Artificial Sequence
  Synthetic Polynucleotide
atggtgctgctgtggctgaccctgctgctgatcgccctgccttgtctgctgcagaccaaagaggaccccaacccccccatcaccaacctgcggatgaaggccaaagcccagcaactgacctgggacctgaaccggaacgtgaccgacatcgagtgcgtgaaggacgccgactactccatgcccgccgtgaacaacagctactgccagttcggagccatcagcctgtgcgaagtgaccaactacaccgtgcgggtggcaaacccccccttctccacctggattctgttccccgagaacagcggcaagccctgggctggcgctgagaatctgacctgctggattcacgacgtggactttctgagctgctcctgggctgtgggacctggcgctcctgccgatgtgcagtacgacctgtacctgaatgtggctaaccggcggcagcagtacgagtgcctgcactacaagaccgacgcccagggcaccagaatcggctgcagattcgacgacatcagcagactgagcagcggcagccagtccagccacatccttgtgcggggaagaagcgccgccttcggcatcccttgcaccgacaagttcgtggtgttcagccagatcgagatcctgaccccccccaacatgaccgccaagtgcaacaagacccacagcttcatgcactggaagatgcggagccacttcaaccggaagttcagatacgagctgcagatccagaaacggatgcagcccgtgattaccgaacaagtgcgggaccggaccagcttccaactgctgaaccctggcacctacacagtgcagatccgggccagagaacgggtgtacgagttcctgagcgcctggtccaccccccagagattcgagtgcgatcaggaagagggggccaacacgcgtggaggcagtggtgtcttcacactcgaagatttcgttggggactggcgacagacagccggctacaacctggaccaagtccttgaacagggaggtgtgtccagtttgtttcagaatctcggggtgtccgtaactccgatccaaaggattgtcctgagcggtgaaaatgggctgaagatcgacatccatgtcatcatcccgtatgaaggtctgagcggcgaccaaatgggccagatcgaaaaaatttttaaggtggtgtaccctgtggatgatcatcactttaaggtgatcctgcactatggcacactggtaatcgacggggttacgccgaacatgatcgactatttcggacggccgtatgaaggcatcgccgtgttcgacggcaaaaagatcactgtaacagggaccctgtggaacggcaacaaaattatcgacgagcgcctgatcaaccccgacggctccctgctgttccgagtaaccatcaacggagtgaccggctggcggctgtgcgaacgcattctggcgctcgagggaggcagctggagccaccctcagtttgaaaaagactacaaagacgatgacgataagggatcagattacaaggatgatgatgacaaggggtcagattataaagacgacgatgataaagggagcgactacaaggacgacgatgacaaggcctggtcccatccccagttcgagaaacaccatcaccaccaccatcatcacactagtggctccggcgagggcagaggaagtctactaacctgcggagatgtggaagaaaatcctggcccacatatgaccgagtacaagcccacggtgcgcctcgccacccgcgacgacgtccccagggccgtacgcaccctcgccgccgcgttcgccgactaccccgccacgcgccacaccgtcgatccggaccgccacatcgagcgggtcaccgagctgcaagaactcttcctcacgcgcgtcgggctcgacatcggcaaggtgtgggtcgcggacgacggcgccgcggtggcggtctggaccacgccggagagcgtcgaagcgggggcggtgttcgccgagatcggcccgcgcatggccgagttgagcggttcccggctggccgcgcagcaacagatggaaggcctcctggcgccgcaccggcccaaggagcccgcgtggttcctggccaccgtcggcgtctcgcccgaccaccagggcaagggtctgggcagcgccgtcgtgctccccggagtggaggcggccgagcgcgccggggtgcccgccttcctggagacctccgcgccccgcaacctccccttctacgagcggctcggcttcaccgtcaccgccgacgtcgaggtgcccgaaggaccgcgcacctggtgcatgacccgcaagcccggtgcctga

SEQ ID NO: 1289 - DNA, 3531 bp, Artificial Sequence
  Synthetic Polynucleotide
atgggcccttggagccgcagcctctcggcgctgctgctgctgctgcaggtctcctcttggctctgccaggagccggagccctgccaccctggctttgacgccgagagctacacgttcacggtgccccggcgccacctggagagaggccgcgtcctgggcagagtgaattttgaagattgcaccggtcgacaaaggacagcctatttttccctcgacacccgattcaaagtgggcacagatggtgtgattacagtcaaaaggcctctacggtttcataacccacagatccatttcttggtctacgcctgggactccacctacagaaagttttccaccaaagtcacgctgaatacagtggggcaccaccaccgccccccgccccatcaggcctccgtttctggaatccaagcagaattgctcacatttcccaactcctctcctggcctcagaagacagaagagagactgggttattcctcccatcagctgcccagaaaatgaaaaaggcccatttcctaaaaacctggttcagatcaaatccaacaaagacaaagaaggcaaggttttctacagcatcactggccaaggagctgacacaccccctgttggtgtctttattattgaaagagaaacaggatggctgaaggtgacagagcctctggatagagaacgcattgccacatacactctcttctctcacgctgtgtcatccaacgggaatgcagttgaggatccaatggagattttgatcacggtaaccgatcagaatgacaacaagcccgaattcacccaggaggtctttaaggggtctgtcatggaaggtgctcttccaggaacctctgtgatggaggtcacagccacagacgcggacgatgatgtgaacacctacaatgccgccatcgcttacaccatcctcagccaagatcctgagctccctgacaaaaatatgttcaccattaacaggaacacaggagtcatcagtgtggtcaccactgggctggaccgagagagtttccctacgtataccctggtggttcaagctgctgaccttcaaggtgaggggttaagcacaacagcaacagctgtgatcacagtcactgacaccaacgataatcctccgatcttcaatcccaccacgtacaagggtcaggtgcctgagaacgaggctaacgtcgtaatcaccacactgaaagtgactgatgctgatgcccccaataccccagcgtgggaggctgtatacaccatattgaatgatgatggtggacaatttgtcgtcaccacaaatccagtgaacaacgatggcattttgaaaacagcaaagggcttggattttgaggccaagcagcagtacattctacacgtagcagtgacgaatgtggtaccttttgaggtctctctcaccacctccacagccaccgtcaccgtggatgtgctggatgtgaatgaagcccccatctttgtgcctcctgaaaagagagtggaagtgtccgaggactttggcgtgggccaggaaatcacatcctacactgcccaggagccagacacatttatggaacagaaaataacatatcggatttggagagacactgccaactggctggagattaatccggacactggtgccatttccactcgggctgagctggacagggaggattttgagcacgtgaagaacagcacgtacacagccctaatcatagctacagacaatggttctccagttgctactggaacagggacacttctgctgatcctgtctgatgtgaatgacaacgcccccataccagaacctcgaactatattcttctgtgagaggaatccaaagcctcaggtcataaacatcattgatgcagaccttcctcccaatacatctcccttcacagcagaactaacacacggggcgagtgccaactggaccattcagtacaacgacccaacccaagaatctatcattttgaagccaaagatggccttagaggtgggtgactacaaaatcaatctcaagctcatggataaccagaataaagaccaagtgaccaccttagaggtcagcgtgtgtgactgtgaaggggccgctggcgtctgtaggaaggcacagcctgtcgaagcaggattgcaaattcctgccacgcgtggaggcagtggtgtcttcacactcgaagatttcgttggggactggcgacagacagccggctacaacctggaccaagtccttgaacagggaggtgtgtccagtttgtttcagaatctcggggtgtccgtaactccgatccaaaggattgtcctgagcggtgaaaatgggctgaagatcgacatccatgtcatcatcccgtatgaaggtctgagcggcgaccaaatgggccagatcgaaaaaatttttaaggtggtgtaccctgtggatgatcatcactttaaggtgatcctgcactatggcacactggtaatcgacggggttacgccgaacatgatcgactatttcggacggccgtatgaaggcatcgccgtgttcgacggcaaaaagatcactgtaacagggaccctgtggaacggcaacaaaattatcgacgagcgcctgatcaaccccgacggctccctgctgttccgagtaaccatcaacggagtgaccggctggcggctgtgcgaacgcattctggcgctcgagggaggcagctggagccaccctcagtttgaaaaagactacaaagacgatgacgataagggatcagattacaaggatgatgatgacaaggggtcagattataaagacgacgatgataaagggagcgactacaaggacgacgatgacaaggcctggtcccatccccagttcgagaaacaccatcaccaccaccatcatcacactagtggctccggcgagggcagaggaagtctactaacctgcggagatgtggaagaaaatcctggcccacatatgaccgagtacaagcccacggtgcgcctcgccacccgcgacgacgtccccagggccgtacgcaccctcgccgccgcgttcgccgactaccccgccacgcgccacaccgtcgatccggaccgccacatcgagcgggtcaccgagctgcaagaactcttcctcacgcgcgtcgggctcgacatcggcaaggtgtgggtcgcggacgacggcgccgcggtggcggtctggaccacgccggagagcgtcgaagcgggggcggtgttcgccgagatcggcccgcgcatggccgagttgagcggttcccggctggccgcgcagcaacagatggaaggcctcctggcgccgcaccggcccaaggagcccgcgtggttcctggccaccgtcggcgtctcgcccgaccaccagggcaagggtctgggcagcgccgtcgtgctccccggagtggaggcggccgagcgcgccggggtgcccgccttcctggagacctccgcgccccgcaacctccccttctacgagcggctcggcttcaccgtcaccgccgacgtcgaggtgcccgaaggaccgcgcacctggtgcatgacccgcaagcccggtgcctga

SEQ ID NO: 1290 - DNA, 2121 bp, Artificial Sequence
  Synthetic Polynucleotide
atgtcagctccaagattactgatttccatcattatcatggtgtctgcttcaagtagttcatgcatgggtggaaagcagatgacacagaactattcaacaatttttgcagaaggtaacatttcacagcctgtactgatggatataaatgctgtgctttgttgccctcctatcgcattaagaaatttgatcataataacatgggaaataatcctgagaggccagccttcctgcacaaaagcctacaagaaagaaacaaatgagaccaaggaaaccaactgtactgttgagagaataacctgggtctctagacctgatcagaattcggaccttcagattcttccggtggacaccactcatgacgggtattacagaggcatagtggtaacacctgatgggaatttccatcgtggatatcacctccaagtgttagttacacccgaagtgaacctatttcaaagcaggaatataactgcagtatgcaaggcagttacagggaagccagctgcccagatctcctggatcccagagggatctattcttgccactaagcaagaatactggggcaatggcacagtgacggttaagagtacatgcccctgggagggccacaagtctactgtgacctgccatgtctcccatttgactggcaacaagagtctgtccgtaaagttgaattcaggtctcagaacctcaggatctccagcgttgtccttactgacgcgtggaggcagtggtgtcttcacactcgaagatttcgttggggactggcgacagacagccggctacaacctggaccaagtccttgaacagggaggtgtgtccagtttgtttcagaatctcggggtgtccgtaactccgatccaaaggattgtcctgagcggtgaaaatgggctgaagatcgacatccatgtcatcatcccgtatgaaggtctgagcggcgaccaaatgggccagatcgaaaaaatttttaaggtggtgtaccctgtggatgatcatcactttaaggtgatcctgcactatggcacactggtaatcgacggggttacgccgaacatgatcgactatttcggacggccgtatgaaggcatcgccgtgttcgacggcaaaaagatcactgtaacagggaccctgtggaacggcaacaaaattatcgacgagcgcctgatcaaccccgacggctccctgctgttccgagtaaccatcaacggagtgaccggctggcggctgtgcgaacgcattctggcgctcgagggaggcagctggagccaccctcagtttgaaaaagactacaaagacgatgacgataagggatcagattacaaggatgatgatgacaaggggtcagattataaagacgacgatgataaagggagcgactacaaggacgacgatgacaaggcctggtcccatccccagttcgagaaacaccatcaccaccaccatcatcacactagtggctccggcgagggcagaggaagtctactaacctgcggagatgtggaagaaaatcctggcccacatatgaccgagtacaagcccacggtgcgcctcgccacccgcgacgacgtccccagggccgtacgcaccctcgccgccgcgttcgccgactaccccgccacgcgccacaccgtcgatccggaccgccacatcgagcgggtcaccgagctgcaagaactcttcctcacgcgcgtcgggctcgacatcggcaaggtgtgggtcgcggacgacggcgccgcggtggcggtctggaccacgccggagagcgtcgaagcgggggcggtgttcgccgagatcggcccgcgcatggccgagttgagcggttcccggctggccgcgcagcaacagatggaaggcctcctggcgccgcaccggcccaaggagcccgcgtggttcctggccaccgtcggcgtctcgcccgaccaccagggcaagggtctgggcagcgccgtcgtgctccccggagtggaggcggccgagcgcgccggggtgcccgccttcctggagacctccgcgccccgcaacctccccttctacgagcggctcggcttcaccgtcaccgccgacgtcgaggtgcccgaaggaccgcgcacctggtgcatgacccgcaagcccggtgcctga

SEQ ID NO: 1291 - DNA, 2868 bp, Artificial Sequence
  Synthetic Polynucleotide
atggaatgtctctactatttcctgggatttctgctcctggctgcaagattgccacttgatgccgccaaacgatttcatgatgtgctgggcaatgaaagaccttctgcttacatgagggagcacaatcaattaaatggctggtcttctgatgaaaatgactggaatgaaaaactctacccagtgtggaagcggggagacatgaggtggaaaaactcctggaagggaggccgtgtgcaggcggtcctgaccagtgactcaccagccctcgtgggctcaaatataacatttgcggtgaacctgatattccctagatgccaaaaggaagatgccaatggcaacatagtctatgagaagaactgcagaaatgaggctggtttatctgctgatccgtatgtttacaactggacagcatggtcagaggacagtgacggggaaaatggcaccggccaaagccatcataacgtcttccctgatgggaaaccttttcctcaccaccccggatggagaagatggaatttcatctacgtcttccacacacttggtcagtatttccagaaattgggacgatgttcagtgagagtttctgtgaacacagccaatgtgacacttgggcctcaactcatggaagtgactgtctacagaagacatggacgggcatatgttcccatcgcacaagtgaaagatgtgtacgtggtaacagatcagattcctgtgtttgtgactatgttccagaagaacgatcgaaattcatccgacgaaaccttcctcaaagatctccccattatgtttgatgtcctgattcatgatcctagccacttcctcaattattctaccattaactacaagtggagcttcggggataatactggcctgtttgtttccaccaatcatactgtgaatcacacgtatgtgctcaatggaaccttcagccttaacctcactgtgaaagctgcagcaccaggaccttgtccgccaccgccaccaccacccagaccttcaaaacccaccccttctttaggacctgctggtgacaaccccctggagctgagtaggattcctgatgaaaactgccagattaacagatatggccactttcaagccaccatcacaattgtagagggaatcttagaggttaacatcatccagatgacagacgtcctgatgccggtgccatggcctgaaagctccctaatagactttgtcgtgacctgccaagggagcattcccacggaggtctgtaccatcatttctgaccccacctgcgagatcacccagaacacagtctgcagccctgtggatgtggatgagatgtgtctgctgactgtgagacgaaccttcaatgggtctgggacgtactgtgtgaacctcaccctgggggatgacacaagcctggctctcacgagcaccctgatttctgttcctgacagagacccagcctcgcctttaaggatggcaaacagcgccacgcgtggaggcagtggtgtcttcacactcgaagatttcgttggggactggcgacagacagccggctacaacctggaccaagtccttgaacagggaggtgtgtccagtttgtttcagaatctcggggtgtccgtaactccgatccaaaggattgtcctgagcggtgaaaatgggctgaagatcgacatccatgtcatcatcccgtatgaaggtctgagcggcgaccaaatgggccagatcgaaaaaatttttaaggtggtgtaccctgtggatgatcatcactttaaggtgatcctgcactatggcacactggtaatcgacggggttacgccgaacatgatcgactatttcggacggccgtatgaaggcatcgccgtgttcgacggcaaaaagatcactgtaacagggaccctgtggaacggcaacaaaattatcgacgagcgcctgatcaaccccgacggctccctgctgttccgagtaaccatcaacggagtgaccggctggcggctgtgcgaacgcattctggcgctcgagggaggcagctggagccaccctcagtttgaaaaagactacaaagacgatgacgataagggatcagattacaaggatgatgatgacaaggggtcagattataaagacgacgatgataaagggagcgactacaaggacgacgatgacaaggcctggtcccatccccagttcgagaaacaccatcaccaccaccatcatcacactagtggctccggcgagggcagaggaagtctactaacctgcggagatgtggaagaaaatcctggcccacatatgaccgagtacaagcccacggtgcgcctcgccacccgcgacgacgtccccagggccgtacgcaccctcgccgccgcgttcgccgactaccccgccacgcgccacaccgtcgatccggaccgccacatcgagcgggtcaccgagctgcaagaactcttcctcacgcgcgtcgggctcgacatcggcaaggtgtgggtcgcggacgacggcgccgcggtggcggtctggaccacgccggagagcgtcgaagcgggggcggtgttcgccgagatcggcccgcgcatggccgagttgagcggttcccggctggccgcgcagcaacagatggaaggcctcctggcgccgcaccggcccaaggagcccgcgtggttcctggccaccgtcggcgtctcgcccgaccaccagggcaagggtctgggcagcgccgtcgtgctccccggagtggaggcggccgagcgcgccggggtgcccgccttcctggagacctccgcgccccgcaacctccccttctacgagcggctcggcttcaccgtcaccgccgacgtcgaggtgcccgaaggaccgcgcacctggtgcatgacccgcaagcccggtgcctga

SEQ ID NO: 1292 - DNA, 3396 bp, Artificial Sequence
  Synthetic Polynucleotide
atgggagctgcgcggggatccccggccagaccccgccggttgcctctgctcagcgtcctgctgctgccgctgctgggcggtacccagacagccattgtcttcatcaagcagccgtcctcccaggatgcactgcaggggcgccgggcgctgcttcgctgtgaggttgaggctccgggcccggtacatgtgtactggctgctcgatggggcccctgtccaggacacggagcggcgtttcgcccagggcagcagcctgagctttgcagctgtggaccggctgcaggactctggcaccttccagtgtgtggctcgggatgatgtcactggagaagaagcccgcagtgccaacgcctccttcaacatcaaatggattgaggcaggtcctgtggtcctgaagcatccagcctcggaagctgagatccagccacagacccaggtcacacttcgttgccacattgatgggcaccctcggcccacctaccaatggttccgagatgggacccccctttctgatggtcagagcaaccacacagtcagcagcaaggagcggaacctgacgctccggccagctggtcctgagcatagtgggctgtattcctgctgcgcccacagtgcttttggccaggcttgcagcagccagaacttcaccttgagcattgctgatgaaagctttgccagggtggtgctggcaccccaggacgtggtagtagcgaggtatgaggaggccatgttccattgccagttctcagcccagccacccccgagcctgcagtggctctttgaggatgagactcccatcactaaccgcagtcgccccccacacctccgcagagccacagtgtttgccaacgggtctctgctgctgacccaggtccggccacgcaatgcagggatctaccgctgcattggccaggggcagaggggcccacccatcatcctggaagccacacttcacctagcagagattgaagacatgccgctatttgagccacgggtgtttacagctggcagcgaggagcgtgtgacctgccttccccccaagggtctgccagagcccagcgtgtggtgggagcacgcgggagtccggctgcccacccatggcagggtctaccagaagggccacgagctggtgttggccaatattgctgaaagtgatgctggtgtctacacctgccacgcggccaacctggctggtcagcggagacaggatgtcaacatcactgtggccactgtgccctcctggctgaagaagccccaagacagccagctggaggagggcaaacccggctacttggattgcctgacccaggccacaccaaaacctacagttgtctggtacagaaaccagatgctcatctcagaggactcacggttcgaggtcttcaagaatgggaccttgcgcatcaacagcgtggaggtgtatgatgggacatggtaccgttgtatgagcagcaccccagccggcagcatcgaggcgcaagcccgtgtccaagtgctggatgggagcagcctcccagagtgggtgacagacaacgctgggaccctgcattttgcccgggtgactcgagatgacgctggcaactacacttgcattgcctccaacgggccgcagggccagattcgtgcccatgtccagctcactgtggcagtttttatcaccttcaaagtggaaccagagcgtacgactgtgtaccagggccacacagccctactgcagtgcgaggcccagggggaccccaagccgctgattcagtggaaaggcaaggaccgcatcctggaccccaccaagctgggacccaggatgcacatcttccagaatggctccctggtgatccatgacgtggcccctgaggactcaggccgctacacctgcattgcaggcaacagctgcaacatcaagcacacggaggcccccctctatgtcgtggacaagcctgtgccggaggagtcggagggccctggcagccctcccccctacaagatgatccagaccacgcgtggaggcagtggtgtcttcacactcgaagatttcgttggggactggcgacagacagccggctacaacctggaccaagtccttgaacagggaggtgtgtccagtttgtttcagaatctcggggtgtccgtaactccgatccaaaggattgtcctgagcggtgaaaatgggctgaagatcgacatccatgtcatcatcccgtatgaaggtctgagcggcgaccaaatgggccagatcgaaaaaatttttaaggtggtgtaccctgtggatgatcatcactttaaggtgatcctgcactatggcacactggtaatcgacggggttacgccgaacatgatcgactatttcggacggccgtatgaaggcatcgccgtgttcgacggcaaaaagatcactgtaacagggaccctgtggaacggcaacaaaattatcgacgagcgcctgatcaaccccgacggctccctgctgttccgagtaaccatcaacggagtgaccggctggcggctgtgcgaacgcattctggcgctcgagggaggcagctggagccaccctcagtttgaaaaagactacaaagacgatgacgataagggatcagattacaaggatgatgatgacaaggggtcagattataaagacgacgatgataaagggagcgactacaaggacgacgatgacaaggcctggtcccatccccagttcgagaaacaccatcaccaccaccatcatcacactagtggctccggcgagggcagaggaagtctactaacctgcggagatgtggaagaaaatcctggcccacatatgaccgagtacaagcccacggtgcgcctcgccacccgcgacgacgtccccagggccgtacgcaccctcgccgccgcgttcgccgactaccccgccacgcgccacaccgtcgatccggaccgccacatcgagcgggtcaccgagctgcaagaactcttcctcacgcgcgtcgggctcgacatcggcaaggtgtgggtcgcggacgacggcgccgcggtggcggtctggaccacgccggagagcgtcgaagcgggggcggtgttcgccgagatcggcccgcgcatggccgagttgagcggttcccggctggccgcgcagcaacagatggaaggcctcctggcgccgcaccggcccaaggagcccgcgtggttcctggccaccgtcggcgtctcgcccgaccaccagggcaagggtctgggcagcgccgtcgtgctccccggagtggaggcggccgagcgcgccggggtgcccgccttcctggagacctccgcgccccgcaacctccccttctacgagcggctcggcttcaccgtcaccgccgacgtcgaggtgcccgaaggaccgcgcacctggtgcatgacccgcaagcccggtgcctga

SEQ ID NO: 1293 - DNA, 2274 bp, Artificial Sequence
  Synthetic Polynucleotide
atgctggtccgcaggggcgcgcgcgcagggcccaggatgccgcggggctggaccgcgctttgcttgctgagtttgctgccttctgggttcatgagtcttgacaacaacggtactgctaccccagagttacctacccagggaacattttcaaatgtttctacaaatgtatcctaccaagaaactacaacacctagtacccttggaagtaccagcctgcaccctgtgtctcaacatggcaatgaggccacaacaaacatcacagaaacgacagtcaaattcacatctacctctgtgataacctcagtttatggaaacacaaactcttctgtccagtcacagacctctgtaatcagcacagtgttcaccaccccagccaacgtttcaactccagagacaaccttgaagcctagcctgtcacctggaaatgtttcagacctttcaaccactagcactagccttgcaacatctcccactaaaccctatacatcatcttctcctatcctaagtgacatcaaggcagaaatcaaatgttcaggcatcagagaagtgaaattgactcagggcatctgcctggagcaaaataagacctccagctgtgcggagtttaagaaggacaggggagagggcctggcccgagtgctgtgtggggaggagcaggctgatgctgatgctggggcccaggtatgctccctgctccttgcccagtctgaggtgaggcctcagtgtctactgctggtcttggccaacagaacagaaatttccagcaaactccaacttatgaaaaagcaccaatctgacctgaaaaagctggggatcctagatttcactgagcaagatgttgcaagccaccagagctattcccaaaagaccacgcgtggaggcagtggtgtcttcacactcgaagatttcgttggggactggcgacagacagccggctacaacctggaccaagtccttgaacagggaggtgtgtccagtttgtttcagaatctcggggtgtccgtaactccgatccaaaggattgtcctgagcggtgaaaatgggctgaagatcgacatccatgtcatcatcccgtatgaaggtctgagcggcgaccaaatgggccagatcgaaaaaatttttaaggtggtgtaccctgtggatgatcatcactttaaggtgatcctgcactatggcacactggtaatcgacggggttacgccgaacatgatcgactatttcggacggccgtatgaaggcatcgccgtgttcgacggcaaaaagatcactgtaacagggaccctgtggaacggcaacaaaattatcgacgagcgcctgatcaaccccgacggctccctgctgttccgagtaaccatcaacggagtgaccggctggcggctgtgcgaacgcattctggcgctcgagggaggcagctggagccaccctcagtttgaaaaagactacaaagacgatgacgataagggatcagattacaaggatgatgatgacaaggggtcagattataaagacgacgatgataaagggagcgactacaaggacgacgatgacaaggcctggtcccatccccagttcgagaaacaccatcaccaccaccatcatcacactagtggctccggcgagggcagaggaagtctactaacctgcggagatgtggaagaaaatcctggcccacatatgaccgagtacaagcccacggtgcgcctcgccacccgcgacgacgtccccagggccgtacgcaccctcgccgccgcgttcgccgactaccccgccacgcgccacaccgtcgatccggaccgccacatcgagcgggtcaccgagctgcaagaactcttcctcacgcgcgtcgggctcgacatcggcaaggtgtgggtcgcggacgacggcgccgcggtggcggtctggaccacgccggagagcgtcgaagcgggggcggtgttcgccgagatcggcccgcgcatggccgagttgagcggttcccggctggccgcgcagcaacagatggaaggcctcctggcgccgcaccggcccaaggagcccgcgtggttcctggccaccgtcggcgtctcgcccgaccaccagggcaagggtctgggcagcgccgtcgtgctccccggagtggaggcggccgagcgcgccggggtgcccgccttcctggagacctccgcgccccgcaacctccccttctacgagcggctcggcttcaccgtcaccgccgacgtcgaggtgcccgaaggaccgcgcacctggtgcatgacccgcaagcccggtgcctga

SEQ ID NO: 1294 - DNA, 2208 bp, Artificial Sequence
  Synthetic Polynucleotide
atggcgcccccgcaggtcctcgcgttcgggcttctgcttgccgcggcgacggcgacttttgccgcagctcaggaagaatgtgtctgtgaaaactacaagctggccgtaaactgctttgtgaataataatcgtcaatgccagtgtacttcagttggtgcacaaaatactgtcatttgctcaaagctggctgccaaatgtttggtgatgaaggcagaaatgaatggctcaaaacttgggagaagagcaaaacctgaaggggccctccagaacaatgatgggctttatgatcctgactgcgatgagagcgggctctttaaggccaagcagtgcaacggcacctccacgtgctggtgtgtgaacactgctggggtcagaagaacagacaaggacactgaaataacctgctctgagcgagtgagaacctactggatcatcattgaactaaaacacaaagcaagagaaaaaccttatgatagtaaaagtttgcggactgcacttcagaaggagatcacaacgcgttatcaactggatccaaaatttatcacgagtattttgtatgagaataatgttatcactattgatctggttcaaaattcttctcaaaaaactcagaatgatgtggacatagctgatgtggcttattattttgaaaaagatgttaaaggtgaatccttgtttcattctaagaaaatggacctgacagtaaatggggaacaactggatctggatcctggtcaaactttaatttattatgttgatgaaaaagcacctgaattctcaatgcagggtctaaaacaggcgcgcacgcgtggaggcagtggtgtcttcacactcgaagatttcgttggggactggcgacagacagccggctacaacctggaccaagtccttgaacagggaggtgtgtccagtttgtttcagaatctcggggtgtccgtaactccgatccaaaggattgtcctgagcggtgaaaatgggctgaagatcgacatccatgtcatcatcccgtatgaaggtctgagcggcgaccaaatgggccagatcgaaaaaatttttaaggtggtgtaccctgtggatgatcatcactttaaggtgatcctgcactatggcacactggtaatcgacggggttacgccgaacatgatcgactatttcggacggccgtatgaaggcatcgccgtgttcgacggcaaaaagatcactgtaacagggaccctgtggaacggcaacaaaattatcgacgagcgcctgatcaaccccgacggctccctgctgttccgagtaaccatcaacggagtgaccggctggcggctgtgcgaacgcattctggcgctcgagggaggcagctggagccaccctcagtttgaaaaagactacaaagacgatgacgataagggatcagattacaaggatgatgatgacaaggggtcagattataaagacgacgatgataaagggagcgactacaaggacgacgatgacaaggcctggtcccatccccagttcgagaaacaccatcaccaccaccatcatcacactagtggctccggcgagggcagaggaagtctactaacctgcggagatgtggaagaaaatcctggcccacatatgaccgagtacaagcccacggtgcgcctcgccacccgcgacgacgtccccagggccgtacgcaccctcgccgccgcgttcgccgactaccccgccacgcgccacaccgtcgatccggaccgccacatcgagcgggtcaccgagctgcaagaactcttcctcacgcgcgtcgggctcgacatcggcaaggtgtgggtcgcggacgacggcgccgcggtggcggtctggaccacgccggagagcgtcgaagcgggggcggtgttcgccgagatcggcccgcgcatggccgagttgagcggttcccggctggccgcgcagcaacagatggaaggcctcctggcgccgcaccggcccaaggagcccgcgtggttcctggccaccgtcggcgtctcgcccgaccaccagggcaagggtctgggcagcgccgtcgtgctccccggagtggaggcggccgagcgcgccggggtgcccgccttcctggagacctccgcgccccgcaacctccccttctacgagcggctcggcttcaccgtcaccgccgacgtcgaggtgcccgaaggaccgcgcacctggtgcatgacccgcaagcccggtgcctga

SEQ ID NO: 1295 - DNA, 2199 bp, Artificial Sequence
  Synthetic Polynucleotide
atgtctgaagaagttacttatgcagatcttcaattccagaactccagtgagatggaaaaaatcccagaaattggcaaatttggggaaaaagcacctccagctccctctcatgtatggcgtccagcagccttgtttctgactcttctgtgccttctgttgctcattggattgggagtcttggcaagcatgtttcacgtaactttgaagatagaaatgaaaaaaatgaacaaactacaaaacatcagtgaagagctccagagaaatatttctctacaactgatgagtaacatgaatatctccaacaagatcaggaacctctccaccacactgcaaacaatagccaccaaattatgtcgtgagctatatagcaaagaacaagagcacaaatgtaagccttgtccaaggagatggatttggcataaggacagctgttatttcctaagtgatgatgtccaaacatggcaggagagtaaaatggcctgtgctgctcagaatgccagcctgttgaagataaacaacaaaaatgcattggaatttataaaatcccagagtagatcatatgactattggctgggattatctcctgaagaagattccactcgtggtatgagagtggataatataatcaactcctctgcctgggttataagaaacgcacctgacttaaataacatgtattgtggatatataaatagactatatgttcaatattatcactgcacttataaacaaagaatgatatgtgagaagatggccaatccagtgcagcttggttctacatattttagggaggcaacgcgtggaggcagtggtgtcttcacactcgaagatttcgttggggactggcgacagacagccggctacaacctggaccaagtccttgaacagggaggtgtgtccagtttgtttcagaatctcggggtgtccgtaactccgatccaaaggattgtcctgagcggtgaaaatgggctgaagatcgacatccatgtcatcatcccgtatgaaggtctgagcggcgaccaaatgggccagatcgaaaaaatttttaaggtggtgtaccctgtggatgatcatcactttaaggtgatcctgcactatggcacactggtaatcgacggggttacgccgaacatgatcgactatttcggacggccgtatgaaggcatcgccgtgttcgacggcaaaaagatcactgtaacagggaccctgtggaacggcaacaaaattatcgacgagcgcctgatcaaccccgacggctccctgctgttccgagtaaccatcaacggagtgaccggctggcggctgtgcgaacgcattctggcgctcgagggaggcagctggagccaccctcagtttgaaaaagactacaaagacgatgacgataagggatcagattacaaggatgatgatgacaaggggtcagattataaagacgacgatgataaagggagcgactacaaggacgacgatgacaaggcctggtcccatccccagttcgagaaacaccatcaccaccaccatcatcacactagtggctccggcgagggcagaggaagtctactaacctgcggagatgtggaagaaaatcctggcccacatatgaccgagtacaagcccacggtgcgcctcgccacccgcgacgacgtccccagggccgtacgcaccctcgccgccgcgttcgccgactaccccgccacgcgccacaccgtcgatccggaccgccacatcgagcgggtcaccgagctgcaagaactcttcctcacgcgcgtcgggctcgacatcggcaaggtgtgggtcgcggacgacggcgccgcggtggcggtctggaccacgccggagagcgtcgaagcgggggcggtgttcgccgagatcggcccgcgcatggccgagttgagcggttcccggctggccgcgcagcaacagatggaaggcctcctggcgccgcaccggcccaaggagcccgcgtggttcctggccaccgtcggcgtctcgcccgaccaccagggcaagggtctgggcagcgccgtcgtgctccccggagtggaggcggccgagcgcgccggggtgcccgccttcctggagacctccgcgccccgcaacctccccttctacgagcggctcggcttcaccgtcaccgccgacgtcgaggtgcccgaaggaccgcgcacctggtgcatgacccgcaagcccggtgcctga

SEQ ID NO: 1296 - DNA, 1893 bp, Artificial Sequence
  Synthetic Polynucleotide
atggccttaccagtgaccgccttgctcctgccgctggccttgctgctccacgccgccaggccgttcgaatgtcctgccggcatctacgcccctatctgttctggcggagggggatcttgtgggggaggcggcagcaagatcagccacttcctgaagatggaaagcctgaacttcatcagagcccacaccccctacatcaacatctacaactgcgagcccgccaaccccagcgagaagaacagccccagcacccagtattgctacagcatccagagcggaggcggcggaagttgtggaggcggaggctctcctgctggaatctatgctcctatcggaggcggaggctccaagatttcccactttctgaaaatggaatctctgaatttcatccgggctcacacaccttacatcaatatctataactgcgaacctgccaatccctctgagaagaactccccatccacacagtattgctattccatccagtccacgcgtggaggcagtggtgtcttcacactcgaagatttcgttggggactggcgacagacagccggctacaacctggaccaagtccttgaacagggaggtgtgtccagtttgtttcagaatctcggggtgtccgtaactccgatccaaaggattgtcctgagcggtgaaaatgggctgaagatcgacatccatgtcatcatcccgtatgaaggtctgagcggcgaccaaatgggccagatcgaaaaaatttttaaggtggtgtaccctgtggatgatcatcactttaaggtgatcctgcactatggcacactggtaatcgacggggttacgccgaacatgatcgactatttcggacggccgtatgaaggcatcgccgtgttcgacggcaaaaagatcactgtaacagggaccctgtggaacggcaacaaaattatcgacgagcgcctgatcaaccccgacggctccctgctgttccgagtaaccatcaacggagtgaccggctggcggctgtgcgaacgcattctggcgctcgagggaggcagctggagccaccctcagtttgaaaaagactacaaagacgatgacgataagggatcagattacaaggatgatgatgacaaggggtcagattataaagacgacgatgataaagggagcgactacaaggacgacgatgacaaggcctggtcccatccccagttcgagaaacaccatcaccaccaccatcatcacactagtggctccggcgagggcagaggaagtctactaacctgcggagatgtggaagaaaatcctggcccacatatgaccgagtacaagcccacggtgcgcctcgccacccgcgacgacgtccccagggccgtacgcaccctcgccgccgcgttcgccgactaccccgccacgcgccacaccgtcgatccggaccgccacatcgagcgggtcaccgagctgcaagaactcttcctcacgcgcgtcgggctcgacatcggcaaggtgtgggtcgcggacgacggcgccgcggtggcggtctggaccacgccggagagcgtcgaagcgggggcggtgttcgccgagatcggcccgcgcatggccgagttgagcggttcccggctggccgcgcagcaacagatggaaggcctcctggcgccgcaccggcccaaggagcccgcgtggttcctggccaccgtcggcgtctcgcccgaccaccagggcaagggtctgggcagcgccgtcgtgctccccggagtggaggcggccgagcgcgccggggtgcccgccttcctggagacctccgcgccccgcaacctccccttctacgagcggctcggcttcaccgtcaccgccgacgtcgaggtgcccgaaggaccgcgcacctggtgcatgacccgcaagcccggtgcctga

SEQ ID NO: 1297 - DNA, 1713 bp, Artificial Sequence
  Synthetic Polynucleotide
atggccttaccagtgaccgccttgctcctgccgctggccttgctgctccacgccgccaggccgttcgaatgtcctgccggcatctacgcccctatctgttctggcggagggggatcttgtgggggaggcggcagcaagatcagccacttcctgaagatggaaagcctgaacttcatcagagcccacaccccctacatcaacatctacaactgcgagcccgccaaccccagcgagaagaacagccccagcacccagtattgctacagcatccagagcggaggcggcggaagttgtggaggcggaggctctacgcgtggaggcagtggtgtcttcacactcgaagatttcgttggggactggcgacagacagccggctacaacctggaccaagtccttgaacagggaggtgtgtccagtttgtttcagaatctcggggtgtccgtaactccgatccaaaggattgtcctgagcggtgaaaatgggctgaagatcgacatccatgtcatcatcccgtatgaaggtctgagcggcgaccaaatgggccagatcgaaaaaatttttaaggtggtgtaccctgtggatgatcatcactttaaggtgatcctgcactatggcacactggtaatcgacggggttacgccgaacatgatcgactatttcggacggccgtatgaaggcatcgccgtgttcgacggcaaaaagatcactgtaacagggaccctgtggaacggcaacaaaattatcgacgagcgcctgatcaaccccgacggctccctgctgttccgagtaaccatcaacggagtgaccggctggcggctgtgcgaacgcattctggcgctcgagggaggcagctggagccaccctcagtttgaaaaagactacaaagacgatgacgataagggatcagattacaaggatgatgatgacaaggggtcagattataaagacgacgatgataaagggagcgactacaaggacgacgatgacaaggcctggtcccatccccagttcgagaaacaccatcaccaccaccatcatcacactagtggctccggcgagggcagaggaagtctactaacctgcggagatgtggaagaaaatcctggcccacatatgaccgagtacaagcccacggtgcgcctcgccacccgcgacgacgtccccagggccgtacgcaccctcgccgccgcgttcgccgactaccccgccacgcgccacaccgtcgatccggaccgccacatcgagcgggtcaccgagctgcaagaactcttcctcacgcgcgtcgggctcgacatcggcaaggtgtgggtcgcggacgacggcgccgcggtggcggtctggaccacgccggagagcgtcgaagcgggggcggtgttcgccgagatcggcccgcgcatggccgagttgagcggttcccggctggccgcgcagcaacagatggaaggcctcctggcgccgcaccggcccaaggagcccgcgtggttcctggccaccgtcggcgtctcgcccgaccaccagggcaagggtctgggcagcgccgtcgtgctccccggagtggaggcggccgagcgcgccggggtgcccgccttcctggagacctccgcgccccgcaacctccccttctacgagcggctcggcttcaccgtcaccgccgacgtcgaggtgcccgaaggaccgcgcacctggtgcatgacccgcaagcccggtgcctga

SEQ ID NO: 1298 - DNA, 2949 bp, Artificial Sequence
  Synthetic Polynucleotide
atgtctctgtggctcctagagggggttccaatgaggcaggctgctgtcacctcgacctccttgaccatcaagtctgtcttcacccggagcgagctcaagttctccccacagtggagtcaccatgggaagattgtgacctgccagcttcaggatgcagatgggaagttcctctccaatgacacggtgcagctgaacgtgaagcacaccccgaagttggagatcaaggtcactcccagtgatgccatagtgagggagggggactctgtgaccatgacctgcgaggtcagcagcagcaacccggagtacacgacggtatcctggctcaaggatgggacctcgctgaagaagcagaatacattcacgctaaacctgcgcgaagtgaccaaggaccagagtgggaagtactgctgtcaggtctccaatgacgtgggcccgggaaggtcggaagaagtgttcctgcaagtgcagtatgccccggaaccttccacggttcagatcctccactcaccggctgtggagggaagtcaagtcgagtttctttgcatgtcactggccaatcctcttccaacaaattacacgtggtaccacaatgggaaagaaatgcagggaaggacagaggagaaagtccacatcccaaagatcctcccctggcacgctgggacttattcctgtgtggcagaaaacattcttggtactggacagaggggcccgggagctgagctggatgtccagtatcctcccaagaaggtgaccacagtgattcaaaaccccatgccgattcgagaaggagacacagtgaccctttcctgtaactacaattccagtaaccccagtgttacccggtatgaatggaaaccccatggcgcctgggaggagccatcgcttggggtgctgaagatccaaaacgttggctgggacaacacaaccatcgcctgcgcagcttgtaatagttggtgctcgtgggcctcccctgtcgccctgaatgtccagtatgccccccgagacgtgagggtccggaaaatcaagcccctttccgagattcactctggaaactcggtcagcctccaatgtgacttctcaagcagccaccccaaagaagtccagttcttctgggagaaaaatggcaggcttctggggaaagaaagccagctgaattttgactccatctccccagaagatgctgggagttacagctgctgggtgaacaactccataggacagacagcgtccaaggcctggacacttgaagtgctgtatgcacccaggaggctgcgtgtgtccatgagcccgggggaccaagtgatggaggggaagagtgcaaccctgacctgtgagagcgacgccaaccctcccgtctcccactacacctggtttgactggaataaccaaagcctcccctaccacagccagaagctgagattggagccggtgaaggtccagcactcgggtgcctactggtgccaggggaccaacagtgtgggcaagggccgttcgcctctcagcaccctcaccgtctactatagcccggagaccatcggcaggcgaacgcgtggaggcagtggtgtcttcacactcgaagatttcgttggggactggcgacagacagccggctacaacctggaccaagtccttgaacagggaggtgtgtccagtttgtttcagaatctcggggtgtccgtaactccgatccaaaggattgtcctgagcggtgaaaatgggctgaagatcgacatccatgtcatcatcccgtatgaaggtctgagcggcgaccaaatgggccagatcgaaaaaatttttaaggtggtgtaccctgtggatgatcatcactttaaggtgatcctgcactatggcacactggtaatcgacggggttacgccgaacatgatcgactatttcggacggccgtatgaaggcatcgccgtgttcgacggcaaaaagatcactgtaacagggaccctgtggaacggcaacaaaattatcgacgagcgcctgatcaaccccgacggctccctgctgttccgagtaaccatcaacggagtgaccggctggcggctgtgcgaacgcattctggcgctcgagggaggcagctggagccaccctcagtttgaaaaagactacaaagacgatgacgataagggatcagattacaaggatgatgatgacaaggggtcagattataaagacgacgatgataaagggagcgactacaaggacgacgatgacaaggcctggtcccatccccagttcgagaaacaccatcaccaccaccatcatcacactagtggctccggcgagggcagaggaagtctactaacctgcggagatgtggaagaaaatcctggcccacatatgaccgagtacaagcccacggtgcgcctcgccacccgcgacgacgtccccagggccgtacgcaccctcgccgccgcgttcgccgactaccccgccacgcgccacaccgtcgatccggaccgccacatcgagcgggtcaccgagctgcaagaactcttcctcacgcgcgtcgggctcgacatcggcaaggtgtgggtcgcggacgacggcgccgcggtggcggtctggaccacgccggagagcgtcgaagcgggggcggtgttcgccgagatcggcccgcgcatggccgagttgagcggttcccggctggccgcgcagcaacagatggaaggcctcctggcgccgcaccggcccaaggagcccgcgtggttcctggccaccgtcggcgtctcgcccgaccaccagggcaagggtctgggcagcgccgtcgtgctccccggagtggaggcggccgagcgcgccggggtgcccgccttcctggagacctccgcgccccgcaacctccccttctacgagcggctcggcttcaccgtcaccgccgacgtcgaggtgcccgaaggaccgcgcacctggtgcatgacccgcaagcccggtgcctga

SEQ ID NO: 1299 - DNA, 2643 bp, Artificial Sequence
  Synthetic Polynucleotide
atgaggccggcggacttgctgcagctggtgctgctgctcgacctgcccagggacctgggcggaatggggtgttcgtctccaccctgcgagtgccatcaggaggaggacttcagagtcacctgcaaggatattcaacgcatccccagcttaccgcccagtacgcagactctgaagcttattgagactcacctgagaactattccaagtcatgcattttctaatctgcccaatatttccagaatctacgtatctatagatgtgactctgcagcagctggaatcacactccttctacaatttgagtaaagtgactcacatagaaattcggaataccaggaacttaacttacatagaccctgatgccctcaaagagctccccctcctaaagttccttggcattttcaacactggacttaaaatgttccctgacctgaccaaagtttattccactgatatattctttattcttgaaattacagacaacccttacatgacgtcaatccctgtgaatgcttttcagggactatgcaatgaaaccttgacactgaagctgtacaacaatggctttacttcagtccaaggatatgctttcaatgggacaaagctggatgctgtttacctaaacaagaataaatacctgacagttattgacaaagatgcatttggaggagtatacagtggaccaagcttgctggacgtgtctcaaaccagtgtcactgcccttccatccaaaggcctggagcacctgaaggaactgatagcaagaaacacctggactcttaagaaacttccactttccttgagtttccttcacctcacacgggctgacctttcttacccaagccactgctgtgcttttaagaatcagaagaaaatcagaggaatccttgagtccttgatgtgtaatgagagcagtatgcagagcttgcgccagagaaaatctgtgaatgccttgaatagccccctccaccaggaatatgaagagaatctgggtgacagcattgttgggtacaaggaaaagtccaagttccaggatactcataacaacgctcattattacgtcttctttgaagaacaagaggatgagatcattggttttggccaggagctcaaaaacccccaggaagagactctacaagcttttgacagccattatgactacaccatatgtggggacagtgaagacatggtgtgtacccccaagtccgatgagttcaacccgtgtgaagacataatgggcacgcgtggaggcagtggtgtcttcacactcgaagatttcgttggggactggcgacagacagccggctacaacctggaccaagtccttgaacagggaggtgtgtccagtttgtttcagaatctcggggtgtccgtaactccgatccaaaggattgtcctgagcggtgaaaatgggctgaagatcgacatccatgtcatcatcccgtatgaaggtctgagcggcgaccaaatgggccagatcgaaaaaatttttaaggtggtgtaccctgtggatgatcatcactttaaggtgatcctgcactatggcacactggtaatcgacggggttacgccgaacatgatcgactatttcggacggccgtatgaaggcatcgccgtgttcgacggcaaaaagatcactgtaacagggaccctgtggaacggcaacaaaattatcgacgagcgcctgatcaaccccgacggctccctgctgttccgagtaaccatcaacggagtgaccggctggcggctgtgcgaacgcattctggcgctcgagggaggcagctggagccaccctcagtttgaaaaagactacaaagacgatgacgataagggatcagattacaaggatgatgatgacaaggggtcagattataaagacgacgatgataaagggagcgactacaaggacgacgatgacaaggcctggtcccatccccagttcgagaaacaccatcaccaccaccatcatcacactagtggctccggcgagggcagaggaagtctactaacctgcggagatgtggaagaaaatcctggcccacatatgaccgagtacaagcccacggtgcgcctcgccacccgcgacgacgtccccagggccgtacgcaccctcgccgccgcgttcgccgactaccccgccacgcgccacaccgtcgatccggaccgccacatcgagcgggtcaccgagctgcaagaactcttcctcacgcgcgtcgggctcgacatcggcaaggtgtgggtcgcggacgacggcgccgcggtggcggtctggaccacgccggagagcgtcgaagcgggggcggtgttcgccgagatcggcccgcgcatggccgagttgagcggttcccggctggccgcgcagcaacagatggaaggcctcctggcgccgcaccggcccaaggagcccgcgtggttcctggccaccgtcggcgtctcgcccgaccaccagggcaagggtctgggcagcgccgtcgtgctccccggagtggaggcggccgagcgcgccggggtgcccgccttcctggagacctccgcgccccgcaacctccccttctacgagcggctcggcttcaccgtcaccgccgacgtcgaggtgcccgaaggaccgcgcacctggtgcatgacccgcaagcccggtgcctga

SEQ ID NO: 1300 - DNA, 2487 bp, Artificial Sequence
  Synthetic Polynucleotide
atgcgaccctccgggacggccggggcagcgctcctggcgctgctggctgcgctctgcccggcgagtcgggctctggaggaaaagaaaggtaattatgtggtgacagatcacggctcgtgcgtccgagcctgtggggccgacagctatgagatggaggaagacggcgtccgcaagtgtaagaagtgcgaagggccttgccgcaaagtgtgtaacggaataggtattggtgaatttaaagactcactctccataaatgctacgaatattaaacacttcaaaaactgcacctccatcagtggcgatctccacatcctgccggtggcatttaggggtgactccttcacacatactcctcctctggatccacaggaactggatattctgaaaaccgtaaaggaaatcacagggtttttgctgattcaggcttggcctgaaaacaggacggacctccatgcctttgagaacctagaaatcatacgcggcaggaccaagcaacatggtcagttttctcttgcagtcgtcagcctgaacataacatccttgggattacgctccctcaaggagataagtgatggagatgtgataatttcaggaaacaaaaatttgtgctatgcaaatacaataaactggaaaaaactgtttgggacctccggtcagaaaaccaaaattataagcaacagaggtgaaaacagctgcaaggccacaggccaggtctgccatgccttgtgctcccccgagggctgctggggcccggagcccagggactgcgtctcttgccggaatgtcagccgaggcagggaatgcgtggacaagtgcaaccttctggagggtgagccaagggagtttgtggagaactctgagtgcatacagtgccacccagagtgcctgcctcaggccatgaacatcacctgcacaggacggggaccagacaactgtatccagtgtgcccactacattgacggcccccactgcgtcaagacctgcccggcaggagtcatgggagaaaacaacaccctggtctggaagtacgcagacgccggccatgtgtgccacctgtgccatccaaactgcacctacggatgcacgcgtggaggcagtggtgtcttcacactcgaagatttcgttggggactggcgacagacagccggctacaacctggaccaagtccttgaacagggaggtgtgtccagtttgtttcagaatctcggggtgtccgtaactccgatccaaaggattgtcctgagcggtgaaaatgggctgaagatcgacatccatgtcatcatcccgtatgaaggtctgagcggcgaccaaatgggccagatcgaaaaaatttttaaggtggtgtaccctgtggatgatcatcactttaaggtgatcctgcactatggcacactggtaatcgacggggttacgccgaacatgatcgactatttcggacggccgtatgaaggcatcgccgtgttcgacggcaaaaagatcactgtaacagggaccctgtggaacggcaacaaaattatcgacgagcgcctgatcaaccccgacggctccctgctgttccgagtaaccatcaacggagtgaccggctggcggctgtgcgaacgcattctggcgctcgagggaggcagctggagccaccctcagtttgaaaaagactacaaagacgatgacgataagggatcagattacaaggatgatgatgacaaggggtcagattataaagacgacgatgataaagggagcgactacaaggacgacgatgacaaggcctggtcccatccccagttcgagaaacaccatcaccaccaccatcatcacactagtggctccggcgagggcagaggaagtctactaacctgcggagatgtggaagaaaatcctggcccacatatgaccgagtacaagcccacggtgcgcctcgccacccgcgacgacgtccccagggccgtacgcaccctcgccgccgcgttcgccgactaccccgccacgcgccacaccgtcgatccggaccgccacatcgagcgggtcaccgagctgcaagaactcttcctcacgcgcgtcgggctcgacatcggcaaggtgtgggtcgcggacgacggcgccgcggtggcggtctggaccacgccggagagcgtcgaagcgggggcggtgttcgccgagatcggcccgcgcatggccgagttgagcggttcccggctggccgcgcagcaacagatggaaggcctcctggcgccgcaccggcccaaggagcccgcgtggttcctggccaccgtcggcgtctcgcccgaccaccagggcaagggtctgggcagcgccgtcgtgctccccggagtggaggcggccgagcgcgccggggtgcccgccttcctggagacctccgcgccccgcaacctccccttctacgagcggctcggcttcaccgtcaccgccgacgtcgaggtgcccgaaggaccgcgcacctggtgcatgacccgcaagcccggtgcctga

SEQ ID NO: 1301 - DNA, 2082 bp, Artificial Sequence
  Synthetic Polynucleotide
atggctggttccccaacatgcctcaccctcatctatatcctttggcagctcacagggtcagcagcctctggacccgtgaaagagctggtcggttccgttggtggggccgtgactttccccctgaagtccaaagtaaagcaagttgactctattgtctggaccttcaacacaacccctcttgtcaccatacagccagaagggggcactatcatagtgacccaaaatcgtaatagggagagagtagacttcccagatggaggctactccctgaagctcagcaaactgaagaagaatgactcagggatctactatgtggggatatacagctcatcactccagcagccctccacccaggagtacgtgctgcatgtctacgagcacctgtcaaagcctaaagtcaccatgggtctgcagagcaataagaatggcacctgtgtgaccaatctgacatgctgcatggaacatggggaagaggatgtgatttatacctggaaggccctggggcaagcagccaatgagtcccataatgggtccatcctccccatctcctggagatggggagaaagtgatatgaccttcatctgcgttgccaggaaccctgtcagcagaaacttctcaagccccatccttgccaggaagctctgtgaaggtgctgctgatgacccagattcctccatgacgcgtggaggcagtggtgtcttcacactcgaagatttcgttggggactggcgacagacagccggctacaacctggaccaagtccttgaacagggaggtgtgtccagtttgtttcagaatctcggggtgtccgtaactccgatccaaaggattgtcctgagcggtgaaaatgggctgaagatcgacatccatgtcatcatcccgtatgaaggtctgagcggcgaccaaatgggccagatcgaaaaaatttttaaggtggtgtaccctgtggatgatcatcactttaaggtgatcctgcactatggcacactggtaatcgacggggttacgccgaacatgatcgactatttcggacggccgtatgaaggcatcgccgtgttcgacggcaaaaagatcactgtaacagggaccctgtggaacggcaacaaaattatcgacgagcgcctgatcaaccccgacggctccctgctgttccgagtaaccatcaacggagtgaccggctggcggctgtgcgaacgcattctggcgctcgagggaggcagctggagccaccctcagtttgaaaaagactacaaagacgatgacgataagggatcagattacaaggatgatgatgacaaggggtcagattataaagacgacgatgataaagggagcgactacaaggacgacgatgacaaggcctggtcccatccccagttcgagaaacaccatcaccaccaccatcatcacactagtggctccggcgagggcagaggaagtctactaacctgcggagatgtggaagaaaatcctggcccacatatgaccgagtacaagcccacggtgcgcctcgccacccgcgacgacgtccccagggccgtacgcaccctcgccgccgcgttcgccgactaccccgccacgcgccacaccgtcgatccggaccgccacatcgagcgggtcaccgagctgcaagaactcttcctcacgcgcgtcgggctcgacatcggcaaggtgtgggtcgcggacgacggcgccgcggtggcggtctggaccacgccggagagcgtcgaagcgggggcggtgttcgccgagatcggcccgcgcatggccgagttgagcggttcccggctggccgcgcagcaacagatggaaggcctcctggcgccgcaccggcccaaggagcccgcgtggttcctggccaccgtcggcgtctcgcccgaccaccagggcaagggtctgggcagcgccgtcgtgctccccggagtggaggcggccgagcgcgccggggtgcccgccttcctggagacctccgcgccccgcaacctccccttctacgagcggctcggcttcaccgtcaccgccgacgtcgaggtgcccgaaggaccgcgcacctggtgcatgacccgcaagcccggtgcctga

SEQ ID NO: 1302 - DNA, 1905 bp, Artificial Sequence
  Synthetic Polynucleotide
atgcagatcccacaggcgccctggccagtcgtctgggcggtgctacaactgggctggcggccaggatggttcttagactccccagacaggccctggaacccccccaccttctccccagccctgctcgtggtgaccgaaggggacaacgccaccttcacctgcagcttctccaacacatcggagagcttcgtgctaaactggtaccgcatgagccccagcaaccagacggacaagctggccgccttccccgaggaccgcagccagcccggccaggactgccgcttccgtgtcacacaactgcccaacgggcgtgacttccacatgagcgtggtcagggcccggcgcaatgacagcggcacctacctctgtggggccatctccctggcccccaaggcgcagatcaaagagagcctgcgggcagagctcagggtgacagagagaagggcagaagtgcccacagcccaccccagcccctcacccaggccagccggccagttccaaacgcgtggaggcagtggtgtcttcacactcgaagatttcgttggggactggcgacagacagccggctacaacctggaccaagtccttgaacagggaggtgtgtccagtttgtttcagaatctcggggtgtccgtaactccgatccaaaggattgtcctgagcggtgaaaatgggctgaagatcgacatccatgtcatcatcccgtatgaaggtctgagcggcgaccaaatgggccagatcgaaaaaatttttaaggtggtgtaccctgtggatgatcatcactttaaggtgatcctgcactatggcacactggtaatcgacggggttacgccgaacatgatcgactatttcggacggccgtatgaaggcatcgccgtgttcgacggcaaaaagatcactgtaacagggaccctgtggaacggcaacaaaattatcgacgagcgcctgatcaaccccgacggctccctgctgttccgagtaaccatcaacggagtgaccggctggcggctgtgcgaacgcattctggcgctcgagggaggcagctggagccaccctcagtttgaaaaagactacaaagacgatgacgataagggatcagattacaaggatgatgatgacaaggggtcagattataaagacgacgatgataaagggagcgactacaaggacgacgatgacaaggcctggtcccatccccagttcgagaaacaccatcaccaccaccatcatcacactagtggctccggcgagggcagaggaagtctactaacctgcggagatgtggaagaaaatcctggcccacatatgaccgagtacaagcccacggtgcgcctcgccacccgcgacgacgtccccagggccgtacgcaccctcgccgccgcgttcgccgactaccccgccacgcgccacaccgtcgatccggaccgccacatcgagcgggtcaccgagctgcaagaactcttcctcacgcgcgtcgggctcgacatcggcaaggtgtgggtcgcggacgacggcgccgcggtggcggtctggaccacgccggagagcgtcgaagcgggggcggtgttcgccgagatcggcccgcgcatggccgagttgagcggttcccggctggccgcgcagcaacagatggaaggcctcctggcgccgcaccggcccaaggagcccgcgtggttcctggccaccgtcggcgtctcgcccgaccaccagggcaagggtctgggcagcgccgtcgtgctccccggagtggaggcggccgagcgcgccggggtgcccgccttcctggagacctccgcgccccgcaacctccccttctacgagcggctcggcttcaccgtcaccgccgacgtcgaggtgcccgaaggaccgcgcacctggtgcatgacccgcaagcccggtgcctga

SEQ ID NO: 1303 - DNA, 1890 bp, Artificial Sequence
  Synthetic Polynucleotide
atggcctgtctgggcttccagagacacaaggcccagctcaacctggctaccagaacctggccttgtactctgctgttcttcctgctgttcatccccgtgttctgcaaggccatgcatgtggctcagcctgctgtggtgctggcctctagtagaggaatcgccagcttcgtgtgcgagtacgcctctcctggaaaggccactgaagtgcgcgtgaccgttctgagacaggccgatagccaagtgaccgaagtgtgcgccgccacctacatgatgggcaacgagctgaccttcctggacgacagcatctgtaccggcaccagcagcggcaatcaagtgaacctgaccatccagggcctgagagctatggacaccggcctgtacatctgcaaggtggaactgatgtaccctcctccttactacctcggcatcggcaacggcacccaaatctacgtgatcgaccccgagccttgtcctgacagcgatttcacgcgtggaggcagtggtgtcttcacactcgaagatttcgttggggactggcgacagacagccggctacaacctggaccaagtccttgaacagggaggtgtgtccagtttgtttcagaatctcggggtgtccgtaactccgatccaaaggattgtcctgagcggtgaaaatgggctgaagatcgacatccatgtcatcatcccgtatgaaggtctgagcggcgaccaaatgggccagatcgaaaaaatttttaaggtggtgtaccctgtggatgatcatcactttaaggtgatcctgcactatggcacactggtaatcgacggggttacgccgaacatgatcgactatttcggacggccgtatgaaggcatcgccgtgttcgacggcaaaaagatcactgtaacagggaccctgtggaacggcaacaaaattatcgacgagcgcctgatcaaccccgacggctccctgctgttccgagtaaccatcaacggagtgaccggctggcggctgtgcgaacgcattctggcgctcgagggaggcagctggagccaccctcagtttgaaaaagactacaaagacgatgacgataagggatcagattacaaggatgatgatgacaaggggtcagattataaagacgacgatgataaagggagcgactacaaggacgacgatgacaaggcctggtcccatccccagttcgagaaacaccatcaccaccaccatcatcacactagtggctccggcgagggcagaggaagtctactaacctgcggagatgtggaagaaaatcctggcccacatatgaccgagtacaagcccacggtgcgcctcgccacccgcgacgacgtccccagggccgtacgcaccctcgccgccgcgttcgccgactaccccgccacgcgccacaccgtcgatccggaccgccacatcgagcgggtcaccgagctgcaagaactcttcctcacgcgcgtcgggctcgacatcggcaaggtgtgggtcgcggacgacggcgccgcggtggcggtctggaccacgccggagagcgtcgaagcgggggcggtgttcgccgagatcggcccgcgcatggccgagttgagcggttcccggctggccgcgcagcaacagatggaaggcctcctggcgccgcaccggcccaaggagcccgcgtggttcctggccaccgtcggcgtctcgcccgaccaccagggcaagggtctgggcagcgccgtcgtgctccccggagtggaggcggccgagcgcgccggggtgcccgccttcctggagacctccgcgccccgcaacctccccttctacgagcggctcggcttcaccgtcaccgccgacgtcgaggtgcccgaaggaccgcgcacctggtgcatgacccgcaagcccggtgcctga

SEQ ID NO: 1304 - DNA, 1872 bp, Artificial Sequence
  Synthetic Polynucleotide
atggccttaccagtgaccgccttgctcctgccgctggccttgctgctccacgccgccaggccgctgttcaaccaggaagtgcagatccccctgaccgagagctactgcggcccctgccccaagaactggatctgctacaagaacaactgctaccagttcttcgacgagagcaagaattggtacgagagccaggcttcctgcatgagccagaacgccagcctgctgaaggtgtacagcaaagaggaccaggatctgctgaagctggtcaagagctaccactggatgggcctggtgcacatccccaccaacggctcttggcagtgggaggacggcagcatcctgagccccaacctgctgaccatcatcgagatgcagaagggcgactgcgccctgtacgccagcagcttcaagggctacatcgagaactgctccacccccaacacctacatctgtatgcagcggaccgtgacgcgtggaggcagtggtgtcttcacactcgaagatttcgttggggactggcgacagacagccggctacaacctggaccaagtccttgaacagggaggtgtgtccagtttgtttcagaatctcggggtgtccgtaactccgatccaaaggattgtcctgagcggtgaaaatgggctgaagatcgacatccatgtcatcatcccgtatgaaggtctgagcggcgaccaaatgggccagatcgaaaaaatttttaaggtggtgtaccctgtggatgatcatcactttaaggtgatcctgcactatggcacactggtaatcgacggggttacgccgaacatgatcgactatttcggacggccgtatgaaggcatcgccgtgttcgacggcaaaaagatcactgtaacagggaccctgtggaacggcaacaaaattatcgacgagcgcctgatcaaccccgacggctccctgctgttccgagtaaccatcaacggagtgaccggctggcggctgtgcgaacgcattctggcgctcgagggaggcagctggagccaccctcagtttgaaaaagactacaaagacgatgacgataagggatcagattacaaggatgatgatgacaaggggtcagattataaagacgacgatgataaagggagcgactacaaggacgacgatgacaaggcctggtcccatccccagttcgagaaacaccatcaccaccaccatcatcacactagtggctccggcgagggcagaggaagtctactaacctgcggagatgtggaagaaaatcctggcccacatatgaccgagtacaagcccacggtgcgcctcgccacccgcgacgacgtccccagggccgtacgcaccctcgccgccgcgttcgccgactaccccgccacgcgccacaccgtcgatccggaccgccacatcgagcgggtcaccgagctgcaagaactcttcctcacgcgcgtcgggctcgacatcggcaaggtgtgggtcgcggacgacggcgccgcggtggcggtctggaccacgccggagagcgtcgaagcgggggcggtgttcgccgagatcggcccgcgcatggccgagttgagcggttcccggctggccgcgcagcaacagatggaaggcctcctggcgccgcaccggcccaaggagcccgcgtggttcctggccaccgtcggcgtctcgcccgaccaccagggcaagggtctgggcagcgccgtcgtgctccccggagtggaggcggccgagcgcgccggggtgcccgccttcctggagacctccgcgccccgcaacctccccttctacgagcggctcggcttcaccgtcaccgccgacgtcgaggtgcccgaaggaccgcgcacctggtgcatgacccgcaagcccggtgcctga

SEQ ID NO: 1305 - DNA, 3594 bp, Artificial Sequence
  Synthetic Polynucleotide
atggccttaccagtgaccgccttgctcctgccgctggccttgctgctccacgccgccaggccgttcgaaaaatcctccaatgaagctactaacattactccaaagcataatatgaaagcatttttggatgaattgaaagctgagaacatcaagaagttcttatataattttacacagataccacatttagcaggaacagaacaaaactttcagcttgcaaagcaaattcaatcccagtggaaagaatttggcctggattctgttgagctagcacattatgatgtcctgttgtcctacccaaataagactcatcccaactacatctcaataattaatgaagatggaaatgagattttcaacacatcattatttgaaccacctcctccaggatatgaaaatgtttcggatattgtaccacctttcagtgctttctctcctcaaggaatgccagagggcgatctagtgtatgttaactatgcacgaactgaagacttctttaaattggaacgggacatgaaaatcaattgctctgggaaaattgtaattgccagatatgggaaagttttcagaggaaataaggttaaaaatgcccagctggcaggggccaaaggagtcattctctactccgaccctgctgactactttgctcctggggtgaagtcctatccagatggttggaatcttcctggaggtggtgtccagcgtggaaatatcctaaatctgaatggtgcaggagaccctctcacaccaggttacccagcaaatgaatatgcttataggcgtggaattgcagaggctgttggtcttccaagtattcctgttcatccaattggatactatgatgcacagaagctcctagaaaaaatgggtggctcagcaccaccagatagcagctggagaggaagtctcaaagtgccctacaatgttggacctggctttactggaaacttttctacacaaaaagtcaagatgcacatccactctaccaatgaagtgacaagaatttacaatgtgataggtactctcagaggagcagtggaaccagacagatatgtcattctgggaggtcaccgggactcatgggtgtttggtggtattgaccctcagagtggagcagctgttgttcatgaaattgtgaggagctttggaacactgaaaaaggaagggtggagacctagaagaacaattttgtttgcaagctgggatgcagaagaatttggtcttcttggttctactgagtgggcagaggagaattcaagactccttcaagagcgtggcgtggcttatattaatgctgactcatctatagaaggaaactacactctgagagttgattgtacaccgctgatgtacagcttggtacacaacctaacaaaagagctgaaaagccctgatgaaggctttgaaggcaaatctctttatgaaagttggactaaaaaaagtccttccccagagttcagtggcatgcccaggataagcaaattgggatctggaaatgattttgaggtgttcttccaacgacttggaattgcttcaggcagagcacggtatactaaaaattgggaaacaaacaaattcagcggctatccactgtatcacagtgtctatgaaacatatgagttggtggaaaagttttatgatccaatgtttaaatatcacctcactgtggcccaggttcgaggagggatggtgtttgagctagccaattccatagtgctcccttttgattgtcgagattatgctgtagttttaagaaagtatgctgacaaaatctacagtatttctatgaaacatccacaggaaatgaagacatacagtgtatcatttgattcacttttttctgcagtaaagaattttacagaaattgcttccaagttcagtgagagactccaggactttgacaaaagcaacccaatagtattaagaatgatgaatgatcaactcatgtttctggaaagagcatttattgatccattagggttaccagacaggcctttttataggcatgtcatctatgctccaagcagccacaacaagtatgcaggggagtcattcccaggaatttatgatgctctgtttgatattgaaagcaaagtggacccttccaaggcctggggagaagtgaagagacagatttatgttgcagccttcacagtgcaggcagctgcagagactttgagtgaagtagccacgcgtggaggcagtggtgtcttcacactcgaagatttcgttggggactggcgacagacagccggctacaacctggaccaagtccttgaacagggaggtgtgtccagtttgtttcagaatctcggggtgtccgtaactccgatccaaaggattgtcctgagcggtgaaaatgggctgaagatcgacatccatgtcatcatcccgtatgaaggtctgagcggcgaccaaatgggccagatcgaaaaaatttttaaggtggtgtaccctgtggatgatcatcactttaaggtgatcctgcactatggcacactggtaatcgacggggttacgccgaacatgatcgactatttcggacggccgtatgaaggcatcgccgtgttcgacggcaaaaagatcactgtaacagggaccctgtggaacggcaacaaaattatcgacgagcgcctgatcaaccccgacggctccctgctgttccgagtaaccatcaacggagtgaccggctggcggctgtgcgaacgcattctggcgctcgagggaggcagctggagccaccctcagtttgaaaaagactacaaagacgatgacgataagggatcagattacaaggatgatgatgacaaggggtcagattataaagacgacgatgataaagggagcgactacaaggacgacgatgacaaggcctggtcccatccccagttcgagaaacaccatcaccaccaccatcatcacactagtggctccggcgagggcagaggaagtctactaacctgcggagatgtggaagaaaatcctggcccacatatgaccgagtacaagcccacggtgcgcctcgccacccgcgacgacgtccccagggccgtacgcaccctcgccgccgcgttcgccgactaccccgccacgcgccacaccgtcgatccggaccgccacatcgagcgggtcaccgagctgcaagaactcttcctcacgcgcgtcgggctcgacatcggcaaggtgtgggtcgcggacgacggcgccgcggtggcggtctggaccacgccggagagcgtcgaagcgggggcggtgttcgccgagatcggcccgcgcatggccgagttgagcggttcccggctggccgcgcagcaacagatggaaggcctcctggcgccgcaccggcccaaggagcccgcgtggttcctggccaccgtcggcgtctcgcccgaccaccagggcaagggtctgggcagcgccgtcgtgctccccggagtggaggcggccgagcgcgccggggtgcccgccttcctggagacctccgcgccccgcaacctccccttctacgagcggctcggcttcaccgtcaccgccgacgtcgaggtgcccgaaggaccgcgcacctggtgcatgacccgcaagcccggtgcctga

SEQ ID NO: 1306 - DNA, 1635 bp, Artificial Sequence
  Synthetic Polynucleotide
atggccttaccagtgaccgccttgctcctgccgctggccttgctgctccacgccgccaggccgttcgaaatgttgcagatggctgggcagtgctcccaaaatgaatattttgacagtttgttgcatgcttgcataccttgtcaacttcgatgttcttctaatactcctcctctaacatgtcagcgttattgtaatgcaagtgtgaccaattcagtgaaaggaacgaatgcgacgcgtggaggcagtggtgtcttcacactcgaagatttcgttggggactggcgacagacagccggctacaacctggaccaagtccttgaacagggaggtgtgtccagtttgtttcagaatctcggggtgtccgtaactccgatccaaaggattgtcctgagcggtgaaaatgggctgaagatcgacatccatgtcatcatcccgtatgaaggtctgagcggcgaccaaatgggccagatcgaaaaaatttttaaggtggtgtaccctgtggatgatcatcactttaaggtgatcctgcactatggcacactggtaatcgacggggttacgccgaacatgatcgactatttcggacggccgtatgaaggcatcgccgtgttcgacggcaaaaagatcactgtaacagggaccctgtggaacggcaacaaaattatcgacgagcgcctgatcaaccccgacggctccctgctgttccgagtaaccatcaacggagtgaccggctggcggctgtgcgaacgcattctggcgctcgagggaggcagctggagccaccctcagtttgaaaaagactacaaagacgatgacgataagggatcagattacaaggatgatgatgacaaggggtcagattataaagacgacgatgataaagggagcgactacaaggacgacgatgacaaggcctggtcccatccccagttcgagaaacaccatcaccaccaccatcatcacactagtggctccggcgagggcagaggaagtctactaacctgcggagatgtggaagaaaatcctggcccacatatgaccgagtacaagcccacggtgcgcctcgccacccgcgacgacgtccccagggccgtacgcaccctcgccgccgcgttcgccgactaccccgccacgcgccacaccgtcgatccggaccgccacatcgagcgggtcaccgagctgcaagaactcttcctcacgcgcgtcgggctcgacatcggcaaggtgtgggtcgcggacgacggcgccgcggtggcggtctggaccacgccggagagcgtcgaagcgggggcggtgttcgccgagatcggcccgcgcatggccgagttgagcggttcccggctggccgcgcagcaacagatggaaggcctcctggcgccgcaccggcccaaggagcccgcgtggttcctggccaccgtcggcgtctcgcccgaccaccagggcaagggtctgggcagcgccgtcgtgctccccggagtggaggcggccgagcgcgccggggtgcccgccttcctggagacctccgcgccccgcaacctccccttctacgagcggctcggcttcaccgtcaccgccgacgtcgaggtgcccgaaggaccgcgcacctggtgcatgacccgcaagcccggtgcctga

SEQ ID NO: 1307 - skipped

SEQ ID NO: 1308 - DNA, 597 bp, Artificial Sequence
  Synthetic Polynucleotide
atgaccgagtacaagcccacggtgcgcctcgccacccgcgacgacgtccccagggccgtacgcaccctcgccgccgcgttcgccgactaccccgccacgcgccacaccgtcgatccggaccgccacatcgagcgggtcaccgagctgcaagaactcttcctcacgcgcgtcgggctcgacatcggcaaggtgtgggtcgcggacgacggcgccgcggtggcggtctggaccacgccggagagcgtcgaagcgggggcggtgttcgccgagatcggcccgcgcatggccgagttgagcggttcccggctggccgcgcagcaacagatggaaggcctcctggcgccgcaccggcccaaggagcccgcgtggttcctggccaccgtcggcgtctcgcccgaccaccagggcaagggtctgggcagcgccgtcgtgctccccggagtggaggcggccgagcgcgccggggtgcccgccttcctggagacctccgcgccccgcaacctccccttctacgagcggctcggcttcaccgtcaccgccgacgtcgaggtgcccgaaggaccgcgcacctggtgcatgacccgcaagcccggtgcc

SEQ ID NO: 1309 - DNA, 396 bp, Artificial Sequence
  Synthetic Polynucleotide
atggccaagcctttgtctcaagaagaatccaccctcattgaaagagcaacggctacaatcaacagcatccccatctctgaagactacagcgtcgccagcgcagctctctctagcgacggccgcatcttcactggtgtcaatgtatatcattttactgggggaccttgtgcagaactcgtggtgctgggcactgctgctgctgcggcagctggcaacctgacttgtatcgtcgcgatcggaaatgagaacaggggcatcttgagcccctgcggacggtgccgacaggtgcttctcgatctgcatcctgggatcaaagccatagtgaaggacagtgatggacagccgacggcagttgggattcgtgaattgctgccctctggttatgtgtgggagggc

SEQ ID NO: 1310 - DNA, 516 bp, Artificial Sequence
  Synthetic Polynucleotide
atgggcaacgaggccagctaccctctggagatgtgctcccacttcgacgccgacgagatcaagcggctgggcaagcgcttcaagaagctggacctggacaacagcggcagcctgagcgtggaggagtttatgtctctgcccgagctgcagcagaaccccctggtgcagcgcgtgatcgacatcttcgacaccgacggcaacggcgaggtggacttcaaggagttcatcgagggcgtgagccagttcagcgtgaagggcgacaaggagcagaagctgcggttcgccttccgcatctacgatatggataaagatggctatatttctaatggcgagctgttccaggtgctgaagatgatggtgggcaacaataccaagctggccgatacccagctgcagcagatcgtggacaagaccatcatcaacgccgacaaggacggcgacggcagaatcagcttcgaggagttctgtgccgtggtgggaggcctggatattcacaaaaaaatggtggtggacgtg

SEQ ID NO: 1311 - DNA, 1071 bp, Artificial Sequence
  Synthetic Polynucleotide
atgctgctgctcgtgaccagcctgctgctgtgcgaactgccccaccctgcctttctgctgatcccccggaaagtgtgcaacggcatcggcatcggagagttcaaggacagcctgagcatcaacgccaccaacatcaagcacttcaagaactgcaccagcatcagcggcgacctgcacatcctgcccgtggcctttagaggcgacagcttcacccacacccccccactggaccctcaggaactggacatcctgaaaaccgtgaaagagatcaccggatttctgctgattcaggcttggcccgagaaccggaccgatctgcacgccttcgagaacctggaaatcatccggggcaggaccaagcagcacggccagttttctctggccgtggtgtccctgaacatcaccagcctgggcctgcggagcctgaaagaaatcagcgacggggatgtgattatcagcggcaacaagaacctgtgctacgccaacaccatcaactggaagaagctgttcggcacctccggccagaaaacaaagatcatcagcaaccggggcgagaacagctgcaaggccacaggacaagtgtgccacgccctgtgtagccctgagggctgttggggacccgagcccagagattgcgtgtcctgccggaatgtgtccagaggccgcgagtgcgtggacaagtgcaacctgctggaaggcgagccccgcgagtttgtggaaaacagcgagtgcatccagtgccaccccgagtgtctgccccaggccatgaatatcacctgtaccggcagaggccccgacaactgtatccagtgcgcccactacatcgacggcccccactgcgtgaaaacctgtccagctggcgtgatgggagagaacaacaccctcgtgtggaagtacgccgacgccggccatgtgtgccacctgtgtcaccccaactgcacctacggctgtacaggccctggcctggaaggctgccctaccaacggacccaagatccccagcattgccaccggcatggtgggagcattgctgctgctgctggtggtggccctgggcatcggcctgtttatg

SEQ ID NO: 1312 - DNA, 1272 bp, Artificial Sequence
  Synthetic Polynucleotide
atgcgaccctccgggacggccggggcagcgttcctggcgctgctggctgcgctctgcccggcgagtcgggctctggaggaaaagaaaggtaattatgtggtgacagatcacggctcgtgcgtccgagcctgtggggccgacagctatgagatggaggaagacggcgtccgcaagtgtaagaagtgcgaagggccttgccgcaaagtgtgtaacggaataggtattggtgaatttaaagactcactctccataaatgctacgaatattaaacacttcaaaaactgcacctccatcagtggcgatctccacatcctgccggtggcatttaggggtgactccttcacacatactcctcctctggatccacaggaactggatattctgaaaaccgtaaaggaaatcacagggtttttgctgattcaggcttggcctgaaaacaggacggacctccatgcctttgagaacctagaaatcatacgcggcaggaccaagcaacatggtcagttttctcttgcagtcgtcagcctgaacataacatccttgggattacgctccctcaaggagataagtgatggagatgtgataatttcaggaaacaaaaatttgtgctatgcaaatacaataaactggaaaaaactgtttgggacctccggtcagaaaaccaaaattataagcaacagaggtgaaaacagctgcaaggccacaggccaggtctgccatgccttgtgctcccccgagggctgctggggcccggagcccagggactgcgtctcttgccggaatgtcagccgaggcagggaatgcgtggacaagtgcaaccttctggagggtgagccaagggagtttgtggagaactctgagtgcatacagtgccacccagagtgcctgcctcaggccatgaacatcacctgcacaggacggggaccagacaactgtatccagtgtgcccactacattgacggcccccactgcgtcaagacctgcccggcaggagtcatgggagaaaacaacaccctggtctggaagtacgcagacgccggccatgtgtgccacctgtgccatccaaactgcacctacggatgcactgggccaggtcttgaaggctgtccaacgaatgggcctaagatcccgtccatcgccactgggatggtgggggccctcctcttgctgctggtggtggccctggggatcggcctcttcatgcgaaggcgccacatcgttcggaagcgcacgctgcggaggctgctgcaggagagggagcttgtggagcct

SEQ ID NO: 1313 - DNA, 999 bp, Artificial Sequence
  Synthetic Polynucleotide
atgccccctcccagactgctgttcttcctgctgttcctgacccctatggaagtgcggcccgaggaacccctggtcgtgaaagtggaagagggcgacaacgccgtgctccagtgtctgaagggcacctccgatggccctacccagcagctgacatggtccagagagagccccctgaagcccttcctgaagctgtctctgggcctgcctggcctgggcatccacatgaggccactggctatctggctgttcatcttcaacgtgtcccagcagatgggcggcttctacctgtgtcagcctggccccccaagcgagaaagcctggcagcctggctggaccgtgaacgtggaaggatctggcgagctgttccggtggaacgtgtccgatctgggcggcctgggatgcggcctgaagaacagaagcagcgaaggccccagcagccccagcggcaaactgatgagccccaagctgtacgtgtgggccaaggaccggcccgagatttgggaaggcgagcctccttgcctgccccccagagatagcctgaaccagagcctgagccaggacctgacaatggcccctggcagcacactgtggctgagctgtggcgtgccacccgactctgtgtccagaggccctctgagctggacccacgtgcaccccaagggacctaagagcctgctgagcctggaactgaaggacgacagacccgccagagatatgtgggtcatggaaaccggcctgctgctgcctagagccacagcccaggatgccggcaagtattactgccaccggggcaacctgaccatgagcttccacctggaaatcaccgccagacccgtgctgtggcactggctgctgagaaccggcggatggaaagtgtccgccgtgaccctggcctacctgatcttctgcctgtgctccctcgtgggcatcctgcatctccagcgggctctggtgctgcggcggaagagaaagagaatgaccgaccccacccggcggttc

SEQ ID NO: 1314 - DNA, 315 bp, Artificial Sequence
  Synthetic Polynucleotide
atggccttaccagtgaccgccttgctcctgccgctggccttgctgctccacgccgccaggccgttcgaaatgttgcagatggctgggcagtgctcccaaaatgaatattttgacagtttgttgcatgcttgcataccttgtcaacttcgatgttcttctaatactcctcctctaacatgtcagcgttattgtaatgcaagtgtgaccaattcagtgaaaggaacgaatgcgattctctggacctgtttgggactgagcttaataatttctttggcagttttcgtgctaatgtttttgctaaggaagataaactct

SEQ ID NO: 1315 - DNA, 564 bp, Artificial Sequence
  Synthetic Polynucleotide
atggccacttacgaggttctctgtgaggtggcgcggaaactgggcacggatgacagggaagtggtattgttcctcctaaacgtgttcatacctcaacccacactggcccaattaattggagctcttagagctttaaaggaggagggcaggttaacgtttcccctgttagcggaatgtctgtttcgtgcaggtcgcagagacctcttgcgcgacctgcttcacttagacccgcgttttttagagcgccacctagcgggcacaatgagttatttcagcccttatcagctcactgttctccacgtagacggggagctgtgtgcgagggatattaggtctttgatatttttaagcaaggacactatagggtctcgcagcacaccacagacattcttacactgggtgtactgtatggaaaacttagacctactgggtcccactgacgtggatgccctaatgtcaatgcttagatctttgtcaagagtagacctacagcgccaagtgcaaaccctaatgggccttcacctttccggcccatcacactcccaacactatcgccatacacca

SEQ ID NO: 1316 - DNA, 723 bp, Artificial Sequence
  Synthetic Polynucleotide
atgtccgactccaaggaggtccctagccttccatttttgcgacacttgctcgaagagttggacagccatgaggacagcttgctgctgtttctgtgtcacgacgcggccccgggctgcacgacggtcacgcaagctttgtgctcgcttagccaacagcgcaagctgaccctcgcggctctggtcgagatgctctacgtgctgcagcgtatggatcttctcaagagccgcttcgggctcagcaaggagggggccgagcaattgctgggcacaagctttctcacgcgctaccgcaagctcatggtttgcgtgggtgaggagctcgactcgagcgagctacgcgctctacgcttgttcgcgtgcaacctgaatccgagcctgagcacggcgctttctgagagcagccgctttgtcgagcttgtactcgcgcttgaaaacgtaggactcgtctcgccatcgagtgtttccgtgcttgcggacatgttgcgcactcttcggcgcctcgatttgtgccagcagcttgttgagtacgaacaacaagagcaagccaggtaccgttactgttacgcggcctcgccctcattgccagttcgtacgttacgtcgggggcacggcgcgagtgaacacgagcagctgtgcatgcccgtgcaagaatcctctgacagccccgagctgctgcgcacgcccgtacaagaatcctccagcgacagccccgagcaaacgact

SEQ ID NO: 1317 - DNA, 564 bp, Artificial Sequence
  Synthetic Polynucleotide
atggctacctacgaggtgctgtgcgaggtggcaagaaagctgggcaccgacgacagagaagtggtgctgttcctgctgaacgtgttcatccctcagcctacactggcccagctgatcggtgcactgagagccctgaaagaggaaggccggctgacctttcctctgctggccgaatgcctgttcagagccggaagaagggatctgctgcgggacctgctgcatctggaccccagatttctggaaagacacctggccggcaccatgagctacttcagcccttaccagctgaccgtgctgcacgttgacggcgaactgtgcgccagagatattcggagcctgatcttcctgagcaaggacaccatcggcagccggtctacccctcagacatttctgcactgggtgtactgcatggaaaacctggacctgctcggccccacagatgtggatgccctgatgtccatgctgagaagcctgagcagagtggacctccagagacaggtgcagacactgatgggactgcacctgagcggacctagccacagccagcactacagacacacccct

SEQ ID NO: 1318 - DNA, 1200 bp, Artificial Sequence
  Synthetic Polynucleotide
atgctggaaggcgtgcaggtggaaaccatcagccctggcgacggcagaaccttccctaagaggggccagacctgcgtggtgcactacaccggaatgctggaagatggcaagaaggtggacagcagccgggaccggaacaagcccttcaagttcatgctgggcaagcaggaagtgatccggggctgggaagagggcgtggcccagatgtctgtgggccagagagccaagctgaccatctcccccgattacgcctacggcgctacaggccaccctggcatcattcctccacacgccacactggtgttcgacgtggaactgctgaagctggaaagcggcggaggcagcggagtggatggcttcggagatgtgggagccctggaaagcctgagaggcaacgccgacctggcctacatcctgagcatggaaccttgcggccactgcctgattatcaacaacgtgaacttctgccgcgagagcggcctgagaaccagaaccggcagcaacatcgactgcgagaagctgcggcggagattcagcagcctgcacttcatggtggaagtgaagggcgacctgaccgccaagaaaatggtgctggccctgctggaactggcccagcaggatcatggcgctctggactgctgtgtggtcgtgatcctgagccacggctgccaggcttcccatcttcagttccctggcgctgtgtacggcaccgatggctgtcctgtgtccgtggaaaagatcgtgaacatcttcaacggcaccagctgccccagcctgggcggaaagcccaagctgttctttattcaagcctgtggcggcgagcagaaggaccacggctttgaggtggcctccaccagccctgaggatgagagccctggcagcaaccctgagcctgacgccaccccattccaggaaggactgcggaccttcgaccagctggacgccatctctagcctgcccacccccagcgacatcttcgtgtcctacagcaccttccccggctttgtgtcctggcgggaccctaagagcggctcttggtacgtggaaaccctggacgacatctttgagcagtgggctcacagcgaggacctccagagcctgctgctgagagtggctaacgccgtgtccgtgaagggcatctacaagcagatgcctggctgcttcaacttcctgcggaagaagctgtttttcaagaccagc

SEQ ID NO: 1319 - DNA, 810 bp, Artificial Sequence
  Synthetic Polynucleotide
atggattggatatggaggatactttttctcgtgggggcagcaaccggggctcattccgaggttcagttggtcgaatcaggcgggggcctcgtccaacccggcggaagcctgcggctgtcttgcgcagcaagtggtagtgtgttcaagatcaacgttatggcctggtatcgccaggctccgggaaaagggagagagctggttgcggggatcattagcggtggctccaccagctacgctgacagtgtgaagggaaggttcactatatcacgcgacaacgcaaagaatacattgtacctccagatgaatagcttgcggcccgaagacacggcagtctactattgtgcctttatcacaacagagagcgactatgacctgggccgccggtattgggggcagggaacccttgtgaccgtttcatccggcggaggcggaagtggaggcggaggatctggcggcggaggctctgaggtgcagctcgtggaatcaggcggaggtcttgtacagccaggaaattctcttcggctgtcttgcgccgcgagcgggttcaccttcagcagcttcggaatgagctgggtaagacaggcaccggggaaaggcctggagtgggtgagctcaatcagtgggagcgggtcagataccctgtacgcggattccgtgaagggcagattcacaatctctcgggacaatgctaagacaacactttaccttcagatgaactctctgcgacccgaggataccgctgtctactactgtacaataggaggttctctgtccagaagttctcaagggacactggtgaccgtctccagc

SEQ ID NO: 1320 - DNA, 738 bp, Artificial Sequence
  Synthetic Polynucleotide
atggccctgcctgtgacagctctgctgctgcctctggcactgctgctgcacgccgccagacctgagatcgtgctgacacagagccctgccaccctgtctctgagccctggcgaaagagccaccctgagctgtagagccagccagagcgtgtccagctacctggcctggtatcagcagaagcccggccaggctccccggctgctgatctacgatgccagcaatagagccaccggcatccccgccagattttccggctctggcagcggcaccgacttcaccctgaccatcgaggacttcgccgtgtactactgccagcagagcaccttcggccagggcaccaaggtggaaatcaagggcggaggcggatctggcggcggaggatctgggggaggcggctctcaggtgtacctggtggaaagcggagggggcgtggtgcagcctggaagaagcctgagactgagctgtgccgccagcggcttcaccttcagcaactacggaatgcactgggtgcgccaggcccctggcaaaggactggaatgggtggccctgatttggtacgacggcagcaacaagtattacgccgacagcgtgaagggccggttcaccatcagccgggacaacagcaagaacaccctgtacctccagatgaccagcctgcgggtggaagataccgccgtgtattattgcgccagcaacgtggaccactggggccagggaacactcgtgaccgtgtctagc

SEQ ID NO: 1321 - DNA, 759 bp, Artificial Sequence
  Synthetic Polynucleotide
atggccctgcctgtgacagctctgctgctgcctctggcactgctgctgcacgccgccagacctgagatcgtgctgacacagagccctgccaccctgtctctgagccctggcgaaagagccaccctgagctgtagagccagccagagcgtgtccagctacctggcctggtatcagcagaagcccggccaggctccccggctgctgatctacgatgccagcaatagagccaccggcatccccgccagattttccggctctggcagcggcaccgacttcaccctgaccatcagctccctggaacccgaggacttcgccgtgtactactgccagcagagcagcaactggccccggacctttggacagggcaccaaggtggaaatcaagggcggaggcggatctggcggcggaggatctgggggaggcggctctcaggtgcagctggtggaaagtgggggaggatggcagcctggcagaagcctgagactggactgcaaggccagcggcatcaccttcagcaacagcggaatgcactgggtgcgccaggcccctggaaagggactggaatgggtggccgtgatctatgacggcagcaagcggtactacgccgacagcgtgaagggccggttcatcagccgggacaacagcaagaataccctgttcctccagatgaacagcctgcgggccgaggacacagccgtgtattattgcgccaccaacgacgactactggggccagggaacactcgtgaccgtgtcctct

SEQ ID NO: 1322 - DNA, 789 bp, Artificial Sequence
  Synthetic Polynucleotide
atggccctgcctgtgacagctctgctgctgcctctggcactgctgctgcacgccgccagacctgagatcgtgctgacacagagccctggcacactgtcactgtctccaggcgaaagagccacactgagctgtagagcctctcagagcgtgggcagctcttacctggcttggtatcagcagaagcccggacaggctcccagactgctgatctacggcgctttcagcagagccacaggcatccccgatagattttctggcagcggctccggcaccgacttcaccctgacaatcagcagactggaacccgaggacttcgccgtgtactactgtcagcagtacggcagcagcccttggacctttggacagggcaccaaggtggaaatcaagagaggcggaggcggaagtggaggcggaggatctggcggcggaggctctcaagtgcagctggttgaatcaggtggcggcgttgtgcagcctggcagaagtctgagactgtcttgtgccgccagcggcttcaccttcagcagctacacaatgcactgggtccgacaggcccctggcaaaggactggaatgggtcacctttatcagctacgacggcaacaacaagtattacgccgacagcgtgaagggcagattcaccatctccagagacaacagcaagaacaccctgtacctccagatgaacagcctgagagccgaggacaccgccatctactactgcgccagaacaggatggctgggacccttcgattattggggccagggcacactcgtgaccgtgtcatct

SEQ ID NO: 1323 - DNA, 1128 bp, Artificial Sequence
  Synthetic Polynucleotide
atggccctgcctgtgacagctctgctgctgcctctggcactgctgctgcacgccgccagacctgagatcgtgctgacacagagccctgccaccctgtctctgagccctggcgaaagagccaccctgagctgtagagccagccagagcgtgtccagctacctggcctggtatcagcagaagcccggccaggctccccggctgctgatctacgatgccagcaatagagccaccggcatccccgccagattttccggctctggcagcggcaccgacttcaccctgaccatcgaggacttcgccgtgtactactgccagcagagcaccttcggccagggcaccaaggtggaaatcaagggcggaggcggatctggcggcggaggatctgggggaggcggctctcaggtgtacctggtggaaagcggagggggcgtggtgcagcctggaagaagcctgagactgagctgtgccgccagcggcttcaccttcagcaactacggaatgcactgggtgcgccaggcccctggcaaaggactggaatgggtggccctgatttggtacgacggcagcaacaagtattacgccgacagcgtgaagggccggttcaccatcagccgggacaacagcaagaacaccctgtacctccagatgaccagcctgcgggtggaagataccgccgtgtattattgcgccagcaacgtggaccactggggccagggaacactcgtgaccgtgtctagcggcggaggcggaagtggaggcggaggatctggcggcggaggctctgaggtgcagctcgtggaatcaggcggaggtcttgtacagccaggaaattctcttcggctgtcttgcgccgcgagcgggttcaccttcagcagcttcggaatgagctgggtaagacaggcaccggggaaaggcctggagtgggtgagctcaatcagtgggagcgggtcagataccctgtacgcggattccgtgaagggcagattcacaatctctcgggacaatgctaagacaacactttaccttcagatgaactctctgcgacccgaggataccgctgtctactactgtacaataggaggttctctgtccagaagttctcaagggacactggtgaccgtctccagc

SEQ ID NO: 1324 - DNA, 1149 bp, Artificial Sequence
  Synthetic Polynucleotide
atggccctgcctgtgacagctctgctgctgcctctggcactgctgctgcacgccgccagacctgagatcgtgctgacacagagccctgccaccctgtctctgagccctggcgaaagagccaccctgagctgtagagccagccagagcgtgtccagctacctggcctggtatcagcagaagcccggccaggctccccggctgctgatctacgatgccagcaatagagccaccggcatccccgccagattttccggctctggcagcggcaccgacttcaccctgaccatcagctccctggaacccgaggacttcgccgtgtactactgccagcagagcagcaactggccccggacctttggacagggcaccaaggtggaaatcaagggcggaggcggatctggcggcggaggatctgggggaggcggctctcaggtgcagctggtggaaagtgggggaggatggcagcctggcagaagcctgagactggactgcaaggccagcggcatcaccttcagcaacagcggaatgcactgggtgcgccaggcccctggaaagggactggaatgggtggccgtgatctatgacggcagcaagcggtactacgccgacagcgtgaagggccggttcatcagccgggacaacagcaagaataccctgttcctccagatgaacagcctgcgggccgaggacacagccgtgtattattgcgccaccaacgacgactactggggccagggaacactcgtgaccgtgtcctctggcggaggcggaagtggaggcggaggatctggcggcggaggctctgaggtgcagctcgtggaatcaggcggaggtcttgtacagccaggaaattctcttcggctgtcttgcgccgcgagcgggttcaccttcagcagcttcggaatgagctgggtaagacaggcaccggggaaaggcctggagtgggtgagctcaatcagtgggagcgggtcagataccctgtacgcggattccgtgaagggcagattcacaatctctcgggacaatgctaagacaacactttaccttcagatgaactctctgcgacccgaggataccgctgtctactactgtacaataggaggttctctgtccagaagttctcaagggacactggtgaccgtctccagc

SEQ ID NO: 1325 - DNA, 1179 bp, Artificial Sequence
  Synthetic Polynucleotide
atggccctgcctgtgacagctctgctgctgcctctggcactgctgctgcacgccgccagacctgagatcgtgctgacacagagccctggcacactgtcactgtctccaggcgaaagagccacactgagctgtagagcctctcagagcgtgggcagctcttacctggcttggtatcagcagaagcccggacaggctcccagactgctgatctacggcgctttcagcagagccacaggcatccccgatagattttctggcagcggctccggcaccgacttcaccctgacaatcagcagactggaacccgaggacttcgccgtgtactactgtcagcagtacggcagcagcccttggacctttggacagggcaccaaggtggaaatcaagagaggcggaggcggaagtggaggcggaggatctggcggcggaggctctcaagtgcagctggttgaatcaggtggcggcgttgtgcagcctggcagaagtctgagactgtcttgtgccgccagcggcttcaccttcagcagctacacaatgcactgggtccgacaggcccctggcaaaggactggaatgggtcacctttatcagctacgacggcaacaacaagtattacgccgacagcgtgaagggcagattcaccatctccagagacaacagcaagaacaccctgtacctccagatgaacagcctgagagccgaggacaccgccatctactactgcgccagaacaggatggctgggacccttcgattattggggccagggcacactcgtgaccgtgtcatctggcggaggcggaagtggaggcggaggatctggcggcggaggctctgaggtgcagctcgtggaatcaggcggaggtcttgtacagccaggaaattctcttcggctgtcttgcgccgcgagcgggttcaccttcagcagcttcggaatgagctgggtaagacaggcaccggggaaaggcctggagtgggtgagctcaatcagtgggagcgggtcagataccctgtacgcggattccgtgaagggcagattcacaatctctcgggacaatgctaagacaacactttaccttcagatgaactctctgcgacccgaggataccgctgtctactactgtacaataggaggttctctgtccagaagttctcaagggacactggtgaccgtctccagc

SEQ ID NO: 1326 - DNA, 777 bp, Artificial Sequence
  Synthetic Polynucleotide
atggactggatttggcgcatccttttccttgtcggcgctgctaccggcgcgcattctgagattgtactgactcagtctcccgctactctgtccctttcccccggcgaacgcgcgaccctctcatgctcagccagcatctctgtgtcttacatgtattggtatcagcaaaagcctgggcaagcgccaagactgctgatatacgacatgtccaacctggcaagcggcatcccggcgagattctccggatctggctcagggaccgattttacgctcactatcagttccttggagcctgaggatttcgcggtgtattactgtatgcagtggagcggttatccttacacatttggaggcggaactaaagtggagataaagggcggtggcggttcaggtggagggggaagcggtggtggtggctcagaggtgcaactcgtggagtccggtggcggtctggtgcagccaggggggtccttgcgcctgagctgcgccgcttctgggtttacgttttccccattcgctatgtcctgggtccggcaggcgcccggtaaaggtctggaatgggtggcaaagatttccccaggggggtcttggacttattactccgacaccgtgacaggtcgatttaccatcagcagggataacgccaaaaacagcctctacctccagatgaactccttgcgagccgaagataccgccgtctattactgtgccaggcagctgtggggatactacgcgctggacatttgggggcagggaacaactgtgactgtatcctca

SEQ ID NO: 1327 - DNA, 141 bp, Artificial Sequence
  Synthetic Polynucleotide
atggactggatttggcgcatccttttccttgtcggcgctgctaccggcgcgcattctggccacagaccactggacaagaagcgggaagaggcgccctccctgcgcccagctcctccacccatcagtgggggtggctacaga

SEQ ID NO: 1328 - DNA, 903 bp, Artificial Sequence
  Synthetic Polynucleotide
atgactagaggagtgcaggtggagactatctccccaggagacgggcgcaccttccccaagcgcggccagacctgcgtggtgcactacaccgggatgcttgaagatggaaagaaagttgattcctcccgggacagaaacaagccctttaagtttatgctaggcaagcaggaggtgatccgaggctgggaagaaggggttgcccagatgagtgtgggtcagagagccaaactgactatatctccagattatgcctatggtgccactgggcacccaggcatcatcccaccacatgccactctcgtcttcgatgtggagcttctaaaactggaagggatccacatggccacttacgaggttctctgtgaggtggcgcggaaactgggcacggatgacagggaagtggtattgttcctcctaaacgtgttcatacctcaacccacactggcccaattaattggagctcttagagctttaaaggaggagggcaggttaacgtttcccctgttagcggaatgtctgtttcgtgcaggtcgcagagacctcttgcgcgacctgcttcacttagacccgcgttttttagagcgccacctagcgggcacaatgagttatttcagcccttatcagctcactgttctccacgtagacggggagctgtgtgcgagggatattaggtctttgatatttttaagcaaggacactatagggtctcgcagcacaccacagacattcttacactgggtgtactgtatggaaaacttagacctactgggtcccactgacgtggatgccctaatgtcaatgcttagatctttgtcaagagtagacctacagcgccaagtgcaaaccctaatgggccttcacctttccggcccatcacactcccaacactatcgccatacacca

SEQ ID NO: 1329 - DNA, 1224 bp, Artificial Sequence
  Synthetic Polynucleotide
atgggcgtccaagtcgaaaccattagtcccggcgatggcagaacatttcctaaaaggggacaaacatgtgtcgtccattatacaggcatgttggaggacggcaaaaaggtggacagtagtagagatcgcaataaacctttcaaattcatgttgggaaaacaagaagtcattaggggatgggaggagggcgtggctcaaatgtccgtcggccaacgcgctaagctcaccatcagccccgactacgcatacggcgctaccggacatcccggaattattccccctcacgctaccttggtgtttgacgtcgaactgttgaagctcgggactagaggagtgcaggtggagactatctccccaggagacgggcgcaccttccccaagcgcggccagacctgcgtggtgcactacaccgggatgcttgaagatggaaagaaagttgattcctcccgggacagaaacaagccctttaagtttatgctaggcaagcaggaggtgatccgaggctgggaagaaggggttgcccagatgagtgtgggtcagagagccaaactgactatatctccagattatgcctatggtgccactgggcacccaggcatcatcccaccacatgccactctcgtcttcgatgtggagcttctaaaactggaagggatccacatggccacttacgaggttctctgtgaggtggcgcggaaactgggcacggatgacagggaagtggtattgttcctcctaaacgtgttcatacctcaacccacactggcccaattaattggagctcttagagctttaaaggaggagggcaggttaacgtttcccctgttagcggaatgtctgtttcgtgcaggtcgcagagacctcttgcgcgacctgcttcacttagacccgcgttttttagagcgccacctagcgggcacaatgagttatttcagcccttatcagctcactgttctccacgtagacggggagctgtgtgcgagggatattaggtctttgatatttttaagcaaggacactatagggtctcgcagcacaccacagacattcttacactgggtgtactgtatggaaaacttagacctactgggtcccactgacgtggatgccctaatgtcaatgcttagatctttgtcaagagtagacctacagcgccaagtgcaaaccctaatgggccttcacctttccggcccatcacactcccaacactatcgccatacacca

SEQ ID NO: 1330 - DNA, 1188 bp, Artificial Sequence
  Synthetic Polynucleotide
atgtacaggatgcaactcctgtcttgcattgcactaagtcttgcacttgtcacaaacagtgcacctacttcaagttctacaaagaaaacacagctacaactggagcatttactgctggatttacagatgattttgaatggaattaataattacaagaatcccaaactcaccaggatgctcacatttaagttttacatgcccaagaaggccacagaactgaaacatcttcagtgtctagaagaagaactcaaacctctggaggaagtgctaaatttagctcaaagcaaaaactttcacttaagacccagggacttaatcagcaatatcaacgtaatagttctggaactaaagggatctgaaacaacattcatgtgtgaatatgctgatgagacagcaaccattgtagaatttctgaacagatggattaccttttgtcaaagcatcatctcaacactgactacgcgaggcggaggaagctcgcgtaaaattgaagttatgtatcctcctccttacctagacaatgagaagagcaatggaaccattatccatgtgaaagggaaacacctttgtccaagtcccctatttcccggaccttctaagcccttttgggtgctggtggtggttgggggagtcctggcttgctatagcttgctagtaacagtggcctttattattttctgggtgaggagtaagaggagctctagtagagcaaagcgaagtggtagcggagcaaccaacttttctctgctcaagcaagccggtgacgtggaagagaaccctggtcctcatatggccaagcctttgtctcaagaagaatccaccctcattgaaagagcaacggctacaatcaacagcatccccatctctgaagactacagcgtcgccagcgcagctctctctagcgacggccgcatcttcactggtgtcaatgtatatcattttactgggggaccttgtgcagaactcgtggtgctgggcactgctgctgctgcggcagctggcaacctgacttgtatcgtcgcgatcggaaatgagaacaggggcatcttgagcccctgcggacggtgccgacaggtgcttctcgatctgcatcctgggatcaaagccatagtgaaggacagtgatggacagccgacggcagttgggattcgtgaattgctgccctctggttatgtgtgggagggctaa

SEQ ID NO: 1331 - DNA, 2364 bp, Artificial Sequence
  Synthetic Polynucleotide
atgcagtctggcacccattggagagtgctgggcctgtgtctgctgtctgttggcgtgtggggccaagacggcaatgaggaaatgggcggcatcacccagacaccatacaaggtgtccatcagcggcaccaccgtgatcctgacctgtcctcagtatcccggcagcgagattctgtggcagcacaacgacaagaacatcggcggcgacgaggacgataagaatatcggctccgatgaggaccacctgagcctgaaagagttcagcgagctggaacagagcggctactacgtgtgctaccccagaggcagcaagcccgaggacgccaacttttacctgtacctgagagccagagtgtgcgagaactgcatggaaatggacgtgatgtccgtggctaccatcgtgatcgtggacatctgcatcaccggcggactgctgctgctggtgtactactggtccaagaaccggaaggccaaggccaagcctgtgacaagaggtgctggtgctggcggcagacagagaggccagaacaaagaaagacctcctcctgtgcctaatcctgactacgagcccatcagaaaaggccagcgggatctgtacagcggcctgaaccagagaagaatcctcgagcgggccaagagaagcggatctggcgcaacaaacttctcactactcaaacaagcaggtgacgtggaggagaatcccgggcctactagtatggaacaaggcaaaggcctggccgtgctgatcctggctatcatcctgctgcaaggcacactggcccagagcatcaagggcaaccacctggtcaaggtgtacgactaccaagaggacggcagcgtgctgctgacatgtgatgccgaggccaagaacatcacctggtttaaggacggcaagatgatcggcttcctgaccgaggacaagaagaagtggaacctgggcagcaacgctaaggaccccagaggcatgtatcagtgcaagggcagccagaacaagagcaagcccctccaggtgtactaccggatgtgccagaactgcatcgagctgaacgccgctaccatcagcggctttctgttcgccgagatcgtgtccatcttcgtgctggccgtgggcgtgtactttatcgctggacaggatggcgtgcggcagagcagagcttccgataagcaaaccctgctgcctaacgaccagctgtaccagcctctgaaggacagagaggacgaccagtacagccacctccagggcaatcagctgagaagaaaccgcgccaagagaagcggatctggcgtgaagcagaccctgaatttcgacctgctgaagctggctggcgacgtggaatccaacccaggccctttcgaaatggaacacagcacctttctgagcggcctggtgctggctacactgctgtctcaggtgtccccattcaagatccccatcgaggaactggaagatcgggtgttcgtgaactgcaacacctctatcacctgggtggaaggcaccgtgggaacactgctgagcgacatcaccagactggacctcggcaagcggattctggaccctcggggcatctacagatgcaacggcaccgacatctacaaggacaaagaaagcaccgtgcaggtccactacagaatgtgccagtcctgcgtggaactggaccctgctacagtggccggcatcatcgtgaccgatgtgatcgctactctgctgctggctctgggagtgttctgcttcgccggacacgaaacaggcagactgtctggcgctgccgatacacaggccctgctgagaaacgaccaagtgtatcagcccctgcgcgacagagatgatgcccagtattctcacctcggcggcaactgggctagaaacaagagggccaagcgatctggatctggacaatgcactaattacgcattgctcaagctggccggtgacgttgagagtaatcctggcccctctagaggccatatggccaagcctttgtctcaagaagaatccaccctcattgaaagagcaacggctacaatcaacagcatccccatctctgaagactacagcgtcgccagcgcagctctctctagcgacggccgcatcttcactggtgtcaatgtatatcattttactgggggaccttgtgcagaactcgtggtgctgggcactgctgctgctgcggcagctggcaacctgacttgtatcgtcgcgatcggaaatgagaacaggggcatcttgagcccctgcggacggtgccgacaggtgcttctcgatctgcatcctgggatcaaagccatagtgaaggacagtgatggacagccgacggcagttgggattcgtgaattgctgccctctggttatgtgtgggagggctaa

SEQ ID NO: 1332 - DNA, 2940 bp, Artificial Sequence
  Synthetic Polynucleotide
atgcagtctggcacccattggagagtgctgggcctgtgtctgctgtctgttggcgtgtggggccaagacggcaatgaggaaatgggcggcatcacccagacaccatacaaggtgtccatcagcggcaccaccgtgatcctgacctgtcctcagtatcccggcagcgagattctgtggcagcacaacgacaagaacatcggcggcgacgaggacgataagaatatcggctccgatgaggaccacctgagcctgaaagagttcagcgagctggaacagagcggctactacgtgtgctaccccagaggcagcaagcccgaggacgccaacttttacctgtacctgagagccagagtgtgcgagaactgcatggaaatggacgtgatgtccgtggctaccatcgtgatcgtggacatctgcatcaccggcggactgctgctgctggtgtactactggtccaagaaccggaaggccaaggccaagcctgtgacaagaggtgctggtgctggcggcagacagagaggccagaacaaagaaagacctcctcctgtgcctaatcctgactacgagcccatcagaaaaggccagcgggatctgtacagcggcctgaaccagagaagaatcctcgagcgggccaagagaagcggatctggcgcaacaaacttctcactactcaaacaagcaggtgacgtggaggagaatcccgggcctactagtatggaacaaggcaaaggcctggccgtgctgatcctggctatcatcctgctgcaaggcacactggcccagagcatcaagggcaaccacctggtcaaggtgtacgactaccaagaggacggcagcgtgctgctgacatgtgatgccgaggccaagaacatcacctggtttaaggacggcaagatgatcggcttcctgaccgaggacaagaagaagtggaacctgggcagcaacgctaaggaccccagaggcatgtatcagtgcaagggcagccagaacaagagcaagcccctccaggtgtactaccggatgtgccagaactgcatcgagctgaacgccgctaccatcagcggctttctgttcgccgagatcgtgtccatcttcgtgctggccgtgggcgtgtactttatcgctggacaggatggcgtgcggcagagcagagcttccgataagcaaaccctgctgcctaacgaccagctgtaccagcctctgaaggacagagaggacgaccagtacagccacctccagggcaatcagctgagaagaaaccgcgccaagagaagcggatctggcgtgaagcagaccctgaatttcgacctgctgaagctggctggcgacgtggaatccaacccaggccctttcgaaatggaacacagcacctttctgagcggcctggtgctggctacactgctgtctcaggtgtccccattcaagatccccatcgaggaactggaagatcgggtgttcgtgaactgcaacacctctatcacctgggtggaaggcaccgtgggaacactgctgagcgacatcaccagactggacctcggcaagcggattctggaccctcggggcatctacagatgcaacggcaccgacatctacaaggacaaagaaagcaccgtgcaggtccactacagaatgtgccagtcctgcgtggaactggaccctgctacagtggccggcatcatcgtgaccgatgtgatcgctactctgctgctggctctgggagtgttctgcttcgccggacacgaaacaggcagactgtctggcgctgccgatacacaggccctgctgagaaacgaccaagtgtatcagcccctgcgcgacagagatgatgcccagtattctcacctcggcggcaactgggctagaaacaagagggccaagcgatctggatctggacaatgcactaattacgcattgctcaagctggccggtgacgttgagagtaatcctggcccctctagaatgaagtggaaggccctgttcaccgccgccattctccaggcccaactgcctatcacagaggcccagagcttcggcctgctggaccccaagctgtgctacctgctggatggcatcctgttcatctacggcgtgatcctgaccgccctgttcctgagagtgaagttcagcagaagcgccgacgcccctgcctaccagcagggacagaaccaactgtacaacgagctgaacctgggcagacgggaagagtacgacgtgctggacaagcggagaggcagggaccctgagatgggcggaaagccccagcggagaaagaacccccaggaaggactgtataacgaactccagaaagacaagatggccgaagcctacagcgagatcggcatgaagggcgagcggagaagaggcaagggccacgatggcctgtaccagggcctgagcaccgccaccaaggacacctatgacgccctgcacatgcaggccctgcctccaagacatatgcgggccaagagatccggtagcggagagggaagaggtagcctcctcacctgtggggacgttgaagagaaccccggcccaggtaccatggccaagcctttgtctcaagaagaatccaccctcattgaaagagcaacggctacaatcaacagcatccccatctctgaagactacagcgtcgccagcgcagctctctctagcgacggccgcatcttcactggtgtcaatgtatatcattttactgggggaccttgtgcagaactcgtggtgctgggcactgctgctgctgcggcagctggcaacctgacttgtatcgtcgcgatcggaaatgagaacaggggcatcttgagcccctgcggacggtgccgacaggtgcttctcgatctgcatcctgggatcaaagccatagtgaaggacagtgatggacagccgacggcagttgggattcgtgaattgctgccctctggttatgtgtgggagggctaa

SEQ ID NO: 1333 - DNA, 45 bp, Artificial Sequence
  Synthetic Polynucleotide
ggggggggggggggggggggggggggggggggggggggggggggg

SEQ ID NO: 1334 - DNA, 45 bp, Artificial Sequence; identical to SEQ ID NO: 1333
  Synthetic Polynucleotide

SEQ ID NO: 1335 - DNA, 45 bp, Artificial Sequence; identical to SEQ ID NO: 1333
  Synthetic Polynucleotide

SEQ ID NO: 1336 - DNA, 45 bp, Artificial Sequence; identical to SEQ ID NO: 1333
  Synthetic Polynucleotide

SEQ ID NO: 1337 - DNA, 45 bp, Artificial Sequence; identical to SEQ ID NO: 1333
  Synthetic Polynucleotide

SEQ ID NO: 1338 - DNA, 45 bp, Artificial Sequence; identical to SEQ ID NO: 1333
  Synthetic Polynucleotide

SEQ ID NO: 1339 - DNA, 45 bp, Artificial Sequence; identical to SEQ ID NO: 1333
  Synthetic Polynucleotide

SEQ ID NO: 1340 - DNA, 45 bp, Artificial Sequence; identical to SEQ ID NO: 1333
  Synthetic Polynucleotide

SEQ ID NO: 1341 - DNA, 45 bp, Artificial Sequence; identical to SEQ ID NO: 1333
  Synthetic Polynucleotide

SEQ ID NO: 1342 - DNA, 45 bp, Artificial Sequence; identical to SEQ ID NO: 1333
  Synthetic Polynucleotide

SEQ ID NO: 1343 - DNA, 45 bp, Artificial Sequence; identical to SEQ ID NO: 1333
  Synthetic Polynucleotide

SEQ ID NO: 1344 - DNA, 45 bp, Artificial Sequence; identical to SEQ ID NO: 1333
  Synthetic Polynucleotide

SEQ ID NO: 1345 - DNA, 45 bp, Artificial Sequence; identical to SEQ ID NO: 1333
  Synthetic Polynucleotide

SEQ ID NO: 1346 - DNA, 45 bp, Artificial Sequence; identical to SEQ ID NO: 1333
  Synthetic Polynucleotide

SEQ ID NO: 1347 - DNA, 45 bp, Artificial Sequence; identical to SEQ ID NO: 1333
  Synthetic Polynucleotide

SEQ ID NO: 1348 - DNA, 45 bp, Artificial Sequence; identical to SEQ ID NO: 1333
  Synthetic Polynucleotide

SEQ ID NO: 1349 - DNA, 222 bp, Artificial Sequence
  Synthetic Polynucleotide
acaacacctggcgagagaagtagcctgcctgccttctatcctggcaccagcggctcttgttctggctgtggatctctgagcctgcctctgctggctggactggttgctgctgatgctgtggcctctctgctgattgtgggagccgtgttcctgtgcgccagacctagaagaagccccgctcaagaggacggcaaggtgtacatcaacatgcccggcagagga

SEQ ID NO: 1350 - DNA, 222 bp, Artificial Sequence
  Synthetic Polynucleotide
acaacgccgggcgaaaggagttccttgccggccttttaccccggcacaagcggaagctgtagtgggtgtggaagcctcagcctcccacttcttgcgggcctcgtcgcggcagatgcagtagcttcacttcttattgtaggcgcggtatttctctgtgctcgaccaaggaggtcacccgctcaggaggatggtaaggtgtatataaatatgccaggacgcgga

SEQ ID NO: 1351 - DNA, 90 bp, Artificial Sequence; identical to SEQ ID NO: 1088
  Synthetic Polynucleotide

SEQ ID NO: 1352 - DNA, 90 bp, Artificial Sequence; identical to SEQ ID NO: 1094
  Synthetic Polynucleotide

SEQ ID NO: 1353 - DNA, 90 bp, Artificial Sequence
  Synthetic Polynucleotide
cagagcttcggcctgctggaccccaagctgagctacctgctggatggcatcctgttcatctacggcgtgatcctgaccgccctgttcctg

SEQ ID NO: 1354 - DNA, 90 bp, Artificial Sequence
  Synthetic Polynucleotide
cagagttttgggttgttggaccctaaattgagctatctgttggacggaatcctgttcatttacggagtgatcctgaccgcattgttcctg

SEQ ID NO: 1355 - DNA, 108 bp, Artificial Sequence
  Synthetic Polynucleotide
agggaccaaagactgcctcctgacgctcacaaacctccaggcggaggcagcttcagaacccctatccaagaggaacaggctgacgcccacagcaccctggcaaaaatt

SEQ ID NO: 1356 - DNA, 108 bp, Artificial Sequence
  Synthetic Polynucleotide
cgcgatcagaggctgccacctgatgctcataagccacctggcggcggatctttcaggaccccaattcaagaagaacaagccgacgctcactctaccctggctaagatc

SEQ ID NO: 1357 - DNA, 198 bp, Artificial Sequence
  Synthetic Polynucleotide
cagagcttcggcctgctggaccccaagctgtgctacctgctggatggcatcctgttcatctacggcgtgatcctgaccgccctgttcctgagggaccaaagactgcctcctgacgctcacaaacctccaggcggaggcagcttcagaacccctatccaagaggaacaggctgacgcccacagcaccctggcaaaaatt

SEQ ID NO: 1358 - DNA, 198 bp, Artificial Sequence
  Synthetic Polynucleotide
cagagttttgggttgttggaccctaaattgtgctatctgttggacggaatcctgttcatttacggagtgatcctgaccgcattgttcctgcgcgatcagaggctgccacctgatgctcataagccacctggcggcggatctttcaggaccccaattcaagaagaacaagccgacgctcactctaccctggctaagatc

SEQ ID NO: 1359 - DNA, 198 bp, Artificial Sequence
  Synthetic Polynucleotide
cagagcttcggcctgctggaccccaagctgagctacctgctggatggcatcctgttcatctacggcgtgatcctgaccgccctgttcctgagggaccaaagactgcctcctgacgctcacaaacctccaggcggaggcagcttcagaacccctatccaagaggaacaggctgacgcccacagcaccctggcaaaaatt

SEQ ID NO: 1360 - DNA, 198 bp, Artificial Sequence
  Synthetic Polynucleotide
cagagttttgggttgttggaccctaaattgagctatctgttggacggaatcctgttcatttacggagtgatcctgaccgcattgttcctgcgcgatcagaggctgccacctgatgctcataagccacctggcggcggatctttcaggaccccaattcaagaagaacaagccgacgctcactctaccctggctaagatc

SEQ ID NO: 1361 - DNA, 345 bp, Artificial Sequence
  Synthetic Polynucleotide
atgggaggactggaaccctgtagcagactgctgctgcttcctctgctgctggctgtgtctggactcagacctgttcaggctggatcccaggctcagagcgattgcagctgtagcacagtgtctccaggcgtgctggccggaattgtgatgggcgatctggtgctgacagtgctgattgccctggccgtgtacttcctgggtagactggtgcctagaggaagaggcgctgccgaagccgccacaagaaagcagagaatcaccgagacagagagcccctaccaagagctgcaaggccagagaagcgacgtgtacagcgacctgaatacccagcggccttactacaaa

SEQ ID NO: 1362 - DNA, 258 bp, Artificial Sequence
  Synthetic Polynucleotide
caggctcagagcgattgcagctgtagcacagtgtctccaggcgtgctggccggaattgtgatgggcgatctggtgctgacagtgctgattgccctggccgtgtacttcctgggtagactggtgcctagaggaagaggcgctgccgaagccgccacaagaaagcagagaatcaccgagacagagagcccctaccaagagctgcaaggccagagaagcgacgtgtacagcgacctgaatacccagcggccttactacaaa

SEQ ID NO: 1363 - DNA, 345 bp, Artificial Sequence
  Synthetic Polynucleotide
atgggtggacttgagccttgttccaggctgctgttgctgccactgctcctcgctgttagtggactgaggccagtgcaggctggtacccaggcacagtctgactgtagctgctccacagttagccctggcgttctggctggcatcgttatgggcgacctcgtcctgactgtcctgatcgctctggcagtgtattttctcggacggctggtcccaagaggaaggggagcagctgaagctgctacccggaagcagcggatcacagagactgagtctccataccaagaactccagggacagagatccgatgtgtactccgacctgaacacacagaggccctattataag

SEQ ID NO: 1364 - DNA, 258 bp, Artificial Sequence
  Synthetic Polynucleotide
caggcacagtctgactgtagctgctccacagttagccctggcgttctggctggcatcgttatgggcgacctcgtcctgactgtcctgatcgctctggcagtgtattttctcggacggctggtcccaagaggaaggggagcagctgaagctgctacccggaagcagcggatcacagagactgagtctccataccaagaactccagggacagagatccgatgtgtactccgacctgaacacacagaggccctattataag

SEQ ID NO: 1365 - DNA, 345 bp, Artificial Sequence
  Synthetic Polynucleotide
atgggaggactggaaccctgtagcagactgctgctgcttcctctgctgctggctgtgtctggactcagacctgttcaggctggatcccaggctcagagcgattgcagctctagcacagtgtctccaggcgtgctggccggaattgtgatgggcgatctggtgctgacagtgctgattgccctggccgtgtacttcctgggtagactggtgcctagaggaagaggcgctgccgaagccgccacaagaaagcagagaatcaccgagacagagagcccctaccaagagctgcaaggccagagaagcgacgtgtacagcgacctgaatacccagcggccttactacaaa

SEQ ID NO: 1366 - DNA, 258 bp, Artificial Sequence
  Synthetic Polynucleotide
caggctcagagcgattgcagctctagcacagtgtctccaggcgtgctggccggaattgtgatgggcgatctggtgctgacagtgctgattgccctggccgtgtacttcctgggtagactggtgcctagaggaagaggcgctgccgaagccgccacaagaaagcagagaatcaccgagacagagagcccctaccaagagctgcaaggccagagaagcgacgtgtacagcgacctgaatacccagcggccttactacaaa

SEQ ID NO: 1367 - DNA, 345 bp, Artificial Sequence
  Synthetic Polynucleotide
atgggtggacttgagccttgttccaggctgctgttgctgccactgctcctcgctgttagtggactgaggccagtgcaggctggtacccaggcacagtctgactgtagcagctccacagttagccctggcgttctggctggcatcgttatgggcgacctcgtcctgactgtcctgatcgctctggcagtgtattttctcggacggctggtcccaagaggaaggggagcagctgaagctgctacccggaagcagcggatcacagagactgagtctccataccaagaactccagggacagagatccgatgtgtactccgacctgaacacacagaggccctattataag

SEQ ID NO: 1368 - DNA, 258 bp, Artificial Sequence
  Synthetic Polynucleotide
caggcacagtctgactgtagcagctccacagttagccctggcgttctggctggcatcgttatgggcgacctcgtcctgactgtcctgatcgctctggcagtgtattttctcggacggctggtcccaagaggaaggggagcagctgaagctgctacccggaagcagcggatcacagagactgagtctccataccaagaactccagggacagagatccgatgtgtactccgacctgaacacacagaggccctattataag

SEQ ID NO: 1369 - DNA, 549 bp, Artificial Sequence
  Synthetic Polynucleotide
ctgtgggtttcacagcctccagagatcagaaccctggaaggcagcagcgccttcctgccttgcagcttcaatgcctctcagggcagactggctatcggcagcgtgacctggttcagagatgaggtggtgcccggcaaagaagtgcggaacggcacccctgagtttagaggaaggctggcccctctggcctccagcagatttctgcacgatcaccaggccgagctgcacatcagagatgtgcgaggacacgacgccagcatctacgtgtgcagagtggaagtgctcggcctcggagttggcacaggcaatggaacaagactggtggtggaaaaagagcaccctcagctcggagccggaacagtgctgcttctgagagccggcttttacgccgtgtcctttctgtctgtggccgtgggcagcaccgtgtactatcagggcaagtgcctgacctggaagggacctagaaggcaactgcctgctgtggtgcctgctcctttgcctcctccatgtggaagctctgcccatctgctgccacctgttccaggcgga

SEQ ID NO: 1370 - DNA, 228 bp, Artificial Sequence
  Synthetic Polynucleotide
gtggtggaaaaagagcaccctcagctcggagccggaacagtgctgcttctgagagccggcttttacgccgtgtcctttctgtctgtggccgtgggcagcaccgtgtactatcagggcaagtgcctgacctggaagggacctagaaggcaactgcctgctgtggtgcctgctcctttgcctcctccatgtggaagctctgcccatctgctgccacctgttccaggcgga

SEQ ID NO: 1371 - DNA, 324 bp, Artificial Sequence
  Synthetic Polynucleotide
ctgtgggtttcacagcctccagagatcagaaccctggaaggcagcagcgccttcctgccttgcagcttcaatgcctctcagggcagactggctatcggcagcgtgacctggttcagagatgaggtggtgcccggcaaagaagtgcggaacggcacccctgagtttagaggaaggctggcccctctggcctccagcagatttctgcacgatcaccaggccgagctgcacatcagagatgtgcgaggacacgacgccagcatctacgtgtgcagagtggaagtgctcggcctcggagttggcacaggcaatggaacaagactggtg

SEQ ID NO: 1372 - DNA, 27 bp, Artificial Sequence
  Synthetic Polynucleotide
gtggaaaaagagcaccctcagctcgga

SEQ ID NO: 1373 - DNA, 63 bp, Artificial Sequence
  Synthetic Polynucleotide
gccggaacagtgctgcttctgagagccggcttttacgccgtgtcctttctgtctgtggccgtg

SEQ ID NO: 1374 - DNA, 136 bp, Artificial Sequence
  Synthetic Polynucleotide
gggcagcaccgtgtactatcagggcaagtgcctgacctggaagggacctagaaggcaactgcctgctgtggtgcctgctcctttgcctcctccatgtggaagctctgcccatctgctgccacctgttccaggcgga

SEQ ID NO: 1375 - DNA, 549 bp, Artificial Sequence
  Synthetic Polynucleotide
ctgtgggtgtcccagccacctgaaattcggacactggaaggctcctccgcctttctgccctgtagctttaacgccagccaggggagactcgccatcggctctgtgacatggttccgggatgaagtcgtccctggaaaagaagttcgcaacggaacaccagagttcagaggcagactcgccccactggcaagctccagattcctgcatgaccatcaggctgaactgcacattagggacgtgcggggccacgatgcctccatctatgtgtgtcgggtcgaagtgcttggactcggcgtcggaactggaaacggcactaggctggtggtcgagaaagaacatccacagcttggcgctggcaccgtcctgttgcttagagccggattctatgccgtcagcttcctgtccgtggctgtggggtctacagtgtattaccagggaaaatgtctcacctggaaaggccccagacgccagcttccagctgttgttcctgctccactgccaccaccttgtggctcctctgctcacttgcttccaccagtgcctggcgga

SEQ ID NO: 1376 - DNA, 225 bp, Artificial Sequence
  Synthetic Polynucleotide
gtcgagaaagaacatccacagcttggcgctggcaccgtcctgttgcttagagccggattctatgccgtcagcttcctgtccgtggctgtggggtctacagtgtattaccagggaaaatgtctcacctggaaaggccccagacgccagcttccagctgttgttcctgctccactgccaccaccttgtggctcctctgctcacttgcttccaccagtgcctggcgga

SEQ ID NO: 1377 - DNA, 324 bp, Artificial Sequence
  Synthetic Polynucleotide
ctgtgggtgtcccagccacctgaaattcggacactggaaggctcctccgcctttctgccctgtagctttaacgccagccaggggagactcgccatcggctctgtgacatggttccgggatgaagtcgtccctggaaaagaagttcgcaacggaacaccagagttcagaggcagactcgccccactggcaagctccagattcctgcatgaccatcaggctgaactgcacattagggacgtgcggggccacgatgcctccatctatgtgtgtcgggtcgaagtgcttggactcggcgtcggaactggaaacggcactaggctggtg

SEQ ID NO: 1378 - DNA, 27 bp, Artificial Sequence
  Synthetic Polynucleotide
gtcgagaaagaacatccacagcttggc

SEQ ID NO: 1379 - DNA, 63 bp, Artificial Sequence
  Synthetic Polynucleotide
gctggcaccgtcctgttgcttagagccggattctatgccgtcagcttcctgtccgtggctgtg

SEQ ID NO: 1380 - DNA, 135 bp, Artificial Sequence
  Synthetic Polynucleotide
gggtctacagtgtattaccagggaaaatgtctcacctggaaaggccccagacgccagcttccagctgttgttcctgctccactgccaccaccttgtggctcctctgctcacttgcttccaccagtgcctggcgga

SEQ ID NO: 1381 - DNA, 858 bp, Artificial Sequence
  Synthetic Polynucleotide
atggcttggagagccctgcatcctctgctgctgcttctcctgctgttccctggatctcaggccggtaccagcggagaattcggatctctcgagcagtctaaagcccaggtgctgcaatctgtggccggacagacactgacagtgcggtgtcagtatcctcctaccggcagcctgtacgagaagaaaggctggtgcaaagaggccagcgcactcgtctgtatcagactggtcaccagcagcaagccccggacaatggcatggaccagcagattcaccatctgggacgatcccgacgccggcttctttaccgtgaccatgaccgacctgagagaagaggacagcggccactactggtgccggatctacagacccagcgacaacagcgtgtccaagagcgtgcggttctacctggtggtgtctcctgcctctgccagcacacagacaagctggaccccacgcgatctggtgtctagccagactcagacccagagctgtgtgcctcctacagctggtgctagacaggcccctgagagcccttctacaatccccgttccaagccagcctcagaacagcacactcagacctggacctgccgctcctattgctctggtgcctgtgttttgtggcctgctggtggctaagagcctggtgctgtctgccctgcttgtttggtggggagacatctggtggaaaaccatgatggaactgcggagcctggacacccagaaggccacctgtcatctccagcaagtgaccgatctgccctggacctctgtgtcaagccccgtggaaagagagatcctgtaccacaccgtggctcggaccaagatcagcgacgacgatgatgagcacaccctt

SEQ ID NO: 1382 - DNA, 765 bp, Artificial Sequence
  Synthetic Polynucleotide
cagtctaaagcccaggtgctgcaatctgtggccggacagacactgacagtgcggtgtcagtatcctcctaccggcagcctgtacgagaagaaaggctggtgcaaagaggccagcgcactcgtctgtatcagactggtcaccagcagcaagccccggacaatggcatggaccagcagattcaccatctgggacgatcccgacgccggcttctttaccgtgaccatgaccgacctgagagaagaggacagcggccactactggtgccggatctacagacccagcgacaacagcgtgtccaagagcgtgcggttctacctggtggtgtctcctgcctctgccagcacacagacaagctggaccccacgcgatctggtgtctagccagactcagacccagagctgtgtgcctcctacagctggtgctagacaggcccctgagagcccttctacaatccccgttccaagccagcctcagaacagcacactcagacctggacctgccgctcctattgctctggtgcctgtgttttgtggcctgctggtggctaagagcctggtgctgtctgccctgcttgtttggtggggagacatctggtggaaaaccatgatggaactgcggagcctggacacccagaaggccacctgtcatctccagcaagtgaccgatctgccctggacctctgtgtcaagccccgtggaaagagagatcctgtaccacaccgtggctcggaccaagatcagcgacgacgatgatgagcacaccctt

SEQ ID NO: 1383 - DNA, 468 bp, Artificial Sequence
  Synthetic Polynucleotide
aagagcgtgcggttctacctggtggtgtctcctgcctctgccagcacacagacaagctggaccccacgcgatctggtgtctagccagactcagacccagagctgtgtgcctcctacagctggtgctagacaggcccctgagagcccttctacaatccccgttccaagccagcctcagaacagcacactcagacctggacctgccgctcctattgctctggtgcctgtgttttgtggcctgctggtggctaagagcctggtgctgtctgccctgcttgtttggtggggagacatctggtggaaaaccatgatggaactgcggagcctggacacccagaaggccacctgtcatctccagcaagtgaccgatctgccctggacctctgtgtcaagccccgtggaaagagagatcctgtaccacaccgtggctcggaccaagatcagcgacgacgatgatgagcacaccctt

SEQ ID NO: 1384 - DNA, 297 bp, Artificial Sequence
  Synthetic Polynucleotide
cagtctaaagcccaggtgctgcaatctgtggccggacagacactgacagtgcggtgtcagtatcctcctaccggcagcctgtacgagaagaaaggctggtgcaaagaggccagcgcactcgtctgtatcagactggtcaccagcagcaagccccggacaatggcatggaccagcagattcaccatctgggacgatcccgacgccggcttctttaccgtgaccatgaccgacctgagagaagaggacagcggccactactggtgccggatctacagacccagcgacaacagcgtgtcc

SEQ ID NO: 1385 - DNA, 216 bp, Artificial Sequence
  Synthetic Polynucleotide
aagagcgtgcggttctacctggtggtgtctcctgcctctgccagcacacagacaagctggaccccacgcgatctggtgtctagccagactcagacccagagctgtgtgcctcctacagctggtgctagacaggcccctgagagcccttctacaatccccgttccaagccagcctcagaacagcacactcagacctggacctgccgctcctattgct

SEQ ID NO: 1386 - DNA, 63 bp, Artificial Sequence
  Synthetic Polynucleotide
ctggtgcctgtgttttgtggcctgctggtggctaagagcctggtgctgtctgccctgcttgtt

SEQ ID NO: 1387 - DNA, 189 bp, Artificial Sequence
  Synthetic Polynucleotide
tggtggggagacatctggtggaaaaccatgatggaactgcggagcctggacacccagaaggccacctgtcatctccagcaagtgaccgatctgccctggacctctgtgtcaagccccgtggaaagagagatcctgtaccacaccgtggctcggaccaagatcagcgacgacgatgatgagcacaccctt

SEQ ID NO: 1388 - DNA, 855 bp, Artificial Sequence
  Synthetic Polynucleotide
atggcttggcgtgcactccatccattgctgttgttgctgctcctgtttcctggcagccaggctggatccagcttcgaaggcagcacgcgtcagagcaaggctcaggttctccagagtgtggcaggccagactctgactgtcagatgccagtatccaccaacaggctccctctatgagaaaaaaggatggtgtaaagaggcttctgccctcgtctgcatccggctggttacctctagcaagcccagaactatggcctggacatcccggtttacaatctgggatgaccctgatgccggatttttcacagtgacaatgacggatctgcgcgaggaagattccgggcactattggtgtagaatctacaggccctccgacaactccgtgtctaagtctgtgcgcttttacctggtcgtcagccctgccagtgcctccactcagacatcttggaccccaagggaccttgtgtcctctcagacacagacacagtcctgcgtgccaccaactgctggcgcaagacaggctccagagtctcccagcacaatccccgtcccttctcagccccagaactccacacttaggccaggaccagctgctccaatcgcactggtcccagtgttctgcggactgctggttgccaagtctctggtgctgagcgcactcctcgtttggtggggcgatatttggtggaaaacgatgatggaattgagatccctcgatacgcagaaagccacatgccaccttcagcaagtcacagacttgccttggaccagcgtcagctctcccgtggaacgggaaattctgtatcatacagtggcccgcaccaagatttccgacgatgacgacgagcacacactg

SEQ ID NO: 1389 - DNA, 765 bp, Artificial Sequence
  Synthetic Polynucleotide
cagagcaaggctcaggttctccagagtgtggcaggccagactctgactgtcagatgccagtatccaccaacaggctccctctatgagaaaaaaggatggtgtaaagaggcttctgccctcgtctgcatccggctggttacctctagcaagcccagaactatggcctggacatcccggtttacaatctgggatgaccctgatgccggatttttcacagtgacaatgacggatctgcgcgaggaagattccgggcactattggtgtagaatctacaggccctccgacaactccgtgtctaagtctgtgcgcttttacctggtcgtcagccctgccagtgcctccactcagacatcttggaccccaagggaccttgtgtcctctcagacacagacacagtcctgcgtgccaccaactgctggcgcaagacaggctccagagtctcccagcacaatccccgtcccttctcagccccagaactccacacttaggccaggaccagctgctccaatcgcactggtcccagtgttctgcggactgctggttgccaagtctctggtgctgagcgcactcctcgtttggtggggcgatatttggtggaaaacgatgatggaattgagatccctcgatacgcagaaagccacatgccaccttcagcaagtcacagacttgccttggaccagcgtcagctctcccgtggaacgggaaattctgtatcatacagtggcccgcaccaagatttccgacgatgacgacgagcacacactg

SEQ ID NO: 1390 - DNA, 468 bp, Artificial Sequence
  Synthetic Polynucleotide
aagtctgtgcgcttttacctggtcgtcagccctgccagtgcctccactcagacatcttggaccccaagggaccttgtgtcctctcagacacagacacagtcctgcgtgccaccaactgctggcgcaagacaggctccagagtctcccagcacaatccccgtcccttctcagccccagaactccacacttaggccaggaccagctgctccaatcgcactggtcccagtgttctgcggactgctggttgccaagtctctggtgctgagcgcactcctcgtttggtggggcgatatttggtggaaaacgatgatggaattgagatccctcgatacgcagaaagccacatgccaccttcagcaagtcacagacttgccttggaccagcgtcagctctcccgtggaacgggaaattctgtatcatacagtggcccgcaccaagatttccgacgatgacgacgagcacacactg

SEQ ID NO: 1391 - DNA, 297 bp, Artificial Sequence
  Synthetic Polynucleotide
cagagcaaggctcaggttctccagagtgtggcaggccagactctgactgtcagatgccagtatccaccaacaggctccctctatgagaaaaaaggatggtgtaaagaggcttctgccctcgtctgcatccggctggttacctctagcaagcccagaactatggcctggacatcccggtttacaatctgggatgaccctgatgccggatttttcacagtgacaatgacggatctgcgcgaggaagattccgggcactattggtgtagaatctacaggccctccgacaactccgtgtct

SEQ ID NO: 1392 - DNA, 216 bp, Artificial Sequence
  Synthetic Polynucleotide
aagtctgtgcgcttttacctggtcgtcagccctgccagtgcctccactcagacatcttggaccccaagggaccttgtgtcctctcagacacagacacagtcctgcgtgccaccaactgctggcgcaagacaggctccagagtctcccagcacaatccccgtcccttctcagccccagaactccacacttaggccaggaccagctgctccaatcgca

SEQ ID NO: 1393 - DNA, 63 bp, Artificial Sequence
  Synthetic Polynucleotide
ctggtcccagtgttctgcggactgctggttgccaagtctctggtgctgagcgcactcctcgtt

SEQ ID NO: 1394 - DNA, 189 bp, Artificial Sequence
  Synthetic Polynucleotide
tggtggggcgatatttggtggaaaacgatgatggaattgagatccctcgatacgcagaaagccacatgccaccttcagcaagtcacagacttgccttggaccagcgtcagctctcccgtggaacgggaaattctgtatcatacagtggcccgcaccaagatttccgacgatgacgacgagcacacactg

SEQ ID NO: 1395 - DNA, 849 bp, Artificial Sequence
  Synthetic Polynucleotide
cagcagcagacactgcccaagcctttcatttgggccgagcctcacttcatggtgcccaaagaaaagcaagtgaccatctgctgccagggcaactacggcgctgtggaataccagctgcacttcgagggaagcctgttcgccgtggacagacctaagcctcctgagcggatcaacaaggtgcagttctacatccccgacatgaacagccggatggccggacagtacagctgcatctatagagtgggcgagctttggagcgagcccagcaatctgctggatctggtggtcaccgagatgtacgacacccctacactgagcgtgcaccccggacctgaagtgatctctggcgagaaagtgaccttctactgtcggctggataccgccaccagcatgtttctgctgctcaaagaaggccggtccagccacgtgcagcgcggatatggaaaagtgcaggccgagtttcccctgggacctgtgacaacagcccacagaggcacctacagatgcttcggcagctacaacaaccacgcttggagcttccctagcgagcccgtgaagttgcttgtgaccggcgacatcgagaacaccagtctggcccctgaggaccctacctttcctgccgatacctggggcacctacctgctgaccacagagacaggactccagaaagatcacgccctgtgggaccacacagcccagaacctgctgagaatgggcctcgcctttctggtgctggttgccctcgtgtggttcctggtggaagattggctgagccggaagcggacaagagagagagccagcagagcctctacctgggagggaagaagaaggctgaacacccagacactt

SEQ ID NO: 1396 - DNA, 558 bp, Artificial Sequence
  Synthetic Polynucleotide
gagatgtacgacacccctacactgagcgtgcaccccggacctgaagtgatctctggcgagaaagtgaccttctactgtcggctggataccgccaccagcatgtttctgctgctcaaagaaggccggtccagccacgtgcagcgcggatatggaaaagtgcaggccgagtttcccctgggacctgtgacaacagcccacagaggcacctacagatgcttcggcagctacaacaaccacgcttggagcttccctagcgagcccgtgaagttgcttgtgaccggcgacatcgagaacaccagtctggcccctgaggaccctacctttcctgccgatacctggggcacctacctgctgaccacagagacaggactccagaaagatcacgccctgtgggaccacacagcccagaacctgctgagaatgggcctcgcctttctggtgctggttgccctcgtgtggttcctggtggaagattggctgagccggaagcggacaagagagagagccagcagagcctctacctgggagggaagaagaaggctgaacacccagacactt

SEQ ID NO: 1397 - DNA, 528 bp, Artificial Sequence
  Synthetic Polynucleotide
caccccggacctgaagtgatctctggcgagaaagtgaccttctactgtcggctggataccgccaccagcatgtttctgctgctcaaagaaggccggtccagccacgtgcagcgcggatatggaaaagtgcaggccgagtttcccctgggacctgtgacaacagcccacagaggcacctacagatgcttcggcagctacaacaaccacgcttggagcttccctagcgagcccgtgaagttgcttgtgaccggcgacatcgagaacaccagtctggcccctgaggaccctacctttcctgccgatacctggggcacctacctgctgaccacagagacaggactccagaaagatcacgccctgtgggaccacacagcccagaacctgctgagaatgggcctcgcctttctggtgctggttgccctcgtgtggttcctggtggaagattggctgagccggaagcggacaagagagagagccagcagagcctctacctgggagggaagaagaaggctgaacacccagacactt

SEQ ID NO: 1398 - DNA, 279 bp, Artificial Sequence
  Synthetic Polynucleotide
ggcgacatcgagaacaccagtctggcccctgaggaccctacctttcctgccgatacctggggcacctacctgctgaccacagagacaggactccagaaagatcacgccctgtgggaccacacagcccagaacctgctgagaatgggcctcgcctttctggtgctggttgccctcgtgtggttcctggtggaagattggctgagccggaagcggacaagagagagagccagcagagcctctacctgggagggaagaagaaggctgaacacccagacactt

SEQ ID NO: 1399 - DNA, 291 bp, Artificial Sequence
  Synthetic Polynucleotide
cagcagcagacactgcccaagcctttcatttgggccgagcctcacttcatggtgcccaaagaaaagcaagtgaccatctgctgccagggcaactacggcgctgtggaataccagctgcacttcgagggaagcctgttcgccgtggacagacctaagcctcctgagcggatcaacaaggtgcagttctacatccccgacatgaacagccggatggccggacagtacagctgcatctatagagtgggcgagctttggagcgagcccagcaatctgctggatctggtggtcacc

SEQ ID NO: 1400 - DNA, 30 bp, Artificial Sequence
  Synthetic Polynucleotide
gagatgtacgacacccctacactgagcgtg

SEQ ID NO: 1401 - DNA, 249 bp, Artificial Sequence
  Synthetic Polynucleotide
caccccggacctgaagtgatctctggcgagaaagtgaccttctactgtcggctggataccgccaccagcatgtttctgctgctcaaagaaggccggtccagccacgtgcagcgcggatatggaaaagtgcaggccgagtttcccctgggacctgtgacaacagcccacagaggcacctacagatgcttcggcagctacaacaaccacgcttggagcttccctagcgagcccgtgaagttgcttgtgacc

SEQ ID NO: 1402 - DNA, 141 bp, Artificial Sequence
  Synthetic Polynucleotide
ggcgacatcgagaacaccagtctggcccctgaggaccctacctttcctgccgatacctggggcacctacctgctgaccacagagacaggactccagaaagatcacgccctgtgggaccacacagcccagaacctgctgaga

SEQ ID NO: 1403 - DNA, 63 bp, Artificial Sequence
  Synthetic Polynucleotide
atgggcctcgcctttctggtgctggttgccctcgtgtggttcctggtggaagattggctgagc

SEQ ID NO: 1404 - DNA, 75 bp, Artificial Sequence
  Synthetic Polynucleotide
cggaagcggacaagagagagagccagcagagcctctacctgggagggaagaagaaggctgaacacccagacactt

SEQ ID NO: 1405 - DNA, 849 bp, Artificial Sequence
  Synthetic Polynucleotide
caacaacagaccctgcctaaaccattcatctgggctgaaccccactttatggttccgaaagagaaacaagtcacgatttgttgccaagggaattacggggccgtcgagtatcagctccactttgagggctccctgtttgctgtggatcggcccaagccacctgaaagaatcaacaaagtccaattctatattcctgatatgaactcccgcatggcaggccagtattcatgtatctaccgcgtgggagaactttggagtgaaccctctaacctgctggacctcgtcgtgacagagatgtatgatacacccacactgtctgtgcaccctgggccagaagttatcagcggagaaaaagttaccttttattgccgcctcgataccgctacctctatgttcctcttgctgaaagagggccgcagctctcacgtgcagcgaggctacggaaaggtccaagctgagtttcctctcggccccgtgaccaccgctcacaggggcacatatagatgttttggctcttataacaatcatgcctggtcattcccatccgagcctgtgaaactgctggtcacaggcgatattgagaatacctctctggccccagaagatcctacattccccgccgacacatggggaacatatctgctgacaaccgaaaccgggctgcaaaaggaccatgctctgtgggatcataccgctcagaatctgcttcggatggggcttgcattcctggtcctggtggctcttgtctggtttctggtcgaggactggctgtcccggaagagaaccagagaaagagcttccagggccagcacctgggaaggcagacgcagactgaatactcagaccctg

SEQ ID NO: 1406 - DNA, 558 bp, Artificial Sequence
  Synthetic Polynucleotide
gagatgtatgatacacccacactgtctgtgcaccctgggccagaagttatcagcggagaaaaagttaccttttattgccgcctcgataccgctacctctatgttcctcttgctgaaagagggccgcagctctcacgtgcagcgaggctacggaaaggtccaagctgagtttcctctcggccccgtgaccaccgctcacaggggcacatatagatgttttggctcttataacaatcatgcctggtcattcccatccgagcctgtgaaactgctggtcacaggcgatattgagaatacctctctggccccagaagatcctacattccccgccgacacatggggaacatatctgctgacaaccgaaaccgggctgcaaaaggaccatgctctgtgggatcataccgctcagaatctgcttcggatggggcttgcattcctggtcctggtggctcttgtctggtttctggtcgaggactggctgtcccggaagagaaccagagaaagagcttccagggccagcacctgggaaggcagacgcagactgaatactcagaccctg

SEQ ID NO: 1407 - DNA, 531 bp, Artificial Sequence
  Synthetic Polynucleotide
gtgcaccctgggccagaagttatcagcggagaaaaagttaccttttattgccgcctcgataccgctacctctatgttcctcttgctgaaagagggccgcagctctcacgtgcagcgaggctacggaaaggtccaagctgagtttcctctcggccccgtgaccaccgctcacaggggcacatatagatgttttggctcttataacaatcatgcctggtcattcccatccgagcctgtgaaactgctggtcacaggcgatattgagaatacctctctggccccagaagatcctacattccccgccgacacatggggaacatatctgctgacaaccgaaaccgggctgcaaaaggaccatgctctgtgggatcataccgctcagaatctgcttcggatggggcttgcattcctggtcctggtggctcttgtctggtttctggtcgaggactggctgtcccggaagagaaccagagaaagagcttccagggccagcacctgggaaggcagacgcagactgaatactcagaccctg

SEQ ID NO: 1408 - DNA, 279 bp, Artificial Sequence
  Synthetic Polynucleotide
ggcgatattgagaatacctctctggccccagaagatcctacattccccgccgacacatggggaacatatctgctgacaaccgaaaccgggctgcaaaaggaccatgctctgtgggatcataccgctcagaatctgcttcggatggggcttgcattcctggtcctggtggctcttgtctggtttctggtcgaggactggctgtcccggaagagaaccagagaaagagcttccagggccagcacctgggaaggcagacgcagactgaatactcagaccctg

SEQ ID NO: 1409 - DNA, 291 bp, Artificial Sequence
  Synthetic Polynucleotide
caacaacagaccctgcctaaaccattcatctgggctgaaccccactttatggttccgaaagagaaacaagtcacgatttgttgccaagggaattacggggccgtcgagtatcagctccactttgagggctccctgtttgctgtggatcggcccaagccacctgaaagaatcaacaaagtccaattctatattcctgatatgaactcccgcatggcaggccagtattcatgtatctaccgcgtgggagaactttggagtgaaccctctaacctgctggacctcgtcgtgaca

SEQ ID NO: 1410 - DNA, 30 bp, Artificial Sequence
  Synthetic Polynucleotide
gagatgtatgatacacccacactgtctgtg

SEQ ID NO: 1411 - DNA, 249 bp, Artificial Sequence
  Synthetic Polynucleotide
caccctgggccagaagttatcagcggagaaaaagttaccttttattgccgcctcgataccgctacctctatgttcctcttgctgaaagagggccgcagctctcacgtgcagcgaggctacggaaaggtccaagctgagtttcctctcggccccgtgaccaccgctcacaggggcacatatagatgttttggctcttataacaatcatgcctggtcattcccatccgagcctgtgaaactgctggtcaca

SEQ ID NO: 1412 - DNA, 141 bp, Artificial Sequence
  Synthetic Polynucleotide
ggcgatattgagaatacctctctggccccagaagatcctacattccccgccgacacatggggaacatatctgctgacaaccgaaaccgggctgcaaaaggaccatgctctgtgggatcataccgctcagaatctgcttcgg

SEQ ID NO: 1413 - DNA, 63 bp, Artificial Sequence
  Synthetic Polynucleotide
atggggcttgcattcctggtcctggtggctcttgtctggtttctggtcgaggactggctgtcc

SEQ ID NO: 1414 - DNA, 75 bp, Artificial Sequence
  Synthetic Polynucleotide
cggaagagaaccagagaaagagcttccagggccagcacctgggaaggcagacgcagactgaatactcagaccctg

SEQ ID NO: 1415 - DNA, 714 bp, Artificial Sequence
  Synthetic Polynucleotide
ggcatgcggactgaagacctcccaaaggctgtggtgttcctggagcctcaatggtacagggtgctggagaaggacagtgtgactctgaagtgccagggagcctactcccctgaggacaattccacacagtggtttcacaatgagagcctcatctcaagccaggcctccagctacttcattgacgctgccacagtggacgacagtggagagtacaggtgccagacaaacctctccaccctcagtgacccggtgcagctagaagtccatatcggctggctgttgctccaggcccctcggtgggtgttcaaggaggaagaccctattcacctgaggtgtcacagctggaagaacactgctctgcataaggtcacatatttacagaatggcaaaggcaggaagtattttcatcataattctgacttctacattccaaaagccacactcaaagacagcggctcctacttctgcagggggcttgttgggagtaaaaatgtgtcttcagagactgtgaacatcaccatcactcaaggtttggcagtgtcaaccatctcatcattctttccacctggctaccaagtgtccttctgcctggtcatggtgctgctgttcgccgtggataccggcctgtacttcagcgtcaagaccaacatccggtccagcaccagagactggaaggaccacaagttcaagtggcggaaggaccctcaggacaag

SEQ ID NO: 1416 - DNA, 714 bp, Artificial Sequence
  Synthetic Polynucleotide
ggcatgagaaccgaggacctgcctaaggccgtggtgttcctggaaccccagtggtacagagtgctggaaaaggacagcgtgaccctgaagtgccagggcgcctacagccccgaggacaatagcacccagtggttccacaacgagagcctgatctccagccaggccagcagctacttcatcgacgccgccaccgtggacgacagcggcgagtatagatgccagaccaacctgagcaccctgagcgaccccgtgcagctggaagtgcacatcggatggctgctgctgcaggcccccagatgggtgttcaaagaagaggaccccatccacctgagatgccactcttggaagaacaccgccctgcacaaagtgacctacctgcagaacggcaagggcagaaagtacttccaccacaacagcgacttctacatccccaaggccaccctgaaggactccggctcctacttctgcagaggcctcgtgggcagcaagaacgtgtccagcgagacagtgaacatcaccatcacccagggcctggccgtgtctaccatcagcagctttttcccacccggctaccaggtgtccttctgcctcgtgatggtgctgctgttcgccgtggacaccggcctgtacttcagcgtgaaaacaaacatccggtccagcaccagagactggaaggaccacaagttcaagtggcggaaggacccccaggacaag

SEQ ID NO: 1417 - DNA, 714 bp, Artificial Sequence
  Synthetic Polynucleotide
ggaatgaggactgaggatcttcccaaagctgtcgtctttctcgaaccccaatggtatcgggtgctcgaaaaagactctgtgacactgaaatgccaaggggcctactctcccgaggacaactccacacagtggtttcataatgagtccctcatcagctctcaggccagctcttatttcattgatgccgctacagtggacgactccggcgagtatcggtgtcagaccaatctgtctacactgtctgaccccgtgcagcttgaggtccacattggatggttgctcttgcaagccccacgctgggttttcaaagaggaagatccaatccatctgcggtgccacagctggaaaaacaccgctctccacaaagtcacatacctgcaaaatggcaaaggacgcaaatacttccatcacaattccgatttttacattccgaaggctaccctgaaagacagcggcagctatttctgccggggactcgtcggctccaagaatgtgtcctccgaaaccgtgaatatcacgattacccaaggactggctgtgcctacaatctctagcttctttccgcctggataccaagtctccttctgtcttgtgatggtcctcctgtttgctgtggacacaggactgtacttttccgtgaaaacgaacatccgcagctccacacgcgattggaaagatcacaagtttaaatggcgcaaagatccccaggacaag

SEQ ID NO: 1418 - DNA, 267 bp, Artificial Sequence
  Synthetic Polynucleotide
atgattcctgccgtggtgctgctgctcctgctgctggttgaacaagctgccgctctgggatccctgggagagcctcagctgtgctatatcctggacgccatcctgtttctgtacggcatcgtgctgaccctgctgtactgccggctgaagatccaagtgcggaaggccgccatcaccagctacgagaaatccgacggcgtgtacaccggcctgagcaccagaaatcaagagacatacgagacactgaagcacgaaaagcctccacaa

SEQ ID NO: 1419 - DNA, 204 bp, Artificial Sequence
  Synthetic Polynucleotide
ctgggagagcctcagctgtgctatatcctggacgccatcctgtttctgtacggcatcgtgctgaccctgctgtactgccggctgaagatccaagtgcggaaggccgccatcaccagctacgagaaatccgacggcgtgtacaccggcctgagcaccagaaatcaagagacatacgagacactgaagcacgaaaagcctccacaa

SEQ ID NO: 1420 - DNA, 267 bp, Artificial Sequence
  Synthetic Polynucleotide
atgatccctgctgttgtcctcctcctgcttctgctggtcgagcaagcagcagctctcggtaccctcggagaaccacagctctgttacattctggatgctatcctgttcctctatgggatcgtcctgacactcctgtattgcagactcaaaattcaagttcgcaaagccgccattacctcttacgagaagagtgatggggtgtacacaggactgtctacccggaatcaagaaacctacgaaaccctcaaacatgagaagccacctcag

SEQ ID NO: 1421 - DNA, 204 bp, Artificial Sequence
  Synthetic Polynucleotide
ctcggagaaccacagctctgttacattctggatgctatcctgttcctctatgggatcgtcctgacactcctgtattgcagactcaaaattcaagttcgcaaagccgccattacctcttacgagaagagtgatggggtgtacacaggactgtctacccggaatcaagaaacctacgaaaccctcaaacatgagaagccacctcag

SEQ ID NO: 1422 - DNA, 267 bp, Artificial Sequence
  Synthetic Polynucleotide
atgattcctgccgtggtgctgctgctcctgctgctggttgaacaagctgccgctctgggatccctgggagagcctcagctgagctatatcctggacgccatcctgtttctgtacggcatcgtgctgaccctgctgtactgccggctgaagatccaagtgcggaaggccgccatcaccagctacgagaaatccgacggcgtgtacaccggcctgagcaccagaaatcaagagacatacgagacactgaagcacgaaaagcctccacaa

SEQ ID NO: 1423 - DNA, 204 bp, Artificial Sequence
  Synthetic Polynucleotide
ctgggagagcctcagctgagctatatcctggacgccatcctgtttctgtacggcatcgtgctgaccctgctgtactgccggctgaagatccaagtgcggaaggccgccatcaccagctacgagaaatccgacggcgtgtacaccggcctgagcaccagaaatcaagagacatacgagacactgaagcacgaaaagcctccacaa

SEQ ID NO: 1424 - DNA, 267 bp, Artificial Sequence
  Synthetic Polynucleotide
atgatccctgctgttgtcctcctcctgcttctgctggtcgagcaagcagcagctctcggtaccctcggagaaccacagctctcttacattctggatgctatcctgttcctctatgggatcgtcctgacactcctgtattgcagactcaaaattcaagttcgcaaagccgccattacctcttacgagaagagtgatggggtgtacacaggactgtctacccggaatcaagaaacctacgaaaccctcaaacatgagaagccacctcag

SEQ ID NO: 1425 - DNA, 204 bp, Artificial Sequence
  Synthetic Polynucleotide
ctcggagaaccacagctctcttacattctggatgctatcctgttcctctatgggatcgtcctgacactcctgtattgcagactcaaaattcaagttcgcaaagccgccattacctcttacgagaagagtgatggggtgtacacaggactgtctacccggaatcaagaaacctacgaaaccctcaaacatgagaagccacctcag

SEQ ID NO: 1426 - DNA, 450 bp, Artificial Sequence
  Synthetic Polynucleotide
cagagcttcggcctgctggaccccaagctgagctacctgctggatggcatcctgttcatctacggcgtgatcctgaccgccctgttcctgtggcggcggaagcggaaagagaagcagtctgagacaagccccaaagagttcctgaccatctacgaggacgtgaaggacctgaaaacccggcggaaccacgaacaagagcagacctttcctggcggaggcagcaccatctacagcatgatccagagccagagcagcgcccctacaagccaagagcctgcctacacactgtactccctgatccagcctagcagaaagagcggcagccggaagagaaatcacagccccagcttcaacagcacgatctacgaagtgatcggcaagagccagccaaaggctcagaaccctgccagactgagccggaaagagctggaaaacttcgacgtgtacagc

SEQ ID NO: 1427 - DNA, 360 bp, Artificial Sequence
  Synthetic Polynucleotide
tggcggcggaagcggaaagagaagcagtctgagacaagccccaaagagttcctgaccatctacgaggacgtgaaggacctgaaaacccggcggaaccacgaacaagagcagacctttcctggcggaggcagcaccatctacagcatgatccagagccagagcagcgcccctacaagccaagagcctgcctacacactgtactccctgatccagcctagcagaaagagcggcagccggaagagaaatcacagccccagcttcaacagcacgatctacgaagtgatcggcaagagccagccaaaggctcagaaccctgccagactgagccggaaagagctggaaaacttcgacgtgtacagc

SEQ ID NO: 1428 - DNA, 456 bp, Artificial Sequence
  Synthetic Polynucleotide
cagagttttgggttgttggaccctaaattgagctatctgttggacggaatcctgttcatttacggagtgatcctgaccgcattgttcctgtggcgacgcaagcgcaaagaaaagcaaagcgagacaagcccaaaagaatttctcactatatacgaggacgtgaaagatttgaagacgaggcggaatcatgagcaagagcagacatttcctggcgggggctctactatctactcaatgattcaatcccaaagctccgctccgacttcccaagagcccgcttacactctctactcactgatacagccttcaagaaaatcaggctctcggaaacggaatcattccccatccttcaatagtaccatctatgaagtaatcggtaagagtcaacctaaagctcaaaaccccgctcgcttgagccgcaaggagctggaaaacttcgatgtatatagctctaga

SEQ ID NO: 1429 - DNA, 360 bp, Artificial Sequence
  Synthetic Polynucleotide
tggcgacgcaagcgcaaagaaaagcaaagcgagacaagcccaaaagaatttctcactatatacgaggacgtgaaagatttgaagacgaggcggaatcatgagcaagagcagacatttcctggcgggggctctactatctactcaatgattcaatcccaaagctccgctccgacttcccaagagcccgcttacactctctactcactgatacagccttcaagaaaatcaggctctcggaaacggaatcattccccatccttcaatagtaccatctatgaagtaatcggtaagagtcaacctaaagctcaaaaccccgctcgcttgagccgcaaggagctggaaaacttcgatgtatatagc

SEQ ID NO: 1430 - DNA, 597 bp, Artificial Sequence
  Synthetic Polynucleotide
gcaaagcccaccacgactccagcgccgcgaccaccaacaccggcgcccactatcgcgtcgcagcccctgtccctgagaccagaggcgtgtagaccagcggctggaggcgcagtgcacacgagggggctggacttcgcctgtgacagcaacctgtttgtggcctcttggatcgccgtgatgattatcttcagaatcggaatggccgtggctatcttctgctgcttcttcttcccatcctggcggcggaagcggaaagagaagcagtctgagacaagccccaaagagttcctgaccatctacgaggacgtgaaggacctgaaaacccggcggaaccacgaacaagagcagacctttcctggcggaggcagcaccatctacagcatgatccagagccagagcagcgcccctacaagccaagagcctgcctacacactgtactccctgatccagcctagcagaaagagcggcagccggaagagaaatcacagccccagcttcaacagcacgatctacgaagtgatcggcaagagccagccaaaggctcagaaccctgccagactgagccggaaagagctggaaaacttcgacgtgtacagc

SEQ ID NO: 1431 - DNA, 144 bp, Artificial Sequence
  Synthetic Polynucleotide
gcaaagcccaccacgactccagcgccgcgaccaccaacaccggcgcccactatcgcgtcgcagcccctgtccctgagaccagaggcgtgtagaccagcggctggaggcgcagtgcacacgagggggctggacttcgcctgtgac

SEQ ID NO: 1432 - DNA, 93 bp, Artificial Sequence
  Synthetic Polynucleotide
agcaacctgtttgtggcctcttggatcgccgtgatgattatcttcagaatcggaatggccgtggctatcttctgctgcttcttcttcccatcc

SEQ ID NO: 1433 - DNA, 360 bp, Artificial Sequence; identical to SEQ ID NO: 1427
  Synthetic Polynucleotide

SEQ ID NO: 1434 - DNA, 597 bp, Artificial Sequence
  Synthetic Polynucleotide
gctaagccaaccaccacgccagctcctagacctcctacaccagctcctacaatcgccagccagcctctgtctctcagacccgaagcctgcagacctgctgctggcggagctgtgcataccagaggactggatttcgcctgcgattccaatctgttcgtggcaagctggattgccgtcatgataattttccgcattggaatggctgtcgcaatcttttgttgtttcttctttccctcctggcgacgcaagcgcaaagaaaagcaaagcgagacaagcccaaaagaatttctcactatatacgaggacgtgaaagatttgaagacgaggcggaatcatgagcaagagcagacatttcctggcgggggctctactatctactcaatgattcaatcccaaagctccgctccgacttcccaagagcccgcttacactctctactcactgatacagccttcaagaaaatcaggctctcggaaacggaatcattccccatccttcaatagtaccatctatgaagtaatcggtaagagtcaacctaaagctcaaaaccccgctcgcttgagccgcaaggagctggaaaacttcgatgtatatagc

SEQ ID NO: 1435 - DNA, 144 bp, Artificial Sequence
  Synthetic Polynucleotide
gctaagccaaccaccacgccagctcctagacctcctacaccagctcctacaatcgccagccagcctctgtctctcagacccgaagcctgcagacctgctgctggcggagctgtgcataccagaggactggatttcgcctgcgat

SEQ ID NO: 1436 - DNA, 93 bp, Artificial Sequence
  Synthetic Polynucleotide
tccaatctgttcgtggcaagctggattgccgtcatgataattttccgcattggaatggctgtcgcaatcttttgttgtttcttctttccctcc

SEQ ID NO: 1437 - DNA, 360 bp, Artificial Sequence; identical to SEQ ID NO: 1429
  Synthetic Polynucleotide

SEQ ID NO: 1438 - DNA, 597 bp, Artificial Sequence
  Synthetic Polynucleotide
gcaaagcccaccacgactccagcgccgcgaccaccaacaccggcgcccactatcgcgtcgcagcccctgtccctgagaccagaggcggccagaccagcggctggaggcgcagtgcacacgagggggctggacttcgcctgtgacagcaacctgtttgtggcctcttggatcgccgtgatgattatcttcagaatcggaatggccgtggctatcttctgctgcttcttcttcccatcctggcggcggaagcggaaagagaagcagtctgagacaagccccaaagagttcctgaccatctacgaggacgtgaaggacctgaaaacccggcggaaccacgaacaagagcagacctttcctggcggaggcagcaccatctacagcatgatccagagccagagcagcgcccctacaagccaagagcctgcctacacactgtactccctgatccagcctagcagaaagagcggcagccggaagagaaatcacagccccagcttcaacagcacgatctacgaagtgatcggcaagagccagccaaaggctcagaaccctgccagactgagccggaaagagctggaaaacttcgacgtgtacagc

SEQ ID NO: 1439 - DNA, 144 bp, Artificial Sequence
  Synthetic Polynucleotide
gcaaagcccaccacgactccagcgccgcgaccaccaacaccggcgcccactatcgcgtcgcagcccctgtccctgagaccagaggcggccagaccagcggctggaggcgcagtgcacacgagggggctggacttcgcctgtgac

SEQ ID NO: 1440 - DNA, 597 bp, Artificial Sequence
  Synthetic Polynucleotide
gctaagccaaccaccacgccagctcctagacctcctacaccagctcctacaatcgccagccagcctctgtctctcagacccgaagccgcgagacctgctgctggcggagctgtgcataccagaggactggatttcgcctgcgattccaatctgttcgtggcaagctggattgccgtcatgataattttccgcattggaatggctgtcgcaatcttttgttgtttcttctttccctcctggcgacgcaagcgcaaagaaaagcaaagcgagacaagcccaaaagaatttctcactatatacgaggacgtgaaagatttgaagacgaggcggaatcatgagcaagagcagacatttcctggcgggggctctactatctactcaatgattcaatcccaaagctccgctccgacttcccaagagcccgcttacactctctactcactgatacagccttcaagaaaatcaggctctcggaaacggaatcattccccatccttcaatagtaccatctatgaagtaatcggtaagagtcaacctaaagctcaaaaccccgctcgcttgagccgcaaggagctggaaaacttcgatgtatatagc

SEQ ID NO: 1441 - DNA, 144 bp, Artificial Sequence
  Synthetic Polynucleotide
gctaagccaaccaccacgccagctcctagacctcctacaccagctcctacaatcgccagccagcctctgtctctcagacccgaagccgcgagacctgctgctggcggagctgtgcataccagaggactggatttcgcctgcgat

SEQ ID NO: 1442 - DNA, 267 bp, Artificial Sequence
  Synthetic Polynucleotide
ggcatgcggactgaagacctcccaaaggctgtggtgttcctggagcctcaatggtacagggtgctggagaaggacagtgtgactctgaagtgccagggagcctactcccctgaggacaattccacacagtggtttcacaatgagagcctcatctcaagccaggcctccagctacttcattgacgctgccacagtggacgacagtggagagtacaggtgccagacaaacctctccaccctcagtgacccggtgcagctagaagtccat

SEQ ID NO: 1443 - DNA, 252 bp, Artificial Sequence
  Synthetic Polynucleotide
atcggctggctgttgctccaggcccctcggtgggtgttcaaggaggaagaccctattcacctgaggtgtcacagctggaagaacactgctctgcataaggtcacatatttacagaatggcaaaggcaggaagtattttcatcataattctgacttctacattccaaaagccacactcaaagacagcggctcctacttctgcagggggcttgttgggagtaaaaatgtgtcttcagagactgtgaacatcacc

SEQ ID NO: 1444 - DNA, 42 bp, Artificial Sequence
  Synthetic Polynucleotide
atcggctggctgttgctccaggcccctcggtgggtgttcaag

SEQ ID NO: 1445 - DNA, 210 bp, Artificial Sequence
  Synthetic Polynucleotide
gaggaagaccctattcacctgaggtgtcacagctggaagaacactgctctgcataaggtcacatatttacagaatggcaaaggcaggaagtattttcatcataattctgacttctacattccaaaagccacactcaaagacagcggctcctacttctgcagggggcttgttgggagtaaaaatgtgtcttcagagactgtgaacatcacc

SEQ ID NO: 1446 - DNA, 51 bp, Artificial Sequence
  Synthetic Polynucleotide
atcactcaaggtttggcagtgtcaaccatctcatcattctttccacctggc

SEQ ID NO: 1447 - DNA, 69 bp, Artificial Sequence
  Synthetic Polynucleotide
taccaagtgtccttctgcctggtcatggtgctgctgttcgccgtggataccggcctgtacttcagcgtc

SEQ ID NO: 1448 - DNA, 75 bp, Artificial Sequence
  Synthetic Polynucleotide
aagaccaacatccggtccagcaccagagactggaaggaccacaagttcaagtggcggaaggaccctcaggacaag

SEQ ID NO: 1449 - DNA, 714 bp, Artificial Sequence; identical to SEQ ID NO: 1415
  Synthetic Polynucleotide

SEQ ID NO: 1450 - DNA, 447 bp, Artificial Sequence
  Synthetic Polynucleotide
atcggctggctgttgctccaggcccctcggtgggtgttcaaggaggaagaccctattcacctgaggtgtcacagctggaagaacactgctctgcataaggtcacatatttacagaatggcaaaggcaggaagtattttcatcataattctgacttctacattccaaaagccacactcaaagacagcggctcctacttctgcagggggcttgttgggagtaaaaatgtgtcttcagagactgtgaacatcaccatcactcaaggtttggcagtgtcaaccatctcatcattctttccacctggctaccaagtgtccttctgcctggtcatggtgctgctgttcgccgtggataccggcctgtacttcagcgtcaagaccaacatccggtccagcaccagagactggaaggaccacaagttcaagtggcggaaggaccctcaggacaag

SEQ ID NO: 1451 - DNA, 195 bp, Artificial Sequence
  Synthetic Polynucleotide
atcactcaaggtttggcagtgtcaaccatctcatcattctttccacctggctaccaagtgtccttctgcctggtcatggtgctgctgttcgccgtggataccggcctgtacttcagcgtcaagaccaacatccggtccagcaccagagactggaaggaccacaagttcaagtggcggaaggaccctcaggacaag

SEQ ID NO: 1452 - DNA, 267 bp, Artificial Sequence
  Synthetic Polynucleotide
ggaatgaggactgaggatcttcccaaagctgtcgtctttctcgaaccccaatggtatcgggtgctcgaaaaagactctgtgacactgaaatgccaaggggcctactctcccgaggacaactccacacagtggtttcataatgagtccctcatcagctctcaggccagctcttatttcattgatgccgctacagtggacgactccggcgagtatcggtgtcagaccaatctgtctacactgtctgaccccgtgcagcttgaggtccac

SEQ ID NO: 1453 - DNA, 252 bp, Artificial Sequence
  Synthetic Polynucleotide
attggatggttgctcttgcaagccccacgctgggttttcaaagaggaagatccaatccatctgcggtgccacagctggaaaaacaccgctctccacaaagtcacatacctgcaaaatggcaaaggacgcaaatacttccatcacaattccgatttttacattccgaaggctaccctgaaagacagcggcagctatttctgccggggactcgtcggctccaagaatgtgtcctccgaaaccgtgaatatcacg

SEQ ID NO: 1454 - DNA, 42 bp, Artificial Sequence
  Synthetic Polynucleotide
attggatggttgctcttgcaagccccacgctgggttttcaaa

SEQ ID NO: 1455 - DNA, 210 bp, Artificial Sequence
  Synthetic Polynucleotide
gaggaagatccaatccatctgcggtgccacagctggaaaaacaccgctctccacaaagtcacatacctgcaaaatggcaaaggacgcaaatacttccatcacaattccgatttttacattccgaaggctaccctgaaagacagcggcagctatttctgccggggactcgtcggctccaagaatgtgtcctccgaaaccgtgaatatcacg

SEQ ID NO: 1456 - DNA, 51 bp, Artificial Sequence
  Synthetic Polynucleotide
attacccaaggactggctgtgcctacaatctctagcttctttccgcctgga

SEQ ID NO: 1457 - DNA, 69 bp, Artificial Sequence
  Synthetic Polynucleotide
taccaagtctccttctgtcttgtgatggtcctcctgtttgctgtggacacaggactgtacttttccgtg

SEQ ID NO: 1458 - DNA, 75 bp, Artificial Sequence
  Synthetic Polynucleotide
aaaacgaacatccgcagctccacacgcgattggaaagatcacaagtttaaatggcgcaaagatccccaggacaag

SEQ ID NO: 1459 - DNA, 714 bp, Artificial Sequence; identical to SEQ ID NO: 1417
  Synthetic Polynucleotide

SEQ ID NO: 1460 - DNA, 447 bp, Artificial Sequence
  Synthetic Polynucleotide
attggatggttgctcttgcaagccccacgctgggttttcaaagaggaagatccaatccatctgcggtgccacagctggaaaaacaccgctctccacaaagtcacatacctgcaaaatggcaaaggacgcaaatacttccatcacaattccgatttttacattccgaaggctaccctgaaagacagcggcagctatttctgccggggactcgtcggctccaagaatgtgtcctccgaaaccgtgaatatcacgattacccaaggactggctgtgcctacaatctctagcttctttccgcctggataccaagtctccttctgtcttgtgatggtcctcctgtttgctgtggacacaggactgtacttttccgtgaaaacgaacatccgcagctccacacgcgattggaaagatcacaagtttaaatggcgcaaagatccccaggacaag

SEQ ID NO: 1461 - DNA, 195 bp, Artificial Sequence
  Synthetic Polynucleotide
attacccaaggactggctgtgcctacaatctctagcttctttccgcctggataccaagtctccttctgtcttgtgatggtcctcctgtttgctgtggacacaggactgtacttttccgtgaaaacgaacatccgcagctccacacgcgattggaaagatcacaagtttaaatggcgcaaagatccccaggacaag

SEQ ID NO: 1462 - DNA, 267 bp, Artificial Sequence
  Synthetic Polynucleotide
ggcatgagaaccgaggacctgcctaaggccgtggtgttcctggaaccccagtggtacagagtgctggaaaaggacagcgtgaccctgaagtgccagggcgcctacagccccgaggacaatagcacccagtggttccacaacgagagcctgatctccagccaggccagcagctacttcatcgacgccgccaccgtggacgacagcggcgagtatagatgccagaccaacctgagcaccctgagcgaccccgtgcagctggaagtgcac

SEQ ID NO: 1463 - DNA, 252 bp, Artificial Sequence
  Synthetic Polynucleotide
atcggatggctgctgctgcaggcccccagatgggtgttcaaagaagaggaccccatccacctgagatgccactcttggaagaacaccgccctgcacaaagtgacctacctgcagaacggcaagggcagaaagtacttccaccacaacagcgacttctacatccccaaggccaccctgaaggactccggctcctacttctgcagaggcctcgtgggcagcaagaacgtgtccagcgagacagtgaacatcacc

SEQ ID NO: 1464 - DNA, 42 bp, Artificial Sequence
  Synthetic Polynucleotide
atcggatggctgctgctgcaggcccccagatgggtgttcaaa

SEQ ID NO: 1465 - DNA, 210 bp, Artificial Sequence
  Synthetic Polynucleotide
gaagaggaccccatccacctgagatgccactcttggaagaacaccgccctgcacaaagtgacctacctgcagaacggcaagggcagaaagtacttccaccacaacagcgacttctacatccccaaggccaccctgaaggactccggctcctacttctgcagaggcctcgtgggcagcaagaacgtgtccagcgagacagtgaacatcacc

SEQ ID NO: 1466 - DNA, 51 bp, Artificial Sequence
  Synthetic Polynucleotide
atcacccagggcctggccgtgtctaccatcagcagctttttcccacccggc

SEQ ID NO: 1467 - DNA, 69 bp, Artificial Sequence
  Synthetic Polynucleotide
taccaggtgtccttctgcctcgtgatggtgctgctgttcgccgtggacaccggcctgtacttcagcgtg

SEQ ID NO: 1468 - DNA, 75 bp, Artificial Sequence
  Synthetic Polynucleotide
aaaacaaacatccggtccagcaccagagactggaaggaccacaagttcaagtggcggaaggacccccaggacaag

SEQ ID NO: 1469 - DNA, 714 bp, Artificial Sequence; identical to SEQ ID NO: 1416
  Synthetic Polynucleotide

SEQ ID NO: 1470 - DNA, 447 bp, Artificial Sequence
  Synthetic Polynucleotide
atcggatggctgctgctgcaggcccccagatgggtgttcaaagaagaggaccccatccacctgagatgccactcttggaagaacaccgccctgcacaaagtgacctacctgcagaacggcaagggcagaaagtacttccaccacaacagcgacttctacatccccaaggccaccctgaaggactccggctcctacttctgcagaggcctcgtgggcagcaagaacgtgtccagcgagacagtgaacatcaccatcacccagggcctggccgtgtctaccatcagcagctttttcccacccggctaccaggtgtccttctgcctcgtgatggtgctgctgttcgccgtggacaccggcctgtacttcagcgtgaaaacaaacatccggtccagcaccagagactggaaggaccacaagttcaagtggcggaaggacccccaggacaag

SEQ ID NO: 1471 - DNA, 195 bp, Artificial Sequence
  Synthetic Polynucleotide
atcacccagggcctggccgtgtctaccatcagcagctttttcccacccggctaccaggtgtccttctgcctcgtgatggtgctgctgttcgccgtggacaccggcctgtacttcagcgtgaaaacaaacatccggtccagcaccagagactggaaggaccacaagttcaagtggcggaaggacccccaggacaag

SEQ ID NO: 1472 - DNA, 291 bp, Artificial Sequence
  Synthetic Polynucleotide
gtggccgagggcaagaccgacaaccagtacaccctgtttgtggctggcggcacagttctgctgctgctgttcgtgatctccatcacgactatcatcgtgatctttctgaaccggcggaggcggagagagcggagggatctgtttacagagagctgggacacccagaaggcccctaacaactacagaagccccatcagcaccggccagcctaccaaccagagcatggacgatacccgcgaggacatctacgtgaactaccctaccttcagcagacggcccaagacaagagtt

SEQ ID NO: 1473 - DNA, 45 bp, Artificial Sequence
  Synthetic Polynucleotide
gtggccgagggcaagaccgacaaccagtacaccctgtttgtggct

SEQ ID NO: 1474 - DNA, 63 bp, Artificial Sequence
  Synthetic Polynucleotide
ggcggcacagttctgctgctgctgttcgtgatctccatcacgactatcatcgtgatctttctg

SEQ ID NO: 1475 - DNA, 183 bp, Artificial Sequence
  Synthetic Polynucleotide
aaccggcggaggcggagagagcggagggatctgtttacagagagctgggacacccagaaggcccctaacaactacagaagccccatcagcaccggccagcctaccaaccagagcatggacgatacccgcgaggacatctacgtgaactaccctaccttcagcagacggcccaagacaagagtt

SEQ ID NO: 1476 - DNA, 291 bp, Artificial Sequence
  Synthetic Polynucleotide
gtggctgaaggcaaaacagataatcagtacacactcttcgttgccggcggaaccgtgctgctcctgctctttgtgattagcatcacaacgattatcgtcatcttcctcaaccgcaggcggagaagagagaggcgcgatctgttcaccgagtcttgggatacacagaaagctccgaacaactatcggagccctatctccaccggacagcccacaaatcagtctatggacgacacacgcgaggacatctatgtcaattaccccactttttctaggcggcctaagaccagagtg

SEQ ID NO: 1477 - DNA, 45 bp, Artificial Sequence
  Synthetic Polynucleotide
gtggctgaaggcaaaacagataatcagtacacactcttcgttgcc

SEQ ID NO: 1478 - DNA, 63 bp, Artificial Sequence
  Synthetic Polynucleotide
ggcggaaccgtgctgctcctgctctttgtgattagcatcacaacgattatcgtcatcttcctc

SEQ ID NO: 1479 - DNA, 183 bp, Artificial Sequence
  Synthetic Polynucleotide
aaccgcaggcggagaagagagaggcgcgatctgttcaccgagtcttgggatacacagaaagctccgaacaactatcggagccctatctccaccggacagcccacaaatcagtctatggacgacacacgcgaggacatctatgtcaattaccccactttttctaggcggcctaagaccagagtg

SEQ ID NO: 1480 - DNA, 1008 bp, Artificial Sequence
  Synthetic Polynucleotide
atggactaccccacactgctgctggctctgctgcatgtgtatagagccctgtgcgaagaggtgctgtggcacacctctgtgcccttcgccgagaacatgagcctggaatgcgtgtaccccagcatgggcatcctgacacaggtggaatggttcaagatcggcacccagcaggactctatcgccatcttcagccccacacacggcatggtcatcagaaagccttacgccgagcgggtgtacttcctgaacagcacaatggcctccaacaacatgaccctgttcttcagaaacgccagcgaggacgacgtgggctactacagctgttccctgtacacataccctcaaggcacctggcagaaagtgatccaggtggtgcagagcgacagcttcgaggctgccgtgcctagcaatagccacatcgtgtctgagcccggcaagaacgtgaccctgacttgccagcctcagatgacctggcctgtgcaggccgttagatgggagaagatccagcctcggcagatcgacctgctgacctactgcaatctggtgcacggcagaaacttcaccagcaagttccccagacagatcgtgtccaactgctcccacggacgttggagcgtgatcgtgatccctgatgtgaccgtgtccgacagcggcctgtatcggtgttacctgcaagcctctgccggcgagaacgagacattcgtgatgagactgacagtggccgagggcaagaccgacaaccagtacaccctgtttgtggctggcggcacagttctgctgctgctgttcgtgatctccatcacgactatcatcgtgatctttctgaaccggcggaggcggagagagcggagggatctgtttacagagagctgggacacccagaaggcccctaacaactacagaagccccatcagcaccggccagcctaccaaccagagcatggacgatacccgcgaggacatctacgtgaactaccctaccttcagcagacggcccaagacaagagtt

SEQ ID NO: 1481 - DNA, 954 bp, Artificial Sequence
  Synthetic Polynucleotide
gaagaggtgctgtggcacacctctgtgcccttcgccgagaacatgagcctggaatgcgtgtaccccagcatgggcatcctgacacaggtggaatggttcaagatcggcacccagcaggactctatcgccatcttcagccccacacacggcatggtcatcagaaagccttacgccgagcgggtgtacttcctgaacagcacaatggcctccaacaacatgaccctgttcttcagaaacgccagcgaggacgacgtgggctactacagctgttccctgtacacataccctcaaggcacctggcagaaagtgatccaggtggtgcagagcgacagcttcgaggctgccgtgcctagcaatagccacatcgtgtctgagcccggcaagaacgtgaccctgacttgccagcctcagatgacctggcctgtgcaggccgttagatgggagaagatccagcctcggcagatcgacctgctgacctactgcaatctggtgcacggcagaaacttcaccagcaagttccccagacagatcgtgtccaactgctcccacggacgttggagcgtgatcgtgatccctgatgtgaccgtgtccgacagcggcctgtatcggtgttacctgcaagcctctgccggcgagaacgagacattcgtgatgagactgacagtggccgagggcaagaccgacaaccagtacaccctgtttgtggctggcggcacagttctgctgctgctgttcgtgatctccatcacgactatcatcgtgatctttctgaaccggcggaggcggagagagcggagggatctgtttacagagagctgggacacccagaaggcccctaacaactacagaagccccatcagcaccggccagcctaccaaccagagcatggacgatacccgcgaggacatctacgtgaactaccctaccttcagcagacggcccaagacaagagtt

SEQ ID NO: 1482 - DNA, 1008 bp, Artificial Sequence
  Synthetic Polynucleotide
atggattaccctactctgcttctcgccctcctgcacgtgtaccgggcactttgtgaagaagtgctctggcataccagcgtgccatttgccgagaatatgtcccttgagtgtgtgtacccctctatggggattctgacccaagtcgagtggtttaagattgggacgcagcaagacagcattgccatcttctctccaactcacggaatggttattcggaagccctatgccgagagagtctatttcctgaactctacgatggcaagcaacaatatgacgctgttttttcggaacgcctccgaggatgatgtggggtactattcctgtagcctgtacacctatccacaaggcacatggcaaaaagtcattcaagtggtccagtccgactccttcgaggccgcagttccaagcaactcccacatcgttagcgagcctgggaagaatgtcacactgacctgtcagccccaaatgacatggcccgtccaagctgtccgctgggagaaaattcagccaagacagattgatctcctcacctactgtaacctggttcatggccggaatttcacctccaagtttccacggcagattgtcagcaactgtagccacggacgttggagtgtcattgtgattccagacgtgacagtgtctgactccgggctgtacagatgctatctgcaagccagcgcaggcgaaaacgaaacctttgtgatgcggctgaccgtggctgaaggcaaaacagataatcagtacacactcttcgttgccggcggaaccgtgctgctcctgctctttgtgattagcatcacaacgattatcgtcatcttcctcaaccgcaggcggagaagagagaggcgcgatctgttcaccgagtcttgggatacacagaaagctccgaacaactatcggagccctatctccaccggacagcccacaaatcagtctatggacgacacacgcgaggacatctatgtcaattaccccactttttctaggcggcctaagaccagagtg

SEQ ID NO: 1483 - DNA, 954 bp, Artificial Sequence
  Synthetic Polynucleotide
gaagaagtgctctggcataccagcgtgccatttgccgagaatatgtcccttgagtgtgtgtacccctctatggggattctgacccaagtcgagtggtttaagattgggacgcagcaagacagcattgccatcttctctccaactcacggaatggttattcggaagccctatgccgagagagtctatttcctgaactctacgatggcaagcaacaatatgacgctgttttttcggaacgcctccgaggatgatgtggggtactattcctgtagcctgtacacctatccacaaggcacatggcaaaaagtcattcaagtggtccagtccgactccttcgaggccgcagttccaagcaactcccacatcgttagcgagcctgggaagaatgtcacactgacctgtcagccccaaatgacatggcccgtccaagctgtccgctgggagaaaattcagccaagacagattgatctcctcacctactgtaacctggttcatggccggaatttcacctccaagtttccacggcagattgtcagcaactgtagccacggacgttggagtgtcattgtgattccagacgtgacagtgtctgactccgggctgtacagatgctatctgcaagccagcgcaggcgaaaacgaaacctttgtgatgcggctgaccgtggctgaaggcaaaacagataatcagtacacactcttcgttgccggcggaaccgtgctgctcctgctctttgtgattagcatcacaacgattatcgtcatcttcctcaaccgcaggcggagaagagagaggcgcgatctgttcaccgagtcttgggatacacagaaagctccgaacaactatcggagccctatctccaccggacagcccacaaatcagtctatggacgacacacgcgaggacatctatgtcaattaccccactttttctaggcggcctaagaccagagtg

SEQ ID NO: 1484 - DNA, 954 bp, Artificial Sequence
  Synthetic Polynucleotide
gccgctctgggcaaagacacaatcccttggctgggccatctgcttgtgggactgtctggcgctttcggcttcatcatcctggtgtacctgctcatcaactgccggaacaccggaccttggctgaagaaagtgctgaagtgcaacacccctgatccgagcaagttctttagccagctgagcagcgagcatggcggcgacgttcagaaatggctgtctagcccatttcctagcagcagcttcagccctggtggactggcccctgagattagccctctggaagtgctggaacgggacaaagtgacccagctgctcctccagcaggataaggtgccagaacctgccagcctgtccagcaatcacagcctgaccagctgctttaccaaccagggctacttcttcttccatctgcctgacgcactggaaatcgaagcctgccaggtgtacttcacctacgatccctacagcgaagaggaccccgatgaaggtgttgccggtgctcctaccggaagctctcctcaacctctccaacctctgagcggcgaggatgacgcctactgcacattccccagcagagatgacctgctgctgttcagcccttctctgctcggtggaccttctccaccttctacagcacctggcggatctggcgctggcgaggaaagaatgcctccatctctgcaagagcgggtgcccagagattgggaccctcaaccacttggccctccaacacctggtgtccccgacctggttgatttccagcctcctcctgaactggtgctgagagaagccggcgaagaagtgccagacgccggacctagagagggcgttagctttccttggagcagacctcctggacaaggcgagttcagagccctgaatgccagactgcctctgaacaccgatgcctacctgagtctgcaagaactgcaaggacaggaccccactcacctggtt

SEQ ID NO: 1485 - DNA, 348 bp, Artificial Sequence
  Synthetic Polynucleotide
aaccccttcctgttcgccctggaagccgtggttatcagcgtgggctctatgggcctgattatctccctgctgtgcgtgtacttctggctggaacggaccatgccaagaatccccacactgaagaaccttgaggacctggtcaccgagtaccacggcaacttttctgcttggagcggcgtgtccaaaggactggccgaatctctccagcctgactacagcgagagactgtgcctggtgtctgagatccctcctaaaggcggagccctcggagaaggacctggcgcttctccatgtaaccagcacagcccttactgggctcctccttgctacaccctgaagcctgagaca

SEQ ID NO: 1486 - DNA, 324 bp, Artificial Sequence; identical to SEQ ID NO: 1371
  Synthetic Polynucleotide

SEQ ID NO: 1487 - DNA, 324 bp, Artificial Sequence; identical to SEQ ID NO: 1377
  Synthetic Polynucleotide

SEQ ID NO: 1488 - DNA, 297 bp, Artificial Sequence; identical to SEQ ID NO: 1384
  Synthetic Polynucleotide

SEQ ID NO: 1489 - DNA, 189 bp, Artificial Sequence; identical to SEQ ID NO: 1387
  Synthetic Polynucleotide

SEQ ID NO: 1490 - DNA, 291 bp, Artificial Sequence; identical to SEQ ID NO: 1399
  Synthetic Polynucleotide

SEQ ID NO: 1491 - DNA, 249 bp, Artificial Sequence; identical to SEQ ID NO: 1401
  Synthetic Polynucleotide

SEQ ID NO: 1492 - DNA, 570 bp, Artificial Sequence
  Synthetic Polynucleotide
cagcagcagacactgcccaagcctttcatttgggccgagcctcacttcatggtgcccaaagaaaagcaagtgaccatctgctgccagggcaactacggcgctgtggaataccagctgcacttcgagggaagcctgttcgccgtggacagacctaagcctcctgagcggatcaacaaggtgcagttctacatccccgacatgaacagccggatggccggacagtacagctgcatctatagagtgggcgagctttggagcgagcccagcaatctgctggatctggtggtcaccgagatgtacgacacccctacactgagcgtgcaccccggacctgaagtgatctctggcgagaaagtgaccttctactgtcggctggataccgccaccagcatgtttctgctgctcaaagaaggccggtccagccacgtgcagcgcggatatggaaaagtgcaggccgagtttcccctgggacctgtgacaacagcccacagaggcacctacagatgcttcggcagctacaacaaccacgcttggagcttccctagcgagcccgtgaagttgcttgtgacc

SEQ ID NO: 1493 - DNA, 291 bp, Artificial Sequence; identical to SEQ ID NO: 1409
  Synthetic Polynucleotide

SEQ ID NO: 1494 - DNA, 249 bp, Artificial Sequence; identical to SEQ ID NO: 1411
  Synthetic Polynucleotide

SEQ ID NO: 1495 - DNA, 570 bp, Artificial Sequence
  Synthetic Polynucleotide
caacaacagaccctgcctaaaccattcatctgggctgaaccccactttatggttccgaaagagaaacaagtcacgatttgttgccaagggaattacggggccgtcgagtatcagctccactttgagggctccctgtttgctgtggatcggcccaagccacctgaaagaatcaacaaagtccaattctatattcctgatatgaactcccgcatggcaggccagtattcatgtatctaccgcgtgggagaactttggagtgaaccctctaacctgctggacctcgtcgtgacagagatgtatgatacacccacactgtctgtgcaccctgggccagaagttatcagcggagaaaaagttaccttttattgccgcctcgataccgctacctctatgttcctcttgctgaaagagggccgcagctctcacgtgcagcgaggctacggaaaggtccaagctgagtttcctctcggccccgtgaccaccgctcacaggggcacatatagatgttttggctcttataacaatcatgcctggtcattcccatccgagcctgtgaaactgctggtcaca

SEQ ID NO: 1496 - DNA, 267 bp, Artificial Sequence; identical to SEQ ID NO: 1442
  Synthetic Polynucleotide

SEQ ID NO: 1497 - DNA, 252 bp, Artificial Sequence; identical to SEQ ID NO: 1443
  Synthetic Polynucleotide

SEQ ID NO: 1498 - DNA, 210 bp, Artificial Sequence; identical to SEQ ID NO: 1445
  Synthetic Polynucleotide

SEQ ID NO: 1499 - DNA, 519 bp, Artificial Sequence
  Synthetic Polynucleotide
ggcatgcggactgaagacctcccaaaggctgtggtgttcctggagcctcaatggtacagggtgctggagaaggacagtgtgactctgaagtgccagggagcctactcccctgaggacaattccacacagtggtttcacaatgagagcctcatctcaagccaggcctccagctacttcattgacgctgccacagtggacgacagtggagagtacaggtgccagacaaacctctccaccctcagtgacccggtgcagctagaagtccatatcggctggctgttgctccaggcccctcggtgggtgttcaaggaggaagaccctattcacctgaggtgtcacagctggaagaacactgctctgcataaggtcacatatttacagaatggcaaaggcaggaagtattttcatcataattctgacttctacattccaaaagccacactcaaagacagcggctcctacttctgcagggggcttgttgggagtaaaaatgtgtcttcagagactgtgaacatcacc

SEQ ID NO: 1500 - DNA, 267 bp, Artificial Sequence; identical to SEQ ID NO: 1452
  Synthetic Polynucleotide

SEQ ID NO: 1501 - DNA, 252 bp, Artificial Sequence; identical to SEQ ID NO: 1453
  Synthetic Polynucleotide

SEQ ID NO: 1502 - DNA, 42 bp, Artificial Sequence; identical to SEQ ID NO: 1454
  Synthetic Polynucleotide

SEQ ID NO: 1503 - DNA, 210 bp, Artificial Sequence; identical to SEQ ID NO: 1455
  Synthetic Polynucleotide

SEQ ID NO: 1504 - DNA, 519 bp, Artificial Sequence
  Synthetic Polynucleotide
ggaatgaggactgaggatcttcccaaagctgtcgtctttctcgaaccccaatggtatcgggtgctcgaaaaagactctgtgacactgaaatgccaaggggcctactctcccgaggacaactccacacagtggtttcataatgagtccctcatcagctctcaggccagctcttatttcattgatgccgctacagtggacgactccggcgagtatcggtgtcagaccaatctgtctacactgtctgaccccgtgcagcttgaggtccacattggatggttgctcttgcaagccccacgctgggttttcaaagaggaagatccaatccatctgcggtgccacagctggaaaaacaccgctctccacaaagtcacatacctgcaaaatggcaaaggacgcaaatacttccatcacaattccgatttttacattccgaaggctaccctgaaagacagcggcagctatttctgccggggactcgtcggctccaagaatgtgtcctccgaaaccgtgaatatcacg

SEQ ID NO: 1505 - DNA, 267 bp, Artificial Sequence; identical to SEQ ID NO: 1462
  Synthetic Polynucleotide

SEQ ID NO: 1506 - DNA, 252 bp, Artificial Sequence; identical to SEQ ID NO: 1463
  Synthetic Polynucleotide

SEQ ID NO: 1507 - DNA, 42 bp, Artificial Sequence; identical to SEQ ID NO: 1464
  Synthetic Polynucleotide

SEQ ID NO: 1508 - DNA, 210 bp, Artificial Sequence; identical to SEQ ID NO: 1465
  Synthetic Polynucleotide

SEQ ID NO: 1509 - DNA, 519 bp, Artificial Sequence
  Synthetic Polynucleotide
ggcatgagaaccgaggacctgcctaaggccgtggtgttcctggaaccccagtggtacagagtgctggaaaaggacagcgtgaccctgaagtgccagggcgcctacagccccgaggacaatagcacccagtggttccacaacgagagcctgatctccagccaggccagcagctacttcatcgacgccgccaccgtggacgacagcggcgagtatagatgccagaccaacctgagcaccctgagcgaccccgtgcagctggaagtgcacatcggatggctgctgctgcaggcccccagatgggtgttcaaagaagaggaccccatccacctgagatgccactcttggaagaacaccgccctgcacaaagtgacctacctgcagaacggcaagggcagaaagtacttccaccacaacagcgacttctacatccccaaggccaccctgaaggactccggctcctacttctgcagaggcctcgtgggcagcaagaacgtgtccagcgagacagtgaacatcacc

SEQ ID NO: 1510 - DNA, 15 bp, Artificial Sequence
  Synthetic Polynucleotide
ctgggagagcctcag

SEQ ID NO: 1511 - DNA, 15 bp, Artificial Sequence
  Synthetic Polynucleotide
ctcggagaaccacag

SEQ ID NO: 1512 - DNA, 90 bp, Artificial Sequence; identical to SEQ ID NO: 1088
  Synthetic Polynucleotide

SEQ ID NO: 1513 - DNA, 90 bp, Artificial Sequence; identical to SEQ ID NO: 1094
  Synthetic Polynucleotide

SEQ ID NO: 1514 - DNA, 90 bp, Artificial Sequence; identical to SEQ ID NO: 1353
  Synthetic Polynucleotide

SEQ ID NO: 1515 - DNA, 90 bp, Artificial Sequence; identical to SEQ ID NO: 1354
  Synthetic Polynucleotide

SEQ ID NO: 1516 - DNA, 78 bp, Artificial Sequence
  Synthetic Polynucleotide
ctgggagagcctcagctgtgctatatcctggacgccatcctgtttctgtacggcatcgtgctgaccctgctgtactgc

SEQ ID NO: 1517 - DNA, 78 bp, Artificial Sequence
  Synthetic Polynucleotide
ctcggagaaccacagctctgttacattctggatgctatcctgttcctctatgggatcgtcctgacactcctgtattgc

SEQ ID NO: 1518 - DNA, 78 bp, Artificial Sequence
  Synthetic Polynucleotide
ctgggagagcctcagctgagctatatcctggacgccatcctgtttctgtacggcatcgtgctgaccctgctgtactgc

SEQ ID NO: 1519 - DNA, 78 bp, Artificial Sequence
  Synthetic Polynucleotide
ctcggagaaccacagctctcttacattctggatgctatcctgttcctctatgggatcgtcctgacactcctgtattgc

SEQ ID NO: 1520 - DNA, 63 bp, Artificial Sequence; identical to SEQ ID NO: 1373
  Synthetic Polynucleotide

SEQ ID NO: 1521 - DNA, 63 bp, Artificial Sequence; identical to SEQ ID NO: 1379
  Synthetic Polynucleotide

SEQ ID NO: 1522 - DNA, 63 bp, Artificial Sequence; identical to SEQ ID NO: 1386
  Synthetic Polynucleotide

SEQ ID NO: 1523 - DNA, 63 bp, Artificial Sequence; identical to SEQ ID NO: 1393
  Synthetic Polynucleotide

SEQ ID NO: 1524 - DNA, 63 bp, Artificial Sequence; identical to SEQ ID NO: 1403
  Synthetic Polynucleotide

SEQ ID NO: 1525 - DNA, 63 bp, Artificial Sequence; identical to SEQ ID NO: 1413
  Synthetic Polynucleotide

SEQ ID NO: 1526 - DNA, 93 bp, Artificial Sequence; identical to SEQ ID NO: 1432
  Synthetic Polynucleotide

SEQ ID NO: 1527 - DNA, 93 bp, Artificial Sequence; identical to SEQ ID NO: 1436
  Synthetic Polynucleotide

SEQ ID NO: 1528 - DNA, 69 bp, Artificial Sequence; identical to SEQ ID NO: 1447
  Synthetic Polynucleotide

SEQ ID NO: 1529 - DNA, 69 bp, Artificial Sequence; identical to SEQ ID NO: 1457
  Synthetic Polynucleotide

SEQ ID NO: 1530 - DNA, 69 bp, Artificial Sequence; identical to SEQ ID NO: 1467
  Synthetic Polynucleotide

SEQ ID NO: 1531 - DNA, 63 bp, Artificial Sequence; identical to SEQ ID NO: 1474
  Synthetic Polynucleotide

SEQ ID NO: 1532 - DNA, 63 bp, Artificial Sequence
  Synthetic Polynucleotide
ctgagctatatcctggacgccatcctgtttctgtacggcatcgtgctgaccctgctgtactgc

SEQ ID NO: 1533 - DNA, 63 bp, Artificial Sequence
  Synthetic Polynucleotide
ctctgttacattctggatgctatcctgttcctctatgggatcgtcctgacactcctgtattgc

SEQ ID NO: 1534 - DNA, 60 bp, Artificial Sequence; identical to SEQ ID NO: 1191
  Synthetic Polynucleotide

SEQ ID NO: 1535 - DNA, 27 bp, Artificial Sequence
  Synthetic Polynucleotide
gtggaaaaagagcaccctcagctcgga

SEQ ID NO: 1536 - DNA, 27 bp, Artificial Sequence
  Synthetic Polynucleotide
gtcgagaaagaacatccacagcttggc

SEQ ID NO: 1537 - DNA, 216 bp, Artificial Sequence; identical to SEQ ID NO: 1385
  Synthetic Polynucleotide

SEQ ID NO: 1538 - DNA, 216 bp, Artificial Sequence; identical to SEQ ID NO: 1392
  Synthetic Polynucleotide

SEQ ID NO: 1539 - DNA, 141 bp, Artificial Sequence; identical to SEQ ID NO: 1402
  Synthetic Polynucleotide

SEQ ID NO: 1540 - DNA, 141 bp, Artificial Sequence; identical to SEQ ID NO: 1412
  Synthetic Polynucleotide

SEQ ID NO: 1541 - DNA, 144 bp, Artificial Sequence; identical to SEQ ID NO: 1431
  Synthetic Polynucleotide

SEQ ID NO: 1542 - DNA, 144 bp, Artificial Sequence; identical to SEQ ID NO: 1435
  Synthetic Polynucleotide

SEQ ID NO: 1543 - DNA, 144 bp, Artificial Sequence; identical to SEQ ID NO: 1439
  Synthetic Polynucleotide

SEQ ID NO: 1544 - DNA, 144 bp, Artificial Sequence; identical to SEQ ID NO: 1441
  Synthetic Polynucleotide

SEQ ID NO: 1545 - DNA, 51 bp, Artificial Sequence; identical to SEQ ID NO: 1446
  Synthetic Polynucleotide

SEQ ID NO: 1546 - DNA, 51 bp, Artificial Sequence; identical to SEQ ID NO: 1456
  Synthetic Polynucleotide

SEQ ID NO: 1547 - DNA, 51 bp, Artificial Sequence; identical to SEQ ID NO: 1466
  Synthetic Polynucleotide

SEQ ID NO: 1548 - DNA, 45 bp, Artificial Sequence; identical to SEQ ID NO: 1473
  Synthetic Polynucleotide

SEQ ID NO: 1549 - DNA, 30 bp, Artificial Sequence; identical to SEQ ID NO: 1185
  Synthetic Polynucleotide

SEQ ID NO: 1550 - DNA, 136 bp, Artificial Sequence; identical to SEQ ID NO: 1374
  Synthetic Polynucleotide

SEQ ID NO: 1551 - DNA, 135 bp, Artificial Sequence; identical to SEQ ID NO: 1380
  Synthetic Polynucleotide

SEQ ID NO: 1552 - DNA, 189 bp, Artificial Sequence; identical to SEQ ID NO: 1387
  Synthetic Polynucleotide

SEQ ID NO: 1553 - DNA, 189 bp, Artificial Sequence; identical to SEQ ID NO: 1394
  Synthetic Polynucleotide

SEQ ID NO: 1554 - DNA, 75 bp, Artificial Sequence; identical to SEQ ID NO: 1404
  Synthetic Polynucleotide

SEQ ID NO: 1555 - DNA, 75 bp, Artificial Sequence; identical to SEQ ID NO: 1414
  Synthetic Polynucleotide

SEQ ID NO: 1556 - DNA, 75 bp, Artificial Sequence; identical to SEQ ID NO: 1448
  Synthetic Polynucleotide

SEQ ID NO: 1557 - DNA, 75 bp, Artificial Sequence; identical to SEQ ID NO: 1458
  Synthetic Polynucleotide

SEQ ID NO: 1558 - DNA, 75 bp, Artificial Sequence; identical to SEQ ID NO: 1468
  Synthetic Polynucleotide

SEQ ID NO: 1559 - DNA, 183 bp, Artificial Sequence; identical to SEQ ID NO: 1475
  Synthetic Polynucleotide

SEQ ID NO: 1560 - DNA, 126 bp, Artificial Sequence
  Synthetic Polynucleotide
cggctgaagatccaagtgcggaaggccgccatcaccagctacgagaaatccgacggcgtgtacaccggcctgagcaccagaaatcaagagacatacgagacactgaagcacgaaaagcctccacaa

SEQ ID NO: 1561 - DNA, 126 bp, Artificial Sequence
  Synthetic Polynucleotide
agactcaaaattcaagttcgcaaagccgccattacctcttacgagaagagtgatggggtgtacacaggactgtctacccggaatcaagaaacctacgaaaccctcaaacatgagaagccacctcag

SEQ ID NO: 1562 - DNA, 339 bp, Artificial Sequence; identical to SEQ ID NO: 1095
  Synthetic Polynucleotide

SEQ ID NO: 1563 - DNA, 339 bp, Artificial Sequence
  Synthetic Polynucleotide
agagtgaagttcagcagaagcgccgacgcccctgcctaccagcagggacagaaccaactgtacaacgagctgaacctgggcagacgggaagagtacgacgtgctggacaagcggagaggcagggaccctgagatgggcggaaagccccagcggagaaagaacccccaggaaggactgtataacgaactccagaaagacaagatggccgaagcctacagcgagatcggcatgaagggcgagcggagaagaggcaagggccacgatggcctgtaccagggcctgagcaccgccaccaaggacacctatgacgccctgcacatgcaggccctgcctccaaga

SEQ ID NO: 1564 - DNA, 339 bp, Artificial Sequence; identical to SEQ ID NO: 1095
  Synthetic Polynucleotide

SEQ ID NO: 1565 - DNA, 108 bp, Artificial Sequence; identical to SEQ ID NO: 1355
  Synthetic Polynucleotide

SEQ ID NO: 1566 - DNA, 108 bp, Artificial Sequence; identical to SEQ ID NO: 1356
  Synthetic Polynucleotide

SEQ ID NO: 1567 - DNA, 360 bp, Artificial Sequence; identical to SEQ ID NO: 1427
  Synthetic Polynucleotide

SEQ ID NO: 1568 - DNA, 360 bp, Artificial Sequence; identical to SEQ ID NO: 1429
  Synthetic Polynucleotide

SEQ ID NO: 1569 - DNA, 123 bp, Artificial Sequence; identical to SEQ ID NO: 1091
  Synthetic Polynucleotide

SEQ ID NO: 1570 - DNA, 126 bp, Artificial Sequence; identical to SEQ ID NO: 1092
  Synthetic Polynucleotide

SEQ ID NO: 1571 - DNA, 123 bp, Artificial Sequence; identical to SEQ ID NO: 1097
  Synthetic Polynucleotide

SEQ ID NO: 1572 - DNA, 126 bp, Artificial Sequence; identical to SEQ ID NO: 1098
  Synthetic Polynucleotide

SEQ ID NO: 1573 - DNA, 696 bp, Artificial Sequence
  Synthetic Polynucleotide
ctgcaagacccttgctctaattgccctgccggcaccttctgcgacaacaaccggaaccagatttgctccccttgtcctcctaacagcttcagctctgccggcggacagagaacctgcgacatctgtagacagtgcaagggcgtgttcagaacccggaaagagtgcagcagcacctccaacgccgagtgcgattgcacacctggcttccattgtctcggagccggctgttctatgtgcgagcaggattgcaagcagggccaagagctgaccaagaagggctgcaaggattgctgcttcggcacctttaacgaccagaagagaggcatctgccggccttggaccaactgtagcctggatggcaagagcgtgctggtcaacggcaccaaagaacgggatgtcgtgtgcggaccttctccagccgatttgtctcctggcgcttctagcgtgacacctcctgctccagctagagagcctggacacagccctcagatcatctcattctttctggccctgacctctacagccctgctgtttctgctgttcttcctgacactgcggttcagcgtggtcaagcggggcagaaagaagctgctgtacatcttcaagcagcctttcatgcggcccgtgcagaccacacaagaagaggacggctgctcctgtcggttccccgaggaagaggaaggcggttgcgaactt

SEQ ID NO: 1574 - DNA, 696 bp, Artificial Sequence
  Synthetic Polynucleotide
cttcaggacccttgcagcaactgtccagccggaaccttttgtgataacaacagaaatcagatatgcagcccctgtccgccaaactcctttagcagtgctggcggccagcggacatgtgacatttgtcggcagtgcaaaggggttttccgcaccagaaaagagtgctcctccaccagcaatgccgagtgtgactgtaccccaggctttcactgtctcggcgctggatgtagcatgtgtgaacaggactgtaaacaggggcaagaactcacgaagaaagggtgcaaagactgctgttttgggacgttcaacgatcagaagcggggaatctgtaggccctggacaaactgttctctggacggcaagtccgtgctcgtgaatggaacaaaagagcgggacgttgtctgcggcccaagtcctgctgatcttagcccaggcgcttcctctgtgactcctccagctcctgcacgcgaacctggacactctccccagatcatctcattttttctcgctctcacatcaaccgctttgctgttcctgctcttttttctcaccctccggttctccgtggttaagagaggccggaaaaaactcctctatatctttaaacagccctttatgcgcccggtccaaacaacccaagaggaagatggctgctcttgcagattcccggaagaggaagaaggcggctgcgagctg

SEQ ID NO: 1575 - DNA, 606 bp, Artificial Sequence
  Synthetic Polynucleotide
aacaagatcctggtcaagcagagccctatgctggtggcctacgacaacgccgtgaacctgagctgcaagtacagctacaacctgttcagcagagagttccgggccagcctgcacaaaggactggattctgctgtggaagtgtgcgtggtgtacggcaactacagccagcagctccaggtgtacagcaagaccggcttcaactgcgacggcaagctgggcaatgagagcgtgaccttctacctgcaaaacctgtacgtgaaccagaccgacatctatttctgcaagatcgaagtgatgtacccgcctccttacctggacaacgagaagtccaacggcaccatcatccacgtgaagggcaagcacctgtgtccttctccactgttccccggacctagcaagcctttctgggtgctcgttgttgttggcggcgtgctggcctgttatagcctgctggttaccgtggccttcatcatcttttgggtccgaagcaagcggagccggctgctgcacagcgactacatgaacatgacccctagacggcccggaccaaccagaaagcactaccagccttacgctcctcctagagacttcgccgcctatagaagt

SEQ ID NO: 1576 - DNA, 606 bp, Artificial Sequence
  Synthetic Polynucleotide
aacaaaattcttgtgaagcagtccccaatgctcgtcgcctatgataatgccgtgaatctgtcctgcaaatactcctacaatctgtttagccgcgagtttagggcctcactgcacaagggccttgacagcgccgtggaagtctgtgtggtctatggaaattactcccagcaactgcaagtgtactctaagacggggttcaactgtgatggaaaactgggaaacgagtccgtgacgttttacctccaaaatctctatgtcaatcaaacggacatctatttctgcaaaattgaagtcatgtatcctccgccgtacctcgataacgagaaaagcaatgggacgatcattcacgtcaagggaaaacatctctgccccagtcctctgttccctgggccttccaaaccattttgggttctcgtcgtcgtcggcggagtcctggcttgttattctctgcttgtgacagtcgcctttatcatattctgggtccgctccaagagaagcagactgctccactccgattatatgaatatgacacccaggcggccagggcctacacggaaacactatcaaccctacgctccacctcgggatttcgctgcctacagatca

SEQ ID NO: 1577 - DNA, 747 bp, Artificial Sequence
  Synthetic Polynucleotide
ctgcattgcgtgggcgacacataccccagcaacgacagatgctgccacgaatgcagacccggcaatggcatggtgtccagatgcagcagatcccagaacaccgtgtgcagaccttgcggccctggcttctacaacgacgtggtgtctagcaagccctgcaagccttgcacctggtgtaacctgagaagcggcagcgagagaaagcagctgtgtaccgccacacaggataccgtgtgccggtgtagagctggcacacagcctctggacagctacaaacctggcgtggactgtgccccttgtcctcctggacactttagccctggcgacaaccaggcttgcaaaccctggaccaactgtaccctggccggcaagcacacactgcaacctgccagcaatagcagcgacgccatctgcgaggacagagatcctcctgccacacagccccaagagacacaaggacctccagccagacctatcaccgtgcagcctacagaagcctggcctagaacaagccagggacctagcaccagacctgtggaagttcctggtggcagagccgtggccgccattcttggtcttggactggtgctgggactgctcggacctctggctattctgctggccctgtacctgctgagaagggaccaaagactgcctcctgacgctcacaaacctccaggcggaggcagcttcagaacccctatccaagaggaacaggctgacgcccacagcaccctggcaaaaatt

SEQ ID NO: 1578 - DNA, 747 bp, Artificial Sequence
  Synthetic Polynucleotide
ctgcactgtgtcggcgacacctatccatccaacgatcggtgctgccatgagtgccggcctggcaacggaatggtgtctcgatgttctcggagtcagaataccgtctgtaggccatgcggacccggcttttacaatgatgtcgtgtcctccaaaccttgcaagccatgtacttggtgcaatctgcggagcggctctgagcggaaacagctgtgcactgctacccaggacacagtgtgtagatgcagagccggaactcagcccctggactcttataagcccggcgttgactgcgctccatgtccaccagggcacttttccccaggcgacaatcaagcctgtaaaccgtggacaaattgcacactggccgggaaacacaccttgcagccagccagcaattcctccgatgccatctgtgaagatcgggacccaccagccactcagcctcaagaaactcaggggcctcctgctaggcccattacagtgcaacctaccgaggcttggccccggacatctcagggaccttctacaaggccagtggaagtgccaggcggtagagctgtggctgctatccttggattgggcctcgttctcggactgttgggaccacttgcaatcctgctggctctctatctgctgcggcgggatcagagactccctccagatgctcataagccacctggcggcggatctttcaggaccccaattcaagaagaacaagccgacgctcactctaccctggctaagatc

SEQ ID NO: 1579 - DNA, 1038 bp, Artificial Sequence
  Synthetic Polynucleotide
aagggctgtcagggctctgccgatcacgtggtgtctatcagcggagtgcctctccagctccagcctaacagcatccagaccaaggtggactctatcgcctggaagaagctgctgcccagccagaatggcttccaccacatcctgaagtgggagaacggcagcctgcctagcaacaccagcaacgacagattcagcttcatcgtgaagaacctgagcctgctgattaaggccgctcagcagcaggatagcggcctgtactgtctggaagtgaccagcatcagcggcaaggtgcagaccgccacctttcaggtgttcgtgttcgacaaggtggaaaagccccggctgcaaggccagggcaagatccttgatagaggcagatgccaggtggccctgagctgtctggtttccagagatggcaacgtgtcctacgcctggtacagaggcagcaagctgatccagacagccggcaacctgacctacctggacgaggaagtggacatcaacggcacccacacctacacctgtaatgtgtctaaccccgtgtcctgggagagccacacactgaatctgacccaggactgccagaacgcccaccaagagttcagattctggcccttcctggtcatcatcgtgatcctgagcgccctgttcctgggcaccctggcctgtttttgcgtgtggcgcagaaagcgcaaagagaagcagagcgagacaagccccaaagagttcctgaccatctacgaggacgtgaaggatctgaaaacccggcggaaccacgaacaagagcagacctttcctggcggcggaagcaccatctacagcatgatccagagccagagcagcgcccctacaagccaagagccagcctacacactgtactccctgatccagcctagcagaaagagcggcagccggaagagaaatcacagccccagcttcaacagcacgatctacgaagtgatcggaaagtcccagcctaaggctcagaaccccgccagactgagccggaaagagctggaaaacttcgacgtgtacagc

SEQ ID NO: 1580 - DNA, 1038 bp, Artificial Sequence
  Synthetic Polynucleotide
aaaggatgccagggaagcgccgaccatgtggtgtcaatttctggcgtgcccctgcaactccagccaaactctattcagaccaaagtcgatagcattgcctggaaaaaattgctgccctctcagaacgggtttcaccacattctcaaatgggaaaatggctctctgccctccaacacctccaacgatcggtttagctttatcgtcaagaatctgtccctgctcatcaaagcagcccagcagcaagactccggcctgtattgcctcgaagtcacctccatctccgggaaagtgcagacagctacattccaagtgttcgtctttgataaggtcgagaagcctagactccaaggacaggggaagattctggacagaggacggtgtcaggtggcactgtcttgccttgtcagccgcgacggcaatgtgtcttatgcttggtatcggggctccaagctgattcaaaccgctgggaatctgacatacctcgatgaagaggttgacatcaatgggacgcacacgtatacttgcaatgtctccaatcctgtcagctgggagtctcataccctgaacctgacacaggattgtcaaaatgcacatcaagagttccggttttggccgtttcttgtgattatcgtgattctgtctgccctcttcctcggaactctggcttgcttctgtgtctggcggcgcaaacggaaagagaaacagtctgagacttccccgaaagagtttctcacgatatacgaagatgtcaaggacctcaagacccgccgcaaccatgagcaagaacagacattcccaggcggaggctccacaatctactccatgattcagtcccagtctagcgccccaacctctcaagagcctgcttataccctgtacagtctgattcagccctccagaaagtccggctctcggaagaggaaccactctcctagcttcaactccaccatatatgaagtcattggcaagtctcagcccaaagcacagaatcctgccaggctgagcagaaaagaacttgagaatttcgacgtctactcc

SEQ ID NO: 1581 - DNA, 804 bp, Artificial Sequence
  Synthetic Polynucleotide
acaccagccgctcctccaaaggccgtgctgaaactggaaccccagtggatcaacgtgctgcaagaggacagcgtgaccctgacctgtagaggcacacacagccctgagagcgacagcatccagtggttccacaacggcaatctgatccccacacacacccagcctagctacagattcaaggccaacaacaacgacagcggcgagtacacctgtcagaccggccagacaagcctgagcgatcctgtgcatctgaccgtgctgtctgagtggctggtgctgcagacaccccacctggaatttcaagagggcgagacaatcgtgctgcggtgccacagctggaaggacaagcctctggtcaaagtgacattcttccagaacgggaagtccaagaagttcagcagaagcgaccccaacttcagcatccctcaggccaatcacagccactccggcgattaccactgcaccggcaatatcggctacaccctgtacagcagcaagcccgtgaccatcacagtgcaggcccctagcagtagccctatgggaatcatcgtggccgtggtcacaggcattgccgtggctgctattgtggctgcagtggtggccctgatctactgccggaagaagagaatctctgccctgcctggctaccccgagtgtagagagatgggagagacactgcccgagaagcccgccaatcctaccaatcctgacgaggccgacaaagtgggagccgagaacaccatcacctacagcctgctgatgcaccccgacgcactggaagaacccgacgaccagaatagaatc

SEQ ID NO: 1582 - DNA, 804 bp, Artificial Sequence
  Synthetic Polynucleotide
actccagctgctccacctaaagctgtcctgaagctcgaacctcaatggattaacgtcctccaagaagattctgtcaccctgacatgccggggcacccactctccagagtctgattccattcagtggtttcataatgggaacctgattccgactcacacgcagcccagctatcggtttaaagctaacaacaatgactccggggagtatacttgccagacaggacagaccagcctgtctgacccagtgcacctgacagttctgagcgaatggctcgtcctgcagacccctcatcttgagttccaagagggcgaaaccattgtcctgagatgccactcctggaaagataagccccttgtgaaagtcacattttttcagaatggcaagagcaagaagttttctcggagcgatccgaatttcagtattccccaggccaaccactctcacagcggagactatcactgtacaggcaacatcgggtatacactctacagctctaagcccgtcacaattaccgttcaggctcccagcagctccccaatgggcattattgtggccgtcgtgaccggaattgctgtggccgcaatcgtggcagctgtcgtcgctctgatctattgcagaaagaagcggatcagcgccctgccagggtatcctgagtgccgcgaaatgggcgaaactctgcctgagaaacctgctaaccccacaaatcccgatgaagctgacaaagtcggcgctgaaaacacgatcacatactccctgctcatgcatcctgacgctcttgaggaacctgacgatcagaaccggatc

SEQ ID NO: 1583 - DNA, 1082 bp, Artificial Sequence
  Synthetic Polynucleotide
ggcaggtggtggataccaccaaggccgtgattaccctccagcctccttgggtgtccgtgttccaagaggaaaccgtgacactgcactgcgaggtgctgcatctgcctggctctagcagcacccagtggtttctgaatggcaccgccacacagaccagcacacccagctacagaatcaccagcgccagcgtgaacgacagcggcgagtacagatgccagagaggactgagcggcagaagcgaccccattcagctggaaatccacagaggctggctgctgctccaggtgtccagcagagtgtttacagagggcgagcccctggctctgagatgtcacgcctggaaggacaagctggtgtacaacgtgctgtactaccggaacggcaaagccttcaagttcttccactggaacagcaacctgaccatcctcaagaccaacatcagccacaacggcacctaccactgtagcggcatgggcaagcacagatacacaagcgccggcatcagcgtgaccgtgaaagagctgtttcccgctcctgtgctgaacgcctctgtgacaagtccactgctggaaggcaaccttgtgaccctgagctgcgagacaaagctgctgctgcaaagacctggcctccagctgtacttcagcttctacatgggcagcaagaccctgcggggcagaaataccagctccgagtaccagatcctgaccgccagaagagaggacagcggcctgtattggtgcgaagccgccaccgaggatggcaatgtgctgaagagaagccccgagctggaactccaggtgctgggactgcaactgcctacacctgtgtggttccacgtgctgttttacctggccgtgggcatcatgtttctggtcaacaccgtcctgtgggtcaccatcagaaaagagctgaagcggaagaagaagtgggacctcgaaatcagcctggactccggccacgaaaagaaagtgatctccagcctgcaagaggaccggcacctggaagaggaactgaagtgccaagagcagaaagaggaacagctgcaagaaggcgtgcaccgcaaagaacctcaaggcgctaca

SEQ ID NO: 1584 - DNA, 1080 bp, Artificial Sequence
  Synthetic Polynucleotide
caagtggtggacacaacaaaagccgtcatcaccctgcaaccaccttgggtttcagtctttcaagaagagacagttaccctgcactgtgaagtcctgcacttgcccggaagcagctccacacagtggttcctcaacggcacagctacccagacaagcaccccttcctaccggatcacatctgcctccgtgaacgattccggcgagtataggtgtcagaggggcctgtctggccgcagcgatcctatccagcttgagattcatcgtggatggttgctcctccaagtgtcctccagggtgttcaccgaaggcgaacctctggcactgaggtgccatgcttggaaagataagctcgtctacaatgtcctctactaccgcaatggcaaggcttttaagttttttcattggaactctaatctcacgatcctgaaaacgaacatctcccacaatgggacataccactgctctggcatgggaaaacatcggtacacctctgccggcatctctgtcacagtcaaagaactgttccctgcaccagtcctgaacgcttccgtgacctctccactgcttgagggaaatctggtcaccctgtcctgcgaaactaagttgctgcttcagaggcccggactccagctctacttttcattctatatgggctctaagaccctgagaggccggaacaccagcagcgaatatcagattctgacagctcggcgcgaggactccgggctctattggtgtgaagctgctacagaggacggaaacgtgctgaaacggtcccctgaactggaactgcaagtcctgggccttcagctgccaactccagtgtggtttcatgtcctgttctatctggctgtggggattatgttccttgtgaataccgtgctctgggttaccattcggaaagaactcaagcgcaagaaaaaatgggatcttgagataagcctggacagcgggcatgagaagaaagtcatcagttcccttcaagaggacagacatctcgaagaggaactcaaatgtcaagaacaaaaagaagaacaactccaagagggtgtccatcggaaagagccacagggcgctaca

SEQ ID NO: 1585 - DNA, 33 bp, Artificial Sequence
  Synthetic Polynucleotide
ggggggggggggggggggggggggggggggggg

SEQ ID NO: 1586 - DNA, 33 bp, Artificial Sequence; identical to SEQ ID NO: 1585
  Synthetic Polynucleotide

SEQ ID NO: 1587 - DNA, 33 bp, Artificial Sequence; identical to SEQ ID NO: 1585
  Synthetic Polynucleotide

SEQ ID NO: 1588 - DNA, 33 bp, Artificial Sequence; identical to SEQ ID NO: 1585
  Synthetic Polynucleotide

SEQ ID NO: 1589 - DNA, 33 bp, Artificial Sequence; identical to SEQ ID NO: 1585
  Synthetic Polynucleotide

SEQ ID NO: 1590 - DNA, 33 bp, Artificial Sequence; identical to SEQ ID NO: 1585
  Synthetic Polynucleotide

SEQ ID NO: 1591 - DNA, 33 bp, Artificial Sequence; identical to SEQ ID NO: 1585
  Synthetic Polynucleotide

SEQ ID NO: 1592 - DNA, 33 bp, Artificial Sequence; identical to SEQ ID NO: 1585
  Synthetic Polynucleotide

SEQ ID NO: 1593 - DNA, 33 bp, Artificial Sequence; identical to SEQ ID NO: 1585
  Synthetic Polynucleotide

SEQ ID NO: 1594 - DNA, 33 bp, Artificial Sequence; identical to SEQ ID NO: 1585
  Synthetic Polynucleotide

SEQ ID NO: 1595 - DNA, 33 bp, Artificial Sequence; identical to SEQ ID NO: 1585
  Synthetic Polynucleotide

SEQ ID NO: 1596 - DNA, 33 bp, Artificial Sequence; identical to SEQ ID NO: 1585
  Synthetic Polynucleotide

SEQ ID NO: 1597 - DNA, 33 bp, Artificial Sequence; identical to SEQ ID NO: 1585
  Synthetic Polynucleotide

SEQ ID NO: 1598 - DNA, 33 bp, Artificial Sequence; identical to SEQ ID NO: 1585
  Synthetic Polynucleotide

SEQ ID NO: 1599 - DNA, 33 bp, Artificial Sequence; identical to SEQ ID NO: 1585
  Synthetic Polynucleotide

SEQ ID NO: 1600 - DNA, 2712 bp, Artificial Sequence
  Synthetic Polynucleotide
atggccttaccagtgaccgccttgctcctgccgctggccttgctgctccacgccgccaggccggacatccagatgacacagagccctagcagcctgtctgccagcgtgggagacagagtgaccatcacatgcaaggccagcgaccacatcaacaactggctggcctggtatcagcagaagcctggacaggcccctaagctgctgatctacggcgctaccacactggaaacaggcgtgcccagcagattttctggcagcggctctggcaccgactacaccctgacaatatccagcctccagcctgaggacttcgccacctactactgtcagcagagctggaacaccccttggacattcggccagggcaccaagctggaaatcaagagactcgagctgtgggtttcacagcctccagagatcagaaccctggaaggcagcagcgccttcctgccttgcagcttcaatgcctctcagggcagactggctatcggcagcgtgacctggttcagagatgaggtggtgcccggcaaagaagtgcggaacggcacccctgagtttagaggaaggctggcccctctggcctccagcagatttctgcacgatcaccaggccgagctgcacatcagagatgtgcgaggacacgacgccagcatctacgtgtgcagagtggaagtgctcggcctcggagttggcacaggcaatggaacaagactggtggtggaaaaagagcaccctcagctcggagccggaacagtgctgcttctgagagccggcttttacgccgtgtcctttctgtctgtggccgtgggcagcaccgtgtactatcagggcaagtgcctgacctggaagggacctagaaggcaactgcctgctgtggtgcctgctcctttgcctcctccatgtggaagctctgcccatctgctgccacctgttccaggcggaagggccaagcgatctggatctggagcaacaaacttctcactactcaaacaagcaggtgacgtggaggagaatcccgggcctactagtatggactggatttggcgcatccttttccttgtcggcgctgctaccggcgcgcattccttcgaacaagttcagcttcaacagcctggcgctgagctggtcaaacctggcgcttctgtgaagatgagctgcaaagccagcggctacgccttcagcagctactggatcaactggatgaagcagaaacccggccagggactcgaatggatcggccaaatctatcccggcgacggcgacaccaactacaacggcaagttcaagggcagagccacactgaccgccgatacctctagcagcacagcctacatgcagctgagcagcctgaccagcgaagatagcgccgtgtacttctgtgcccggtccatcacaacagtcgtgggctgcgctatggactattggggccagggaacaagcgtgaccgtgtctagtacgcgtctgtgggtgtcccagccacctgaaattcggacactggaaggctcctccgcctttctgccctgtagctttaacgccagccaggggagactcgccatcggctctgtgacatggttccgggatgaagtcgtccctggaaaagaagttcgcaacggaacaccagagttcagaggcagactcgccccactggcaagctccagattcctgcatgaccatcaggctgaactgcacattagggacgtgcggggccacgatgcctccatctatgtgtgtcgggtcgaagtgcttggactcggcgtcggaactggaaacggcactaggctggtggtcgagaaagaacatccacagcttggcgctggcaccgtcctgttgcttagagccggattctatgccgtcagcttcctgtccgtggctgtggggtctacagtgtattaccagggaaaatgtctcacctggaaaggccccagacgccagcttccagctgttgttcctgctccactgccaccaccttgtggctcctctgctcacttgcttccaccagtgcctggcggacgcgccaagagaagcggatctggcgtgaagcagaccctgaatttcgacctgctgaagctggctggcgacgtggaatccaacccaggcccttctagaggccatatgaccgagtacaagcccacggtgcgcctcgccacccgcgacgacgtccccagggccgtacgcaccctcgccgccgcgttcgccgactaccccgccacgcgccacaccgtcgatccggaccgccacatcgagcgggtcaccgagctgcaagaactcttcctcacgcgcgtcgggctcgacatcggcaaggtgtgggtcgcggacgacggcgccgcggtggcggtctggaccacgccggagagcgtcgaagcgggggcggtgttcgccgagatcggcccgcgcatggccgagttgagcggttcccggctggccgcgcagcaacagatggaaggcctcctggcgccgcaccggcccaaggagcccgcgtggttcctggccaccgtcggcgtctcgcccgaccaccagggcaagggtctgggcagcgccgtcgtgctccccggagtggaggcggccgagcgcgccggggtgcccgccttcctggagacctccgcgccccgcaacctccccttctacgagcggctcggcttcaccgtcaccgccgacgtcgaggtgcccgaaggaccgcgcacctggtgcatgacccgcaagcccggtgcctga

SEQ ID NO: 1601 - DNA, 2874 bp, Artificial Sequence
  Synthetic Polynucleotide
atggccttaccagtgaccgccttgctcctgccgctggccttgctgctccacgccgccaggccggcatgcgaagtgcagctgcttgaaagtggcggcggactgattcagcctggcggatctctgagactgagctgtgccgccagcggcttcaccttttctagccacgccatgacctgggtccgacaggcacctggaaaagggcttgaatgggtgtccgccatcagcggctctggcgattacacacactacgccgacagcgtgaagggcagattcaccatcagcagagacaacagcaagaacaccgtgtacctccagatgaacagcctgagagccgaggacagcgccgtgtattattgcgccaaggatgaggatggcggcagcctgcttggacacagaggacaaggcaccctggtcaccgtttcttccggtaccggcggaggcggatctggcggcggaggtagcggtggcggaggatctgaattcggatctctcgagctgtgggtttcacagcctccagagatcagaaccctggaaggcagcagcgccttcctgccttgcagcttcaatgcctctcagggcagactggctatcggcagcgtgacctggttcagagatgaggtggtgcccggcaaagaagtgcggaacggcacccctgagtttagaggaaggctggcccctctggcctccagcagatttctgcacgatcaccaggccgagctgcacatcagagatgtgcgaggacacgacgccagcatctacgtgtgcagagtggaagtgctcggcctcggagttggcacaggcaatggaacaagactggtggtggaaaaagagcaccctcagctcggagccggaacagtgctgcttctgagagccggcttttacgccgtgtcctttctgtctgtggccgtgggcagcaccgtgtactatcagggcaagtgcctgacctggaagggacctagaaggcaactgcctgctgtggtgcctgctcctttgcctcctccatgtggaagctctgcccatctgctgccacctgttccaggcggaagggccaagcgatctggatctggagcaacaaacttctcactactcaaacaagcaggtgacgtggaggagaatcccgggcctactagtgccaccatggactggatttggcgcatccttttccttgtcggcgctgctaccggcgcccattccgggcccgaagtgcagctggttgaatctggcggaggactggttcaggctggcggatctctgagactgtcttgtgccgccagcggcagaacctttagcatgggctggtttagacaggcccctggcaaagagagagagttcgtcgccgccatcacatactctggcggcagcccttactacgccgactctgtgaagggcagattcaccatcagccgggacaacgccaagaacaccgtgtacctccagatgaacagcctgaagcctgaggacaccgccgtgtactactgcgccgccaatccaacatacggcagcgactggaacgccgagaattggggccagggaacccaagtgacagtgtctagcggatccggcggcggaggatctggcggaggcggatctgggggcggaggctctttcgaaggcagcacgcgtctgtgggtgtcccagccacctgaaattcggacactggaaggctcctccgcctttctgccctgtagctttaacgccagccaggggagactcgccatcggctctgtgacatggttccgggatgaagtcgtccctggaaaagaagttcgcaacggaacaccagagttcagaggcagactcgccccactggcaagctccagattcctgcatgaccatcaggctgaactgcacattagggacgtgcggggccacgatgcctccatctatgtgtgtcgggtcgaagtgcttggactcggcgtcggaactggaaacggcactaggctggtggtcgagaaagaacatccacagcttggcgctggcaccgtcctgttgcttagagccggattctatgccgtcagcttcctgtccgtggctgtggggtctacagtgtattaccagggaaaatgtctcacctggaaaggccccagacgccagcttccagctgttgttcctgctccactgccaccaccttgtggctcctctgctcacttgcttccaccagtgcctggcggacgcgccaagagaagcggatctggcgtgaagcagaccctgaatttcgacctgctgaagctggctggcgacgtggaatccaacccaggcccttctagaggccatatgaccgagtacaagcccacggtgcgcctcgccacccgcgacgacgtccccagggccgtacgcaccctcgccgccgcgttcgccgactaccccgccacgcgccacaccgtcgatccggaccgccacatcgagcgggtcaccgagctgcaagaactcttcctcacgcgcgtcgggctcgacatcggcaaggtgtgggtcgcggacgacggcgccgcggtggcggtctggaccacgccggagagcgtcgaagcgggggcggtgttcgccgagatcggcccgcgcatggccgagttgagcggttcccggctggccgcgcagcaacagatggaaggcctcctggcgccgcaccggcccaaggagcccgcgtggttcctggccaccgtcggcgtctcgcccgaccaccagggcaagggtctgggcagcgccgtcgtgctccccggagtggaggcggccgagcgcgccggggtgcccgccttcctggagacctccgcgccccgcaacctccccttctacgagcggctcggcttcaccgtcaccgccgacgtcgaggtgcccgaaggaccgcgcacctggtgcatgacccgcaagcccggtgcctga

SEQ ID NO: 1602 - DNA, 3324 bp, Artificial Sequence
  Synthetic Polynucleotide
atggccttaccagtgaccgccttgctcctgccgctggccttgctgctccacgccgccaggccggacatccagatgacacagagccctagcagcctgtctgccagcgtgggagacagagtgaccatcacatgcaaggccagcgaccacatcaacaactggctggcctggtatcagcagaagcctggacaggcccctaagctgctgatctacggcgctaccacactggaaacaggcgtgcccagcagattttctggcagcggctctggcaccgactacaccctgacaatatccagcctccagcctgaggacttcgccacctactactgtcagcagagctggaacaccccttggacattcggccagggcaccaagctggaaatcaagagactcgagggacagcctaaggccaatcctaccgtgacactgttccctccaagcagcgaagaactccaggccaacaaggccacacttgtgtgcctgatctccgacttctaccctggggctgtgacagtggcttggaaggccgatggatctcctgtgaaagccggcgtggaaaccaccaagccatccaagcagagcaacaacaaatacgccgccagctcctacctgagcctgacacctgagcagtggaagtcccacagatcctacagctgccaagtgacccacgaaggcagcaccgtggaaaagacagtggcccctacagagtgcagcggatccctgtgggtttcacagcctccagagatcagaaccctggaaggcagcagcgccttcctgccttgcagcttcaatgcctctcagggcagactggctatcggcagcgtgacctggttcagagatgaggtggtgcccggcaaagaagtgcggaacggcacccctgagtttagaggaaggctggcccctctggcctccagcagatttctgcacgatcaccaggccgagctgcacatcagagatgtgcgaggacacgacgccagcatctacgtgtgcagagtggaagtgctcggcctcggagttggcacaggcaatggaacaagactggtggtggaaaaagagcaccctcagctcggagccggaacagtgctgcttctgagagccggcttttacgccgtgtcctttctgtctgtggccgtgggcagcaccgtgtactatcagggcaagtgcctgacctggaagggacctagaaggcaactgcctgctgtggtgcctgctcctttgcctcctccatgtggaagctctgcccatctgctgccacctgttccaggcggaagggccaagcgatctggatctggagcaacaaacttctcactactcaaacaagcaggtgacgtggaggagaatcccgggcctactagtatggactggatttggcgcatccttttccttgtcggcgctgctaccggcgcgcattccttcgaacaagttcagcttcaacagcctggcgctgagctggtcaaacctggcgcttctgtgaagatgagctgcaaagccagcggctacgccttcagcagctactggatcaactggatgaagcagaaacccggccagggactcgaatggatcggccaaatctatcccggcgacggcgacaccaactacaacggcaagttcaagggcagagccacactgaccgccgatacctctagcagcacagcctacatgcagctgagcagcctgaccagcgaagatagcgccgtgtacttctgtgcccggtccatcacaacagtcgtgggctgcgctatggactattggggccagggaacaagcgtgaccgtgtctagtacgcgtgcctctacaaagggaccctccgtgtttcctctggctcccagcagcaagtctacaagcggaggaacagccgctctgggctgcctggtcaaggattactttcccgagcctgtgaccgtgtcctggaatagcggagcactgacaagcggcgtgcacacctttccagccgtgctgcaaagcagcggcctgtactctctgagcagcgtggtcacagtgcctagctctagcctgggcacccagacctacatctgcaatgtgaaccacaagcctagcaacaccaaggtggacaagagagtggaacccaagagctgtggtaccctgtgggtgtcccagccacctgaaattcggacactggaaggctcctccgcctttctgccctgtagctttaacgccagccaggggagactcgccatcggctctgtgacatggttccgggatgaagtcgtccctggaaaagaagttcgcaacggaacaccagagttcagaggcagactcgccccactggcaagctccagattcctgcatgaccatcaggctgaactgcacattagggacgtgcggggccacgatgcctccatctatgtgtgtcgggtcgaagtgcttggactcggcgtcggaactggaaacggcactaggctggtggtcgagaaagaacatccacagcttggcgctggcaccgtcctgttgcttagagccggattctatgccgtcagcttcctgtccgtggctgtggggtctacagtgtattaccagggaaaatgtctcacctggaaaggccccagacgccagcttccagctgttgttcctgctccactgccaccaccttgtggctcctctgctcacttgcttccaccagtgcctggcggacgcgccaagagaagcggatctggcgtgaagcagaccctgaatttcgacctgctgaagctggctggcgacgtggaatccaacccaggcccttctagaggcgggatccacaccatggctacctacgaggtgctgtgcgaggtggcaagaaagctgggcaccgacgacagagaagtggtgctgttcctgctgaacgtgttcatccctcagcctacactggcccagctgatcggtgcactgagagccctgaaagaggaaggccggctgacctttcctctgctggccgaatgcctgttcagagccggaagaagggatctgctgcgggacctgctgcatctggaccccagatttctggaaagacacctggccggcaccatgagctacttcagcccttaccagctgaccgtgctgcacgttgacggcgaactgtgcgccagagatattcggagcctgatcttcctgagcaaggacaccatcggcagccggtctacccctcagacatttctgcactgggtgtactgcatggaaaacctggacctgctcggccccacagatgtggatgccctgatgtccatgctgagaagcctgagcagagtggacctccagagacaggtgcagacactgatgggactgcacctgagcggacctagccacagccagcactacagacacacccct

SEQ ID NO: 1603 - DNA, 3483 bp, Artificial Sequence
  Synthetic Polynucleotide
atggccttaccagtgaccgccttgctcctgccgctggccttgctgctccacgccgccaggccggacatccagatgacacagagccctagcagcctgtctgccagcgtgggagacagagtgaccatcacatgcaaggccagcgaccacatcaacaactggctggcctggtatcagcagaagcctggacaggcccctaagctgctgatctacggcgctaccacactggaaacaggcgtgcccagcagattttctggcagcggctctggcaccgactacaccctgacaatatccagcctccagcctgaggacttcgccacctactactgtcagcagagctggaacaccccttggacattcggccagggcaccaagctggaaatcaagagactcgagggacagcctaaggccaatcctaccgtgacactgttccctccaagcagcgaagaactccaggccaacaaggccacacttgtgtgcctgatctccgacttctaccctggggctgtgacagtggcttggaaggccgatggatctcctgtgaaagccggcgtggaaaccaccaagccatccaagcagagcaacaacaaatacgccgccagctcctacctgagcctgacacctgagcagtggaagtcccacagatcctacagctgccaagtgacccacgaaggcagcaccgtggaaaagacagtggcccctacagagtgcagcggatccctgtgggtttcacagcctccagagatcagaaccctggaaggcagcagcgccttcctgccttgcagcttcaatgcctctcagggcagactggctatcggcagcgtgacctggttcagagatgaggtggtgcccggcaaagaagtgcggaacggcacccctgagtttagaggaaggctggcccctctggcctccagcagatttctgcacgatcaccaggccgagctgcacatcagagatgtgcgaggacacgacgccagcatctacgtgtgcagagtggaagtgctcggcctcggagttggcacaggcaatggaacaagactggtggtggaaaaagagcaccctcagctcggagccggaacagtgctgcttctgagagccggcttttacgccgtgtcctttctgtctgtggccgtgggcagcaccgtgtactatcagggcaagtgcctgacctggaagggacctagaaggcaactgcctgctgtggtgcctgctcctttgcctcctccatgtggaagctctgcccatctgctgccacctgttccaggcggaagggccaagcgatctggatctggagcaacaaacttctcactactcaaacaagcaggtgacgtggaggagaatcccgggcctactagtatggactggatttggcgcatccttttccttgtcggcgctgctaccggcgcgcattccttcgaacaagttcagcttcaacagcctggcgctgagctggtcaaacctggcgcttctgtgaagatgagctgcaaagccagcggctacgccttcagcagctactggatcaactggatgaagcagaaacccggccagggactcgaatggatcggccaaatctatcccggcgacggcgacaccaactacaacggcaagttcaagggcagagccacactgaccgccgatacctctagcagcacagcctacatgcagctgagcagcctgaccagcgaagatagcgccgtgtacttctgtgcccggtccatcacaacagtcgtgggctgcgctatggactattggggccagggaacaagcgtgaccgtgtctagtacgcgtgcctctacaaagggaccctccgtgtttcctctggctcccagcagcaagtctacaagcggaggaacagccgctctgggctgcctggtcaaggattactttcccgagcctgtgaccgtgtcctggaatagcggagcactgacaagcggcgtgcacacctttccagccgtgctgcaaagcagcggcctgtactctctgagcagcgtggtcacagtgcctagctctagcctgggcacccagacctacatctgcaatgtgaaccacaagcctagcaacaccaaggtggacaagagagtggaacccaagagctgtggtaccctgtgggtgtcccagccacctgaaattcggacactggaaggctcctccgcctttctgccctgtagctttaacgccagccaggggagactcgccatcggctctgtgacatggttccgggatgaagtcgtccctggaaaagaagttcgcaacggaacaccagagttcagaggcagactcgccccactggcaagctccagattcctgcatgaccatcaggctgaactgcacattagggacgtgcggggccacgatgcctccatctatgtgtgtcgggtcgaagtgcttggactcggcgtcggaactggaaacggcactaggctggtggtcgagaaagaacatccacagcttggcgctggcaccgtcctgttgcttagagccggattctatgccgtcagcttcctgtccgtggctgtggggtctacagtgtattaccagggaaaatgtctcacctggaaaggccccagacgccagcttccagctgttgttcctgctccactgccaccaccttgtggctcctctgctcacttgcttccaccagtgcctggcggacgcgccaagagaagcggatctggcgtgaagcagaccctgaatttcgacctgctgaagctggctggcgacgtggaatccaacccaggcccttctagaggcgggatccacaccatgtccgactccaaggaggtccctagccttccatttttgcgacacttgctcgaagagttggacagccatgaggacagcttgctgctgtttctgtgtcacgacgcggccccgggctgcacgacggtcacgcaagctttgtgctcgcttagccaacagcgcaagctgaccctcgcggctctggtcgagatgctctacgtgctgcagcgtatggatcttctcaagagccgcttcgggctcagcaaggagggggccgagcaattgctgggcacaagctttctcacgcgctaccgcaagctcatggtttgcgtgggtgaggagctcgactcgagcgagctacgcgctctacgcttgttcgcgtgcaacctgaatccgagcctgagcacggcgctttctgagagcagccgctttgtcgagcttgtactcgcgcttgaaaacgtaggactcgtctcgccatcgagtgtttccgtgcttgcggacatgttgcgcactcttcggcgcctcgatttgtgccagcagcttgttgagtacgaacaacaagagcaagccaggtaccgttactgttacgcggcctcgccctcattgccagttcgtacgttacgtcgggggcacggcgcgagtgaacacgagcagctgtgcatgcccgtgcaagaatcctctgacagccccgagctgctgcgcacgcccgtacaagaatcctccagcgacagccccgagcaaacgact

SEQ ID NO: 1604 - DNA, 3351 bp, Artificial Sequence
  Synthetic Polynucleotide
atggccttaccagtgaccgccttgctcctgccgctggccttgctgctccacgccgccaggccggacatccagatgacacagagccctagcagcctgtctgccagcgtgggagacagagtgaccatcacatgcaaggccagcgaccacatcaacaactggctggcctggtatcagcagaagcctggacaggcccctaagctgctgatctacggcgctaccacactggaaacaggcgtgcccagcagattttctggcagcggctctggcaccgactacaccctgacaatatccagcctccagcctgaggacttcgccacctactactgtcagcagagctggaacaccccttggacattcggccagggcaccaagctggaaatcaagagactcgagggacagcctaaggccaatcctaccgtgacactgttccctccaagcagcgaagaactccaggccaacaaggccacacttgtgtgcctgatctccgacttctaccctggggctgtgacagtggcttggaaggccgatggatctcctgtgaaagccggcgtggaaaccaccaagccatccaagcagagcaacaacaaatacgccgccagctcctacctgagcctgacacctgagcagtggaagtcccacagatcctacagctgccaagtgacccacgaaggcagcaccgtggaaaagacagtggcccctacagagtgcagcggatccctgtgggtttcacagcctccagagatcagaaccctggaaggcagcagcgccttcctgccttgcagcttcaatgcctctcagggcagactggctatcggcagcgtgacctggttcagagatgaggtggtgcccggcaaagaagtgcggaacggcacccctgagtttagaggaaggctggcccctctggcctccagcagatttctgcacgatcaccaggccgagctgcacatcagagatgtgcgaggacacgacgccagcatctacgtgtgcagagtggaagtgctcggcctcggagttggcacaggcaatggaacaagactggtggtggaaaaagagcaccctcagctcggagccggaacagtgctgcttctgagagccggcttttacgccgtgtcctttctgtctgtggccgtgggcagcaccgtgtactatcagggcaagtgcctgacctggaagggacctagaaggcaactgcctgctgtggtgcctgctcctttgcctcctccatgtggaagctctgcccatctgctgccacctgttccaggcggaagggccaagcgatctggatctggagcaacaaacttctcactactcaaacaagcaggtgacgtggaggagaatcccgggcctactagtatggactggatttggcgcatccttttccttgtcggcgctgctaccggcgcgcattccttcgaacaagttcagcttcaacagcctggcgctgagctggtcaaacctggcgcttctgtgaagatgagctgcaaagccagcggctacgccttcagcagctactggatcaactggatgaagcagaaacccggccagggactcgaatggatcggccaaatctatcccggcgacggcgacaccaactacaacggcaagttcaagggcagagccacactgaccgccgatacctctagcagcacagcctacatgcagctgagcagcctgaccagcgaagatagcgccgtgtacttctgtgcccggtccatcacaacagtcgtgggctgcgctatggactattggggccagggaacaagcgtgaccgtgtctagtacgcgtgcctctacaaagggaccctccgtgtttcctctggctcccagcagcaagtctacaagcggaggaacagccgctctgggctgcctggtcaaggattactttcccgagcctgtgaccgtgtcctggaatagcggagcactgacaagcggcgtgcacacctttccagccgtgctgcaaagcagcggcctgtactctctgagcagcgtggtcacagtgcctagctctagcctgggcacccagacctacatctgcaatgtgaaccacaagcctagcaacaccaaggtggacaagagagtggaacccaagagctgtggtaccctgtgggtgtcccagccacctgaaattcggacactggaaggctcctccgcctttctgccctgtagctttaacgccagccaggggagactcgccatcggctctgtgacatggttccgggatgaagtcgtccctggaaaagaagttcgcaacggaacaccagagttcagaggcagactcgccccactggcaagctccagattcctgcatgaccatcaggctgaactgcacattagggacgtgcggggccacgatgcctccatctatgtgtgtcgggtcgaagtgcttggactcggcgtcggaactggaaacggcactaggctggtggtcgagaaagaacatccacagcttggcgctggcaccgtcctgttgcttagagccggattctatgccgtcagcttcctgtccgtggctgtggggtctacagtgtattaccagggaaaatgtctcacctggaaaggccccagacgccagcttccagctgttgttcctgctccactgccaccaccttgtggctcctctgctcacttgcttccaccagtgcctggcggacgcgccaagagaagcggatctggcgtgaagcagaccctgaatttcgacctgctgaagctggctggcgacgtggaatccaacccaggcccttctagaggccatatgaccgagtacaagcccacggtgcgcctcgccacccgcgacgacgtccccagggccgtacgcaccctcgccgccgcgttcgccgactaccccgccacgcgccacaccgtcgatccggaccgccacatcgagcgggtcaccgagctgcaagaactcttcctcacgcgcgtcgggctcgacatcggcaaggtgtgggtcgcggacgacggcgccgcggtggcggtctggaccacgccggagagcgtcgaagcgggggcggtgttcgccgagatcggcccgcgcatggccgagttgagcggttcccggctggccgcgcagcaacagatggaaggcctcctggcgccgcaccggcccaaggagcccgcgtggttcctggccaccgtcggcgtctcgcccgaccaccagggcaagggtctgggcagcgccgtcgtgctccccggagtggaggcggccgagcgcgccggggtgcccgccttcctggagacctccgcgccccgcaacctccccttctacgagcggctcggcttcaccgtcaccgccgacgtcgaggtgcccgaaggaccgcgcacctggtgcatgacccgcaagcccggtgcctga

SEQ ID NO: 1605 - DNA, 3762 bp, Artificial Sequence
  Synthetic Polynucleotide
atggccttaccagtgaccgccttgctcctgccgctggccttgctgctccacgccgccaggccggaagtgcagctggttgaatctggcggaggactggttcaggctggcggatctctgagactgtcttgtgccgccagcggcagaacctttagcatgggctggtttagacaggcccctggcaaagagagagagttcgtcgccgccatcacatactctggcggcagcccttactacgccgactctgtgaagggcagattcaccatcagccgggacaacgccaagaacaccgtgtacctccagatgaacagcctgaagcctgaggacaccgccgtgtactactgcgccgccaatccaacatacggcagcgactggaacgccgagaattggggccagggaacccaagtgacagtgtctagcggtaccggcggaggcggatctggcggcggaggtagcggtggcggaggatctgaattcgacatccagatgacacagagccctagcagcctgtctgccagcgtgggagacagagtgaccatcacatgcaaggccagcgaccacatcaacaactggctggcctggtatcagcagaagcctggacaggcccctaagctgctgatctacggcgctaccacactggaaacaggcgtgcccagcagattttctggcagcggctctggcaccgactacaccctgacaatatccagcctccagcctgaggacttcgccacctactactgtcagcagagctggaacaccccttggacattcggccagggcaccaagctggaaatcaagagactcgagggacagcctaaggccaatcctaccgtgacactgttccctccaagcagcgaagaactccaggccaacaaggccacacttgtgtgcctgatctccgacttctaccctggggctgtgacagtggcttggaaggccgatggatctcctgtgaaagccggcgtggaaaccaccaagccatccaagcagagcaacaacaaatacgccgccagctcctacctgagcctgacacctgagcagtggaagtcccacagatcctacagctgccaagtgacccacgaaggcagcaccgtggaaaagacagtggcccctacagagtgcagcggatccctgtgggtttcacagcctccagagatcagaaccctggaaggcagcagcgccttcctgccttgcagcttcaatgcctctcagggcagactggctatcggcagcgtgacctggttcagagatgaggtggtgcccggcaaagaagtgcggaacggcacccctgagtttagaggaaggctggcccctctggcctccagcagatttctgcacgatcaccaggccgagctgcacatcagagatgtgcgaggacacgacgccagcatctacgtgtgcagagtggaagtgctcggcctcggagttggcacaggcaatggaacaagactggtggtggaaaaagagcaccctcagctcggagccggaacagtgctgcttctgagagccggcttttacgccgtgtcctttctgtctgtggccgtgggcagcaccgtgtactatcagggcaagtgcctgacctggaagggacctagaaggcaactgcctgctgtggtgcctgctcctttgcctcctccatgtggaagctctgcccatctgctgccacctgttccaggcggaagggccaagcgatctggatctggagcaacaaacttctcactactcaaacaagcaggtgacgtggaggagaatcccgggcctactagtatggactggatttggcgcatccttttccttgtcggcgctgctaccggcgcgcattccttcgaacaagttcagcttcaacagcctggcgctgagctggtcaaacctggcgcttctgtgaagatgagctgcaaagccagcggctacgccttcagcagctactggatcaactggatgaagcagaaacccggccagggactcgaatggatcggccaaatctatcccggcgacggcgacaccaactacaacggcaagttcaagggcagagccacactgaccgccgatacctctagcagcacagcctacatgcagctgagcagcctgaccagcgaagatagcgccgtgtacttctgtgcccggtccatcacaacagtcgtgggctgcgctatggactattggggccagggaacaagcgtgaccgtgtctagtacgcgtgcctctacaaagggaccctccgtgtttcctctggctcccagcagcaagtctacaagcggaggaacagccgctctgggctgcctggtcaaggattactttcccgagcctgtgaccgtgtcctggaatagcggagcactgacaagcggcgtgcacacctttccagccgtgctgcaaagcagcggcctgtactctctgagcagcgtggtcacagtgcctagctctagcctgggcacccagacctacatctgcaatgtgaaccacaagcctagcaacaccaaggtggacaagagagtggaacccaagagctgtggtaccctgtgggtgtcccagccacctgaaattcggacactggaaggctcctccgcctttctgccctgtagctttaacgccagccaggggagactcgccatcggctctgtgacatggttccgggatgaagtcgtccctggaaaagaagttcgcaacggaacaccagagttcagaggcagactcgccccactggcaagctccagattcctgcatgaccatcaggctgaactgcacattagggacgtgcggggccacgatgcctccatctatgtgtgtcgggtcgaagtgcttggactcggcgtcggaactggaaacggcactaggctggtggtcgagaaagaacatccacagcttggcgctggcaccgtcctgttgcttagagccggattctatgccgtcagcttcctgtccgtggctgtggggtctacagtgtattaccagggaaaatgtctcacctggaaaggccccagacgccagcttccagctgttgttcctgctccactgccaccaccttgtggctcctctgctcacttgcttccaccagtgcctggcggacgcgccaagagaagcggatctggcgtgaagcagaccctgaatttcgacctgctgaagctggctggcgacgtggaatccaacccaggcccttctagaggccatatgaccgagtacaagcccacggtgcgcctcgccacccgcgacgacgtccccagggccgtacgcaccctcgccgccgcgttcgccgactaccccgccacgcgccacaccgtcgatccggaccgccacatcgagcgggtcaccgagctgcaagaactcttcctcacgcgcgtcgggctcgacatcggcaaggtgtgggtcgcggacgacggcgccgcggtggcggtctggaccacgccggagagcgtcgaagcgggggcggtgttcgccgagatcggcccgcgcatggccgagttgagcggttcccggctggccgcgcagcaacagatggaaggcctcctggcgccgcaccggcccaaggagcccgcgtggttcctggccaccgtcggcgtctcgcccgaccaccagggcaagggtctgggcagcgccgtcgtgctccccggagtggaggcggccgagcgcgccggggtgcccgccttcctggagacctccgcgccccgcaacctccccttctacgagcggctcggcttcaccgtcaccgccgacgtcgaggtgcccgaaggaccgcgcacctggtgcatgacccgcaagcccggtgcctga

SEQ ID NO: 1606 - DNA, 4173 bp, Artificial Sequence
  Synthetic Polynucleotide
atggccttaccagtgaccgccttgctcctgccgctggccttgctgctccacgccgccaggccggaagtgcagctggttgaatctggcggaggactggttcaggctggcggatctctgagactgtcttgtgccgccagcggcagaacctttagcatgggctggtttagacaggcccctggcaaagagagagagttcgtcgccgccatcacatactctggcggcagcccttactacgccgactctgtgaagggcagattcaccatcagccgggacaacgccaagaacaccgtgtacctccagatgaacagcctgaagcctgaggacaccgccgtgtactactgcgccgccaatccaacatacggcagcgactggaacgccgagaattggggccagggaacccaagtgacagtgtctagcggtaccggcggaggcggatctggcggcggaggtagcggtggcggaggatctgaattcgacatccagatgacacagagccctagcagcctgtctgccagcgtgggagacagagtgaccatcacatgcaaggccagcgaccacatcaacaactggctggcctggtatcagcagaagcctggacaggcccctaagctgctgatctacggcgctaccacactggaaacaggcgtgcccagcagattttctggcagcggctctggcaccgactacaccctgacaatatccagcctccagcctgaggacttcgccacctactactgtcagcagagctggaacaccccttggacattcggccagggcaccaagctggaaatcaagagactcgagggacagcctaaggccaatcctaccgtgacactgttccctccaagcagcgaagaactccaggccaacaaggccacacttgtgtgcctgatctccgacttctaccctggggctgtgacagtggcttggaaggccgatggatctcctgtgaaagccggcgtggaaaccaccaagccatccaagcagagcaacaacaaatacgccgccagctcctacctgagcctgacacctgagcagtggaagtcccacagatcctacagctgccaagtgacccacgaaggcagcaccgtggaaaagacagtggcccctacagagtgcagcggatccctgtgggtttcacagcctccagagatcagaaccctggaaggcagcagcgccttcctgccttgcagcttcaatgcctctcagggcagactggctatcggcagcgtgacctggttcagagatgaggtggtgcccggcaaagaagtgcggaacggcacccctgagtttagaggaaggctggcccctctggcctccagcagatttctgcacgatcaccaggccgagctgcacatcagagatgtgcgaggacacgacgccagcatctacgtgtgcagagtggaagtgctcggcctcggagttggcacaggcaatggaacaagactggtggtggaaaaagagcaccctcagctcggagccggaacagtgctgcttctgagagccggcttttacgccgtgtcctttctgtctgtggccgtgggcagcaccgtgtactatcagggcaagtgcctgacctggaagggacctagaaggcaactgcctgctgtggtgcctgctcctttgcctcctccatgtggaagctctgcccatctgctgccacctgttccaggcggaagggccaagcgatctggatctggagcaacaaacttctcactactcaaacaagcaggtgacgtggaggagaatcccgggcctactagtatggactggatttggcgcatccttttccttgtcggcgctgctaccggcgcgcattccgggcccgaagtgcaactggttgaatccggtggcggcctggtgcaagcaggcggatctctcagacttagctgtgccgcctccggcagaaccttcacaatgggatggtttaggcaggctccagggaaagagagagagttcgtcgccgccatctctctgtctcccacactggcctactacgccgactctgtgaaaggccggttcaccatctccagagataatgccaagaacaccgtggtgctgcaaatgaactctctgaaacccgaggatacagccctgtactattgtgccgctgaccggaagtccgtgatgagcatcagacccgattactggggacagggcacacaagtcacagtgtcctctggatccggcggcggaggatctggcggaggcggatctgggggcggaggctctttcgaacaagttcagcttcaacagcctggcgctgagctggtcaaacctggcgcttctgtgaagatgagctgcaaagccagcggctacgccttcagcagctactggatcaactggatgaagcagaaacccggccagggactcgaatggatcggccaaatctatcccggcgacggcgacaccaactacaacggcaagttcaagggcagagccacactgaccgccgatacctctagcagcacagcctacatgcagctgagcagcctgaccagcgaagatagcgccgtgtacttctgtgcccggtccatcacaacagtcgtgggctgcgctatggactattggggccagggaacaagcgtgaccgtgtctagtacgcgtgcctctacaaagggaccctccgtgtttcctctggctcccagcagcaagtctacaagcggaggaacagccgctctgggctgcctggtcaaggattactttcccgagcctgtgaccgtgtcctggaatagcggagcactgacaagcggcgtgcacacctttccagccgtgctgcaaagcagcggcctgtactctctgagcagcgtggtcacagtgcctagctctagcctgggcacccagacctacatctgcaatgtgaaccacaagcctagcaacaccaaggtggacaagagagtggaacccaagagctgtggtaccctgtgggtgtcccagccacctgaaattcggacactggaaggctcctccgcctttctgccctgtagctttaacgccagccaggggagactcgccatcggctctgtgacatggttccgggatgaagtcgtccctggaaaagaagttcgcaacggaacaccagagttcagaggcagactcgccccactggcaagctccagattcctgcatgaccatcaggctgaactgcacattagggacgtgcggggccacgatgcctccatctatgtgtgtcgggtcgaagtgcttggactcggcgtcggaactggaaacggcactaggctggtggtcgagaaagaacatccacagcttggcgctggcaccgtcctgttgcttagagccggattctatgccgtcagcttcctgtccgtggctgtggggtctacagtgtattaccagggaaaatgtctcacctggaaaggccccagacgccagcttccagctgttgttcctgctccactgccaccaccttgtggctcctctgctcacttgcttccaccagtgcctggcggacgcgccaagagaagcggatctggcgtgaagcagaccctgaatttcgacctgctgaagctggctggcgacgtggaatccaacccaggcccttctagaggccatatgaccgagtacaagcccacggtgcgcctcgccacccgcgacgacgtccccagggccgtacgcaccctcgccgccgcgttcgccgactaccccgccacgcgccacaccgtcgatccggaccgccacatcgagcgggtcaccgagctgcaagaactcttcctcacgcgcgtcgggctcgacatcggcaaggtgtgggtcgcggacgacggcgccgcggtggcggtctggaccacgccggagagcgtcgaagcgggggcggtgttcgccgagatcggcccgcgcatggccgagttgagcggttcccggctggccgcgcagcaacagatggaaggcctcctggcgccgcaccggcccaaggagcccgcgtggttcctggccaccgtcggcgtctcgcccgaccaccagggcaagggtctgggcagcgccgtcgtgctccccggagtggaggcggccgagcgcgccggggtgcccgccttcctggagacctccgcgccccgcaacctccccttctacgagcggctcggcttcaccgtcaccgccgacgtcgaggtgcccgaaggaccgcgcacctggtgcatgacccgcaagcccggtgcctga

SEQ ID NO: 1607 - DNA, 3372 bp, Artificial Sequence
  Synthetic Polynucleotide
atggccttaccagtgaccgccttgctcctgccgctggccttgctgctccacgccgccaggccggaagtgcagctggttgaatctggcggaggactggttcaggctggcggatctctgagactgtcttgtgccgccagcggcagaacctttagcatgggctggtttagacaggcccctggcaaagagagagagttcgtcgccgccatcacatactctggcggcagcccttactacgccgactctgtgaagggcagattcaccatcagccgggacaacgccaagaacaccgtgtacctccagatgaacagcctgaagcctgaggacaccgccgtgtactactgcgccgccaatccaacatacggcagcgactggaacgccgagaattggggccagggaacccaagtgacagtgtctagcctcgagggacagcctaaggccaatcctaccgtgacactgttccctccaagcagcgaagaactccaggccaacaaggccacacttgtgtgcctgatctccgacttctaccctggggctgtgacagtggcttggaaggccgatggatctcctgtgaaagccggcgtggaaaccaccaagccatccaagcagagcaacaacaaatacgccgccagctcctacctgagcctgacacctgagcagtggaagtcccacagatcctacagctgccaagtgacccacgaaggcagcaccgtggaaaagacagtggcccctacagagtgcagcggatccctgtgggtttcacagcctccagagatcagaaccctggaaggcagcagcgccttcctgccttgcagcttcaatgcctctcagggcagactggctatcggcagcgtgacctggttcagagatgaggtggtgcccggcaaagaagtgcggaacggcacccctgagtttagaggaaggctggcccctctggcctccagcagatttctgcacgatcaccaggccgagctgcacatcagagatgtgcgaggacacgacgccagcatctacgtgtgcagagtggaagtgctcggcctcggagttggcacaggcaatggaacaagactggtggtggaaaaagagcaccctcagctcggagccggaacagtgctgcttctgagagccggcttttacgccgtgtcctttctgtctgtggccgtgggcagcaccgtgtactatcagggcaagtgcctgacctggaagggacctagaaggcaactgcctgctgtggtgcctgctcctttgcctcctccatgtggaagctctgcccatctgctgccacctgttccaggcggaagggccaagcgatctggatctggagcaacaaacttctcactactcaaacaagcaggtgacgtggaggagaatcccgggcctactagtatggactggatttggcgcatccttttccttgtcggcgctgctaccggcgcgcattccgggcccgaagtgcaactggttgaatccggtggcggcctggtgcaagcaggcggatctctcagacttagctgtgccgcctccggcagaaccttcacaatgggatggtttaggcaggctccagggaaagagagagagttcgtcgccgccatctctctgtctcccacactggcctactacgccgactctgtgaaaggccggttcaccatctccagagataatgccaagaacaccgtggtgctgcaaatgaactctctgaaacccgaggatacagccctgtactattgtgccgctgaccggaagtccgtgatgagcatcagacccgattactggggacagggcacacaagtcacagtgtcctctacgcgtgcctctacaaagggaccctccgtgtttcctctggctcccagcagcaagtctacaagcggaggaacagccgctctgggctgcctggtcaaggattactttcccgagcctgtgaccgtgtcctggaatagcggagcactgacaagcggcgtgcacacctttccagccgtgctgcaaagcagcggcctgtactctctgagcagcgtggtcacagtgcctagctctagcctgggcacccagacctacatctgcaatgtgaaccacaagcctagcaacaccaaggtggacaagagagtggaacccaagagctgtggtaccctgtgggtgtcccagccacctgaaattcggacactggaaggctcctccgcctttctgccctgtagctttaacgccagccaggggagactcgccatcggctctgtgacatggttccgggatgaagtcgtccctggaaaagaagttcgcaacggaacaccagagttcagaggcagactcgccccactggcaagctccagattcctgcatgaccatcaggctgaactgcacattagggacgtgcggggccacgatgcctccatctatgtgtgtcgggtcgaagtgcttggactcggcgtcggaactggaaacggcactaggctggtggtcgagaaagaacatccacagcttggcgctggcaccgtcctgttgcttagagccggattctatgccgtcagcttcctgtccgtggctgtggggtctacagtgtattaccagggaaaatgtctcacctggaaaggccccagacgccagcttccagctgttgttcctgctccactgccaccaccttgtggctcctctgctcacttgcttccaccagtgcctggcggacgcgccaagagaagcggatctggcgtgaagcagaccctgaatttcgacctgctgaagctggctggcgacgtggaatccaacccaggcccttctagaggccatatgaccgagtacaagcccacggtgcgcctcgccacccgcgacgacgtccccagggccgtacgcaccctcgccgccgcgttcgccgactaccccgccacgcgccacaccgtcgatccggaccgccacatcgagcgggtcaccgagctgcaagaactcttcctcacgcgcgtcgggctcgacatcggcaaggtgtgggtcgcggacgacggcgccgcggtggcggtctggaccacgccggagagcgtcgaagcgggggcggtgttcgccgagatcggcccgcgcatggccgagttgagcggttcccggctggccgcgcagcaacagatggaaggcctcctggcgccgcaccggcccaaggagcccgcgtggttcctggccaccgtcggcgtctcgcccgaccaccagggcaagggtctgggcagcgccgtcgtgctccccggagtggaggcggccgagcgcgccggggtgcccgccttcctggagacctccgcgccccgcaacctccccttctacgagcggctcggcttcaccgtcaccgccgacgtcgaggtgcccgaaggaccgcgcacctggtgcatgacccgcaagcccggtgcctga

SEQ ID NO: 1608 - DNA, 3396 bp, Artificial Sequence
  Synthetic Polynucleotide
atggccttaccagtgaccgccttgctcctgccgctggccttgctgctccacgccgccaggccggacatccagatgacacagagccctagcagcctgtctgccagcgtgggagacagagtgaccatcacatgcaaggccagcgaccacatcaacaactggctggcctggtatcagcagaagcctggacaggcccctaagctgctgatctacggcgctaccacactggaaacaggcgtgcccagcagattttctggcagcggctctggcaccgactacaccctgacaatatccagcctccagcctgaggacttcgccacctactactgtcagcagagctggaacaccccttggacattcggccagggcaccaagctggaaatcaagagactcgaggacctgaagaacgtgttcccacctgaggtggccgtgttcgagcctagcgaggccgagatcagccacacccagaaagccaccctcgtgtgcctggctaccggcttctaccccgaccatgtggaactgtcttggtgggtcaacggcaaagaggtgcacagcggcgtgtctaccgacccccagccactgaaagaacagcccgccctgaacgacagccggtactgcctgagcagcagactgagagtgtccgccaccttctggcagaacccccggaaccacttcagatgccaggtgcagttctacggcctgagcgagaacgacgagtggacccaggacagagccaagcccgtgacccagatcgtgtctgccgaagcctggggcagagccgattgcggatccctgtgggtttcacagcctccagagatcagaaccctggaaggcagcagcgccttcctgccttgcagcttcaatgcctctcagggcagactggctatcggcagcgtgacctggttcagagatgaggtggtgcccggcaaagaagtgcggaacggcacccctgagtttagaggaaggctggcccctctggcctccagcagatttctgcacgatcaccaggccgagctgcacatcagagatgtgcgaggacacgacgccagcatctacgtgtgcagagtggaagtgctcggcctcggagttggcacaggcaatggaacaagactggtggtggaaaaagagcaccctcagctcggagccggaacagtgctgcttctgagagccggcttttacgccgtgtcctttctgtctgtggccgtgggcagcaccgtgtactatcagggcaagtgcctgacctggaagggacctagaaggcaactgcctgctgtggtgcctgctcctttgcctcctccatgtggaagctctgcccatctgctgccacctgttccaggcggaagggccaagcgatctggatctggagcaacaaacttctcactactcaaacaagcaggtgacgtggaggagaatcccgggcctactagtatggactggatttggcgcatccttttccttgtcggcgctgctaccggcgcgcattccttcgaacaagttcagcttcaacagcctggcgctgagctggtcaaacctggcgcttctgtgaagatgagctgcaaagccagcggctacgccttcagcagctactggatcaactggatgaagcagaaacccggccagggactcgaatggatcggccaaatctatcccggcgacggcgacaccaactacaacggcaagttcaagggcagagccacactgaccgccgatacctctagcagcacagcctacatgcagctgagcagcctgaccagcgaagatagcgccgtgtacttctgtgcccggtccatcacaacagtcgtgggctgcgctatggactattggggccagggaacaagcgtgaccgtgtctagtacgcgtatccagaaccctgatcctgccgtgtaccagctgcgggatagcaagagcagcgacaagagcgtgtgtctgttcaccgacttcgacagccagaccaacgtgtcccagagcaaggactccgacgtgtacatcaccgataagaccgtgctggacatgcggagcatggacttcaagagcaactccgccgtggcctggtccaacaagtccgatttcgcctgcgccaacgccttcaacaacagcattatccccgaggacacattcttcccaagccccgagagcagctgcggtaccctgtgggtgtcccagccacctgaaattcggacactggaaggctcctccgcctttctgccctgtagctttaacgccagccaggggagactcgccatcggctctgtgacatggttccgggatgaagtcgtccctggaaaagaagttcgcaacggaacaccagagttcagaggcagactcgccccactggcaagctccagattcctgcatgaccatcaggctgaactgcacattagggacgtgcggggccacgatgcctccatctatgtgtgtcgggtcgaagtgcttggactcggcgtcggaactggaaacggcactaggctggtggtcgagaaagaacatccacagcttggcgctggcaccgtcctgttgcttagagccggattctatgccgtcagcttcctgtccgtggctgtggggtctacagtgtattaccagggaaaatgtctcacctggaaaggccccagacgccagcttccagctgttgttcctgctccactgccaccaccttgtggctcctctgctcacttgcttccaccagtgcctggcggacgcgccaagagaagcggatctggcgtgaagcagaccctgaatttcgacctgctgaagctggctggcgacgtggaatccaacccaggcccttctagaggccatatgaccgagtacaagcccacggtgcgcctcgccacccgcgacgacgtccccagggccgtacgcaccctcgccgccgcgttcgccgactaccccgccacgcgccacaccgtcgatccggaccgccacatcgagcgggtcaccgagctgcaagaactcttcctcacgcgcgtcgggctcgacatcggcaaggtgtgggtcgcggacgacggcgccgcggtggcggtctggaccacgccggagagcgtcgaagcgggggcggtgttcgccgagatcggcccgcgcatggccgagttgagcggttcccggctggccgcgcagcaacagatggaaggcctcctggcgccgcaccggcccaaggagcccgcgtggttcctggccaccgtcggcgtctcgcccgaccaccagggcaagggtctgggcagcgccgtcgtgctccccggagtggaggcggccgagcgcgccggggtgcccgccttcctggagacctccgcgccccgcaacctccccttctacgagcggctcggcttcaccgtcaccgccgacgtcgaggtgcccgaaggaccgcgcacctggtgcatgacccgcaagcccggtgcctga

SEQ ID NO: 1609 - DNA, 3807 bp, Artificial Sequence
  Synthetic Polynucleotide
atggccttaccagtgaccgccttgctcctgccgctggccttgctgctccacgccgccaggccggaagtgcagctggttgaatctggcggaggactggttcaggctggcggatctctgagactgtcttgtgccgccagcggcagaacctttagcatgggctggtttagacaggcccctggcaaagagagagagttcgtcgccgccatcacatactctggcggcagcccttactacgccgactctgtgaagggcagattcaccatcagccgggacaacgccaagaacaccgtgtacctccagatgaacagcctgaagcctgaggacaccgccgtgtactactgcgccgccaatccaacatacggcagcgactggaacgccgagaattggggccagggaacccaagtgacagtgtctagcggtaccggcggaggcggatctggcggcggaggtagcggtggcggaggatctgaattcgacatccagatgacacagagccctagcagcctgtctgccagcgtgggagacagagtgaccatcacatgcaaggccagcgaccacatcaacaactggctggcctggtatcagcagaagcctggacaggcccctaagctgctgatctacggcgctaccacactggaaacaggcgtgcccagcagattttctggcagcggctctggcaccgactacaccctgacaatatccagcctccagcctgaggacttcgccacctactactgtcagcagagctggaacaccccttggacattcggccagggcaccaagctggaaatcaagagactcgaggacctgaagaacgtgttcccacctgaggtggccgtgttcgagcctagcgaggccgagatcagccacacccagaaagccaccctcgtgtgcctggctaccggcttctaccccgaccatgtggaactgtcttggtgggtcaacggcaaagaggtgcacagcggcgtgtctaccgacccccagccactgaaagaacagcccgccctgaacgacagccggtactgcctgagcagcagactgagagtgtccgccaccttctggcagaacccccggaaccacttcagatgccaggtgcagttctacggcctgagcgagaacgacgagtggacccaggacagagccaagcccgtgacccagatcgtgtctgccgaagcctggggcagagccgattgcggatccctgtgggtttcacagcctccagagatcagaaccctggaaggcagcagcgccttcctgccttgcagcttcaatgcctctcagggcagactggctatcggcagcgtgacctggttcagagatgaggtggtgcccggcaaagaagtgcggaacggcacccctgagtttagaggaaggctggcccctctggcctccagcagatttctgcacgatcaccaggccgagctgcacatcagagatgtgcgaggacacgacgccagcatctacgtgtgcagagtggaagtgctcggcctcggagttggcacaggcaatggaacaagactggtggtggaaaaagagcaccctcagctcggagccggaacagtgctgcttctgagagccggcttttacgccgtgtcctttctgtctgtggccgtgggcagcaccgtgtactatcagggcaagtgcctgacctggaagggacctagaaggcaactgcctgctgtggtgcctgctcctttgcctcctccatgtggaagctctgcccatctgctgccacctgttccaggcggaagggccaagcgatctggatctggagcaacaaacttctcactactcaaacaagcaggtgacgtggaggagaatcccgggcctactagtatggactggatttggcgcatccttttccttgtcggcgctgctaccggcgcgcattccttcgaacaagttcagcttcaacagcctggcgctgagctggtcaaacctggcgcttctgtgaagatgagctgcaaagccagcggctacgccttcagcagctactggatcaactggatgaagcagaaacccggccagggactcgaatggatcggccaaatctatcccggcgacggcgacaccaactacaacggcaagttcaagggcagagccacactgaccgccgatacctctagcagcacagcctacatgcagctgagcagcctgaccagcgaagatagcgccgtgtacttctgtgcccggtccatcacaacagtcgtgggctgcgctatggactattggggccagggaacaagcgtgaccgtgtctagtacgcgtatccagaaccctgatcctgccgtgtaccagctgcgggatagcaagagcagcgacaagagcgtgtgtctgttcaccgacttcgacagccagaccaacgtgtcccagagcaaggactccgacgtgtacatcaccgataagaccgtgctggacatgcggagcatggacttcaagagcaactccgccgtggcctggtccaacaagtccgatttcgcctgcgccaacgccttcaacaacagcattatccccgaggacacattcttcccaagccccgagagcagctgcggtaccctgtgggtgtcccagccacctgaaattcggacactggaaggctcctccgcctttctgccctgtagctttaacgccagccaggggagactcgccatcggctctgtgacatggttccgggatgaagtcgtccctggaaaagaagttcgcaacggaacaccagagttcagaggcagactcgccccactggcaagctccagattcctgcatgaccatcaggctgaactgcacattagggacgtgcggggccacgatgcctccatctatgtgtgtcgggtcgaagtgcttggactcggcgtcggaactggaaacggcactaggctggtggtcgagaaagaacatccacagcttggcgctggcaccgtcctgttgcttagagccggattctatgccgtcagcttcctgtccgtggctgtggggtctacagtgtattaccagggaaaatgtctcacctggaaaggccccagacgccagcttccagctgttgttcctgctccactgccaccaccttgtggctcctctgctcacttgcttccaccagtgcctggcggacgcgccaagagaagcggatctggcgtgaagcagaccctgaatttcgacctgctgaagctggctggcgacgtggaatccaacccaggcccttctagaggccatatgaccgagtacaagcccacggtgcgcctcgccacccgcgacgacgtccccagggccgtacgcaccctcgccgccgcgttcgccgactaccccgccacgcgccacaccgtcgatccggaccgccacatcgagcgggtcaccgagctgcaagaactcttcctcacgcgcgtcgggctcgacatcggcaaggtgtgggtcgcggacgacggcgccgcggtggcggtctggaccacgccggagagcgtcgaagcgggggcggtgttcgccgagatcggcccgcgcatggccgagttgagcggttcccggctggccgcgcagcaacagatggaaggcctcctggcgccgcaccggcccaaggagcccgcgtggttcctggccaccgtcggcgtctcgcccgaccaccagggcaagggtctgggcagcgccgtcgtgctccccggagtggaggcggccgagcgcgccggggtgcccgccttcctggagacctccgcgccccgcaacctccccttctacgagcggctcggcttcaccgtcaccgccgacgtcgaggtgcccgaaggaccgcgcacctggtgcatgacccgcaagcccggtgcctga

SEQ ID NO: 1610 - DNA, 4218 bp, Artificial Sequence
  Synthetic Polynucleotide
atggccttaccagtgaccgccttgctcctgccgctggccttgctgctccacgccgccaggccggaagtgcagctggttgaatctggcggaggactggttcaggctggcggatctctgagactgtcttgtgccgccagcggcagaacctttagcatgggctggtttagacaggcccctggcaaagagagagagttcgtcgccgccatcacatactctggcggcagcccttactacgccgactctgtgaagggcagattcaccatcagccgggacaacgccaagaacaccgtgtacctccagatgaacagcctgaagcctgaggacaccgccgtgtactactgcgccgccaatccaacatacggcagcgactggaacgccgagaattggggccagggaacccaagtgacagtgtctagcggtaccggcggaggcggatctggcggcggaggtagcggtggcggaggatctgaattcgacatccagatgacacagagccctagcagcctgtctgccagcgtgggagacagagtgaccatcacatgcaaggccagcgaccacatcaacaactggctggcctggtatcagcagaagcctggacaggcccctaagctgctgatctacggcgctaccacactggaaacaggcgtgcccagcagattttctggcagcggctctggcaccgactacaccctgacaatatccagcctccagcctgaggacttcgccacctactactgtcagcagagctggaacaccccttggacattcggccagggcaccaagctggaaatcaagagactcgaggacctgaagaacgtgttcccacctgaggtggccgtgttcgagcctagcgaggccgagatcagccacacccagaaagccaccctcgtgtgcctggctaccggcttctaccccgaccatgtggaactgtcttggtgggtcaacggcaaagaggtgcacagcggcgtgtctaccgacccccagccactgaaagaacagcccgccctgaacgacagccggtactgcctgagcagcagactgagagtgtccgccaccttctggcagaacccccggaaccacttcagatgccaggtgcagttctacggcctgagcgagaacgacgagtggacccaggacagagccaagcccgtgacccagatcgtgtctgccgaagcctggggcagagccgattgcggatccctgtgggtttcacagcctccagagatcagaaccctggaaggcagcagcgccttcctgccttgcagcttcaatgcctctcagggcagactggctatcggcagcgtgacctggttcagagatgaggtggtgcccggcaaagaagtgcggaacggcacccctgagtttagaggaaggctggcccctctggcctccagcagatttctgcacgatcaccaggccgagctgcacatcagagatgtgcgaggacacgacgccagcatctacgtgtgcagagtggaagtgctcggcctcggagttggcacaggcaatggaacaagactggtggtggaaaaagagcaccctcagctcggagccggaacagtgctgcttctgagagccggcttttacgccgtgtcctttctgtctgtggccgtgggcagcaccgtgtactatcagggcaagtgcctgacctggaagggacctagaaggcaactgcctgctgtggtgcctgctcctttgcctcctccatgtggaagctctgcccatctgctgccacctgttccaggcggaagggccaagcgatctggatctggagcaacaaacttctcactactcaaacaagcaggtgacgtggaggagaatcccgggcctactagtatggactggatttggcgcatccttttccttgtcggcgctgctaccggcgcgcattccgggcccgaagtgcaactggttgaatccggtggcggcctggtgcaagcaggcggatctctcagacttagctgtgccgcctccggcagaaccttcacaatgggatggtttaggcaggctccagggaaagagagagagttcgtcgccgccatctctctgtctcccacactggcctactacgccgactctgtgaaaggccggttcaccatctccagagataatgccaagaacaccgtggtgctgcaaatgaactctctgaaacccgaggatacagccctgtactattgtgccgctgaccggaagtccgtgatgagcatcagacccgattactggggacagggcacacaagtcacagtgtcctctggatccggcggcggaggatctggcggaggcggatctgggggcggaggctctttcgaacaagttcagcttcaacagcctggcgctgagctggtcaaacctggcgcttctgtgaagatgagctgcaaagccagcggctacgccttcagcagctactggatcaactggatgaagcagaaacccggccagggactcgaatggatcggccaaatctatcccggcgacggcgacaccaactacaacggcaagttcaagggcagagccacactgaccgccgatacctctagcagcacagcctacatgcagctgagcagcctgaccagcgaagatagcgccgtgtacttctgtgcccggtccatcacaacagtcgtgggctgcgctatggactattggggccagggaacaagcgtgaccgtgtctagtacgcgtatccagaaccctgatcctgccgtgtaccagctgcgggatagcaagagcagcgacaagagcgtgtgtctgttcaccgacttcgacagccagaccaacgtgtcccagagcaaggactccgacgtgtacatcaccgataagaccgtgctggacatgcggagcatggacttcaagagcaactccgccgtggcctggtccaacaagtccgatttcgcctgcgccaacgccttcaacaacagcattatccccgaggacacattcttcccaagccccgagagcagctgcggtaccctgtgggtgtcccagccacctgaaattcggacactggaaggctcctccgcctttctgccctgtagctttaacgccagccaggggagactcgccatcggctctgtgacatggttccgggatgaagtcgtccctggaaaagaagttcgcaacggaacaccagagttcagaggcagactcgccccactggcaagctccagattcctgcatgaccatcaggctgaactgcacattagggacgtgcggggccacgatgcctccatctatgtgtgtcgggtcgaagtgcttggactcggcgtcggaactggaaacggcactaggctggtggtcgagaaagaacatccacagcttggcgctggcaccgtcctgttgcttagagccggattctatgccgtcagcttcctgtccgtggctgtggggtctacagtgtattaccagggaaaatgtctcacctggaaaggccccagacgccagcttccagctgttgttcctgctccactgccaccaccttgtggctcctctgctcacttgcttccaccagtgcctggcggacgcgccaagagaagcggatctggcgtgaagcagaccctgaatttcgacctgctgaagctggctggcgacgtggaatccaacccaggcccttctagaggccatatgaccgagtacaagcccacggtgcgcctcgccacccgcgacgacgtccccagggccgtacgcaccctcgccgccgcgttcgccgactaccccgccacgcgccacaccgtcgatccggaccgccacatcgagcgggtcaccgagctgcaagaactcttcctcacgcgcgtcgggctcgacatcggcaaggtgtgggtcgcggacgacggcgccgcggtggcggtctggaccacgccggagagcgtcgaagcgggggcggtgttcgccgagatcggcccgcgcatggccgagttgagcggttcccggctggccgcgcagcaacagatggaaggcctcctggcgccgcaccggcccaaggagcccgcgtggttcctggccaccgtcggcgtctcgcccgaccaccagggcaagggtctgggcagcgccgtcgtgctccccggagtggaggcggccgagcgcgccggggtgcccgccttcctggagacctccgcgccccgcaacctccccttctacgagcggctcggcttcaccgtcaccgccgacgtcgaggtgcccgaaggaccgcgcacctggtgcatgacccgcaagcccggtgcctga

SEQ ID NO: 1611 - DNA, 3417 bp, Artificial Sequence
  Synthetic Polynucleotide
atggccttaccagtgaccgccttgctcctgccgctggccttgctgctccacgccgccaggccggaagtgcagctggttgaatctggcggaggactggttcaggctggcggatctctgagactgtcttgtgccgccagcggcagaacctttagcatgggctggtttagacaggcccctggcaaagagagagagttcgtcgccgccatcacatactctggcggcagcccttactacgccgactctgtgaagggcagattcaccatcagccgggacaacgccaagaacaccgtgtacctccagatgaacagcctgaagcctgaggacaccgccgtgtactactgcgccgccaatccaacatacggcagcgactggaacgccgagaattggggccagggaacccaagtgacagtgtctagcctcgaggacctgaagaacgtgttcccacctgaggtggccgtgttcgagcctagcgaggccgagatcagccacacccagaaagccaccctcgtgtgcctggctaccggcttctaccccgaccatgtggaactgtcttggtgggtcaacggcaaagaggtgcacagcggcgtgtctaccgacccccagccactgaaagaacagcccgccctgaacgacagccggtactgcctgagcagcagactgagagtgtccgccaccttctggcagaacccccggaaccacttcagatgccaggtgcagttctacggcctgagcgagaacgacgagtggacccaggacagagccaagcccgtgacccagatcgtgtctgccgaagcctggggcagagccgattgcggatccctgtgggtttcacagcctccagagatcagaaccctggaaggcagcagcgccttcctgccttgcagcttcaatgcctctcagggcagactggctatcggcagcgtgacctggttcagagatgaggtggtgcccggcaaagaagtgcggaacggcacccctgagtttagaggaaggctggcccctctggcctccagcagatttctgcacgatcaccaggccgagctgcacatcagagatgtgcgaggacacgacgccagcatctacgtgtgcagagtggaagtgctcggcctcggagttggcacaggcaatggaacaagactggtggtggaaaaagagcaccctcagctcggagccggaacagtgctgcttctgagagccggcttttacgccgtgtcctttctgtctgtggccgtgggcagcaccgtgtactatcagggcaagtgcctgacctggaagggacctagaaggcaactgcctgctgtggtgcctgctcctttgcctcctccatgtggaagctctgcccatctgctgccacctgttccaggcggaagggccaagcgatctggatctggagcaacaaacttctcactactcaaacaagcaggtgacgtggaggagaatcccgggcctactagtatggactggatttggcgcatccttttccttgtcggcgctgctaccggcgcgcattccgggcccgaagtgcaactggttgaatccggtggcggcctggtgcaagcaggcggatctctcagacttagctgtgccgcctccggcagaaccttcacaatgggatggtttaggcaggctccagggaaagagagagagttcgtcgccgccatctctctgtctcccacactggcctactacgccgactctgtgaaaggccggttcaccatctccagagataatgccaagaacaccgtggtgctgcaaatgaactctctgaaacccgaggatacagccctgtactattgtgccgctgaccggaagtccgtgatgagcatcagacccgattactggggacagggcacacaagtcacagtgtcctctacgcgtatccagaaccctgatcctgccgtgtaccagctgcgggatagcaagagcagcgacaagagcgtgtgtctgttcaccgacttcgacagccagaccaacgtgtcccagagcaaggactccgacgtgtacatcaccgataagaccgtgctggacatgcggagcatggacttcaagagcaactccgccgtggcctggtccaacaagtccgatttcgcctgcgccaacgccttcaacaacagcattatccccgaggacacattcttcccaagccccgagagcagctgcggtaccctgtgggtgtcccagccacctgaaattcggacactggaaggctcctccgcctttctgccctgtagctttaacgccagccaggggagactcgccatcggctctgtgacatggttccgggatgaagtcgtccctggaaaagaagttcgcaacggaacaccagagttcagaggcagactcgccccactggcaagctccagattcctgcatgaccatcaggctgaactgcacattagggacgtgcggggccacgatgcctccatctatgtgtgtcgggtcgaagtgcttggactcggcgtcggaactggaaacggcactaggctggtggtcgagaaagaacatccacagcttggcgctggcaccgtcctgttgcttagagccggattctatgccgtcagcttcctgtccgtggctgtggggtctacagtgtattaccagggaaaatgtctcacctggaaaggccccagacgccagcttccagctgttgttcctgctccactgccaccaccttgtggctcctctgctcacttgcttccaccagtgcctggcggacgcgccaagagaagcggatctggcgtgaagcagaccctgaatttcgacctgctgaagctggctggcgacgtggaatccaacccaggcccttctagaggccatatgaccgagtacaagcccacggtgcgcctcgccacccgcgacgacgtccccagggccgtacgcaccctcgccgccgcgttcgccgactaccccgccacgcgccacaccgtcgatccggaccgccacatcgagcgggtcaccgagctgcaagaactcttcctcacgcgcgtcgggctcgacatcggcaaggtgtgggtcgcggacgacggcgccgcggtggcggtctggaccacgccggagagcgtcgaagcgggggcggtgttcgccgagatcggcccgcgcatggccgagttgagcggttcccggctggccgcgcagcaacagatggaaggcctcctggcgccgcaccggcccaaggagcccgcgtggttcctggccaccgtcggcgtctcgcccgaccaccagggcaagggtctgggcagcgccgtcgtgctccccggagtggaggcggccgagcgcgccggggtgcccgccttcctggagacctccgcgccccgcaacctccccttctacgagcggctcggcttcaccgtcaccgccgacgtcgaggtgcccgaaggaccgcgcacctggtgcatgacccgcaagcccggtgcctga

SEQ ID NO: 1612 - DNA, 1737 bp, Artificial Sequence
  Synthetic Polynucleotide
atggccttaccagtgaccgccttgctcctgccgctggccttgctgctccacgccgccaggccggcatgcgaagtgcagctgcttgaaagtggcggcggactgattcagcctggcggatctctgagactgagctgtgccgccagcggcttcaccttttctagccacgccatgacctgggtccgacaggcacctggaaaagggcttgaatgggtgtccgccatcagcggctctggcgattacacacactacgccgacagcgtgaagggcagattcaccatcagcagagacaacagcaagaacaccgtgtacctccagatgaacagcctgagagccgaggacagcgccgtgtattattgcgccaaggatgaggatggcggcagcctgcttggacacagaggacaaggcaccctggtcaccgtttcttccggtaccggcggaggcggatctggcggcggaggtagcggtggcggaggatctgaattcggatctctcgagctgtgggtttcacagcctccagagatcagaaccctggaaggcagcagcgccttcctgccttgcagcttcaatgcctctcagggcagactggctatcggcagcgtgacctggttcagagatgaggtggtgcccggcaaagaagtgcggaacggcacccctgagtttagaggaaggctggcccctctggcctccagcagatttctgcacgatcaccaggccgagctgcacatcagagatgtgcgaggacacgacgccagcatctacgtgtgcagagtggaagtgctcggcctcggagttggcacaggcaatggaacaagactggtggtggaaaaagagcaccctcagctcggagccggaacagtgctgcttctgagagccggcttttacgccgtgtcctttctgtctgtggccgtgggcagcaccgtgtactatcagggcaagtgcctgacctggaagggacctagaaggcaactgcctgctgtggtgcctgctcctttgcctcctccatgtggaagctctgcccatctgctgccacctgttccaggcggaagggccaagcgatctggatctggagcaacaaacttctcactactcaaacaagcaggtgacgtggaggagaatcccgggcctactagaggccatatgaccgagtacaagcccacggtgcgcctcgccacccgcgacgacgtccccagggccgtacgcaccctcgccgccgcgttcgccgactaccccgccacgcgccacaccgtcgatccggaccgccacatcgagcgggtcaccgagctgcaagaactcttcctcacgcgcgtcgggctcgacatcggcaaggtgtgggtcgcggacgacggcgccgcggtggcggtctggaccacgccggagagcgtcgaagcgggggcggtgttcgccgagatcggcccgcgcatggccgagttgagcggttcccggctggccgcgcagcaacagatggaaggcctcctggcgccgcaccggcccaaggagcccgcgtggttcctggccaccgtcggcgtctcgcccgaccaccagggcaagggtctgggcagcgccgtcgtgctccccggagtggaggcggccgagcgcgccggggtgcccgccttcctggagacctccgcgccccgcaacctccccttctacgagcggctcggcttcaccgtcaccgccgacgtcgaggtgcccgaaggaccgcgcacctggtgcatgacccgcaagcccggtgcctga

SEQ ID NO: 1613 - DNA, 2877 bp, Artificial Sequence
  Synthetic Polynucleotide
atggccttaccagtgaccgccttgctcctgccgctggccttgctgctccacgccgccaggccggacatccagatgacacagagccctagcagcctgtctgccagcgtgggagacagagtgaccatcacatgcaaggccagcgaccacatcaacaactggctggcctggtatcagcagaagcctggacaggcccctaagctgctgatctacggcgctaccacactggaaacaggcgtgcccagcagattttctggcagcggctctggcaccgactacaccctgacaatatccagcctccagcctgaggacttcgccacctactactgtcagcagagctggaacaccccttggacattcggccagggcaccaagctggaaatcaagagactcgagctgtgggtttcacagcctccagagatcagaaccctggaaggcagcagcgccttcctgccttgcagcttcaatgcctctcagggcagactggctatcggcagcgtgacctggttcagagatgaggtggtgcccggcaaagaagtgcggaacggcacccctgagtttagaggaaggctggcccctctggcctccagcagatttctgcacgatcaccaggccgagctgcacatcagagatgtgcgaggacacgacgccagcatctacgtgtgcagagtggaagtgctcggcctcggagttggcacaggcaatggaacaagactggtggtggaaaaagagcaccctcagctcggagccggaacagtgctgcttctgagagccggcttttacgccgtgtcctttctgtctgtggccgtgggcagcaccgtgtactatcagggcaagtgcctgacctggaagggacctagaaggcaactgcctgctgtggtgcctgctcctttgcctcctccatgtggaagctctgcccatctgctgccacctgttccaggcggaagggccaagcgatctggatctggagcaacaaacttctcactactcaaacaagcaggtgacgtggaggagaatcccgggcctactagtatggactggatttggcgcatccttttccttgtcggcgctgctaccggcgcgcattccttcgaacaagttcagcttcaacagcctggcgctgagctggtcaaacctggcgcttctgtgaagatgagctgcaaagccagcggctacgccttcagcagctactggatcaactggatgaagcagaaacccggccagggactcgaatggatcggccaaatctatcccggcgacggcgacaccaactacaacggcaagttcaagggcagagccacactgaccgccgatacctctagcagcacagcctacatgcagctgagcagcctgaccagcgaagatagcgccgtgtacttctgtgcccggtccatcacaacagtcgtgggctgcgctatggactattggggccagggaacaagcgtgaccgtgtctagtacgcgtggaatgaggactgaggatcttcccaaagctgtcgtctttctcgaaccccaatggtatcgggtgctcgaaaaagactctgtgacactgaaatgccaaggggcctactctcccgaggacaactccacacagtggtttcataatgagtccctcatcagctctcaggccagctcttatttcattgatgccgctacagtggacgactccggcgagtatcggtgtcagaccaatctgtctacactgtctgaccccgtgcagcttgaggtccacattggatggttgctcttgcaagccccacgctgggttttcaaagaggaagatccaatccatctgcggtgccacagctggaaaaacaccgctctccacaaagtcacatacctgcaaaatggcaaaggacgcaaatacttccatcacaattccgatttttacattccgaaggctaccctgaaagacagcggcagctatttctgccggggactcgtcggctccaagaatgtgtcctccgaaaccgtgaatatcacgattacccaaggactggctgtgcctacaatctctagcttctttccgcctggataccaagtctccttctgtcttgtgatggtcctcctgtttgctgtggacacaggactgtacttttccgtgaaaacgaacatccgcagctccacacgcgattggaaagatcacaagtttaaatggcgcaaagatccccaggacaagcgcgccaagagaagcggatctggcgtgaagcagaccctgaatttcgacctgctgaagctggctggcgacgtggaatccaacccaggcccttctagaggccatatgaccgagtacaagcccacggtgcgcctcgccacccgcgacgacgtccccagggccgtacgcaccctcgccgccgcgttcgccgactaccccgccacgcgccacaccgtcgatccggaccgccacatcgagcgggtcaccgagctgcaagaactcttcctcacgcgcgtcgggctcgacatcggcaaggtgtgggtcgcggacgacggcgccgcggtggcggtctggaccacgccggagagcgtcgaagcgggggcggtgttcgccgagatcggcccgcgcatggccgagttgagcggttcccggctggccgcgcagcaacagatggaaggcctcctggcgccgcaccggcccaaggagcccgcgtggttcctggccaccgtcggcgtctcgcccgaccaccagggcaagggtctgggcagcgccgtcgtgctccccggagtggaggcggccgagcgcgccggggtgcccgccttcctggagacctccgcgccccgcaacctccccttctacgagcggctcggcttcaccgtcaccgccgacgtcgaggtgcccgaaggaccgcgcacctggtgcatgacccgcaagcccggtgcctga

SEQ ID NO: 1614 - DNA, 3039 bp, Artificial Sequence
  Synthetic Polynucleotide
atggccttaccagtgaccgccttgctcctgccgctggccttgctgctccacgccgccaggccggcatgcgaagtgcagctgcttgaaagtggcggcggactgattcagcctggcggatctctgagactgagctgtgccgccagcggcttcaccttttctagccacgccatgacctgggtccgacaggcacctggaaaagggcttgaatgggtgtccgccatcagcggctctggcgattacacacactacgccgacagcgtgaagggcagattcaccatcagcagagacaacagcaagaacaccgtgtacctccagatgaacagcctgagagccgaggacagcgccgtgtattattgcgccaaggatgaggatggcggcagcctgcttggacacagaggacaaggcaccctggtcaccgtttcttccggtaccggcggaggcggatctggcggcggaggtagcggtggcggaggatctgaattcggatctctcgagctgtgggtttcacagcctccagagatcagaaccctggaaggcagcagcgccttcctgccttgcagcttcaatgcctctcagggcagactggctatcggcagcgtgacctggttcagagatgaggtggtgcccggcaaagaagtgcggaacggcacccctgagtttagaggaaggctggcccctctggcctccagcagatttctgcacgatcaccaggccgagctgcacatcagagatgtgcgaggacacgacgccagcatctacgtgtgcagagtggaagtgctcggcctcggagttggcacaggcaatggaacaagactggtggtggaaaaagagcaccctcagctcggagccggaacagtgctgcttctgagagccggcttttacgccgtgtcctttctgtctgtggccgtgggcagcaccgtgtactatcagggcaagtgcctgacctggaagggacctagaaggcaactgcctgctgtggtgcctgctcctttgcctcctccatgtggaagctctgcccatctgctgccacctgttccaggcggaagggccaagcgatctggatctggagcaacaaacttctcactactcaaacaagcaggtgacgtggaggagaatcccgggcctactagtgccaccatggactggatttggcgcatccttttccttgtcggcgctgctaccggcgcccattccgggcccgaagtgcagctggttgaatctggcggaggactggttcaggctggcggatctctgagactgtcttgtgccgccagcggcagaacctttagcatgggctggtttagacaggcccctggcaaagagagagagttcgtcgccgccatcacatactctggcggcagcccttactacgccgactctgtgaagggcagattcaccatcagccgggacaacgccaagaacaccgtgtacctccagatgaacagcctgaagcctgaggacaccgccgtgtactactgcgccgccaatccaacatacggcagcgactggaacgccgagaattggggccagggaacccaagtgacagtgtctagcggatccggcggcggaggatctggcggaggcggatctgggggcggaggctctttcgaaggcagcacgcgtggaatgaggactgaggatcttcccaaagctgtcgtctttctcgaaccccaatggtatcgggtgctcgaaaaagactctgtgacactgaaatgccaaggggcctactctcccgaggacaactccacacagtggtttcataatgagtccctcatcagctctcaggccagctcttatttcattgatgccgctacagtggacgactccggcgagtatcggtgtcagaccaatctgtctacactgtctgaccccgtgcagcttgaggtccacattggatggttgctcttgcaagccccacgctgggttttcaaagaggaagatccaatccatctgcggtgccacagctggaaaaacaccgctctccacaaagtcacatacctgcaaaatggcaaaggacgcaaatacttccatcacaattccgatttttacattccgaaggctaccctgaaagacagcggcagctatttctgccggggactcgtcggctccaagaatgtgtcctccgaaaccgtgaatatcacgattacccaaggactggctgtgcctacaatctctagcttctttccgcctggataccaagtctccttctgtcttgtgatggtcctcctgtttgctgtggacacaggactgtacttttccgtgaaaacgaacatccgcagctccacacgcgattggaaagatcacaagtttaaatggcgcaaagatccccaggacaagcgcgccaagagaagcggatctggcgtgaagcagaccctgaatttcgacctgctgaagctggctggcgacgtggaatccaacccaggcccttctagaggccatatgaccgagtacaagcccacggtgcgcctcgccacccgcgacgacgtccccagggccgtacgcaccctcgccgccgcgttcgccgactaccccgccacgcgccacaccgtcgatccggaccgccacatcgagcgggtcaccgagctgcaagaactcttcctcacgcgcgtcgggctcgacatcggcaaggtgtgggtcgcggacgacggcgccgcggtggcggtctggaccacgccggagagcgtcgaagcgggggcggtgttcgccgagatcggcccgcgcatggccgagttgagcggttcccggctggccgcgcagcaacagatggaaggcctcctggcgccgcaccggcccaaggagcccgcgtggttcctggccaccgtcggcgtctcgcccgaccaccagggcaagggtctgggcagcgccgtcgtgctccccggagtggaggcggccgagcgcgccggggtgcccgccttcctggagacctccgcgccccgcaacctccccttctacgagcggctcggcttcaccgtcaccgccgacgtcgaggtgcccgaaggaccgcgcacctggtgcatgacccgcaagcccggtgcctga

SEQ ID NO: 1615 - DNA, 3489 bp, Artificial Sequence
  Synthetic Polynucleotide
atggccttaccagtgaccgccttgctcctgccgctggccttgctgctccacgccgccaggccggacatccagatgacacagagccctagcagcctgtctgccagcgtgggagacagagtgaccatcacatgcaaggccagcgaccacatcaacaactggctggcctggtatcagcagaagcctggacaggcccctaagctgctgatctacggcgctaccacactggaaacaggcgtgcccagcagattttctggcagcggctctggcaccgactacaccctgacaatatccagcctccagcctgaggacttcgccacctactactgtcagcagagctggaacaccccttggacattcggccagggcaccaagctggaaatcaagagactcgagggacagcctaaggccaatcctaccgtgacactgttccctccaagcagcgaagaactccaggccaacaaggccacacttgtgtgcctgatctccgacttctaccctggggctgtgacagtggcttggaaggccgatggatctcctgtgaaagccggcgtggaaaccaccaagccatccaagcagagcaacaacaaatacgccgccagctcctacctgagcctgacacctgagcagtggaagtcccacagatcctacagctgccaagtgacccacgaaggcagcaccgtggaaaagacagtggcccctacagagtgcagcggatccctgtgggtttcacagcctccagagatcagaaccctggaaggcagcagcgccttcctgccttgcagcttcaatgcctctcagggcagactggctatcggcagcgtgacctggttcagagatgaggtggtgcccggcaaagaagtgcggaacggcacccctgagtttagaggaaggctggcccctctggcctccagcagatttctgcacgatcaccaggccgagctgcacatcagagatgtgcgaggacacgacgccagcatctacgtgtgcagagtggaagtgctcggcctcggagttggcacaggcaatggaacaagactggtggtggaaaaagagcaccctcagctcggagccggaacagtgctgcttctgagagccggcttttacgccgtgtcctttctgtctgtggccgtgggcagcaccgtgtactatcagggcaagtgcctgacctggaagggacctagaaggcaactgcctgctgtggtgcctgctcctttgcctcctccatgtggaagctctgcccatctgctgccacctgttccaggcggaagggccaagcgatctggatctggagcaacaaacttctcactactcaaacaagcaggtgacgtggaggagaatcccgggcctactagtatggactggatttggcgcatccttttccttgtcggcgctgctaccggcgcgcattccttcgaacaagttcagcttcaacagcctggcgctgagctggtcaaacctggcgcttctgtgaagatgagctgcaaagccagcggctacgccttcagcagctactggatcaactggatgaagcagaaacccggccagggactcgaatggatcggccaaatctatcccggcgacggcgacaccaactacaacggcaagttcaagggcagagccacactgaccgccgatacctctagcagcacagcctacatgcagctgagcagcctgaccagcgaagatagcgccgtgtacttctgtgcccggtccatcacaacagtcgtgggctgcgctatggactattggggccagggaacaagcgtgaccgtgtctagtacgcgtgcctctacaaagggaccctccgtgtttcctctggctcccagcagcaagtctacaagcggaggaacagccgctctgggctgcctggtcaaggattactttcccgagcctgtgaccgtgtcctggaatagcggagcactgacaagcggcgtgcacacctttccagccgtgctgcaaagcagcggcctgtactctctgagcagcgtggtcacagtgcctagctctagcctgggcacccagacctacatctgcaatgtgaaccacaagcctagcaacaccaaggtggacaagagagtggaacccaagagctgtggtaccggaatgaggactgaggatcttcccaaagctgtcgtctttctcgaaccccaatggtatcgggtgctcgaaaaagactctgtgacactgaaatgccaaggggcctactctcccgaggacaactccacacagtggtttcataatgagtccctcatcagctctcaggccagctcttatttcattgatgccgctacagtggacgactccggcgagtatcggtgtcagaccaatctgtctacactgtctgaccccgtgcagcttgaggtccacattggatggttgctcttgcaagccccacgctgggttttcaaagaggaagatccaatccatctgcggtgccacagctggaaaaacaccgctctccacaaagtcacatacctgcaaaatggcaaaggacgcaaatacttccatcacaattccgatttttacattccgaaggctaccctgaaagacagcggcagctatttctgccggggactcgtcggctccaagaatgtgtcctccgaaaccgtgaatatcacgattacccaaggactggctgtgcctacaatctctagcttctttccgcctggataccaagtctccttctgtcttgtgatggtcctcctgtttgctgtggacacaggactgtacttttccgtgaaaacgaacatccgcagctccacacgcgattggaaagatcacaagtttaaatggcgcaaagatccccaggacaagcgcgccaagagaagcggatctggcgtgaagcagaccctgaatttcgacctgctgaagctggctggcgacgtggaatccaacccaggcccttctagaggcgggatccacaccatggctacctacgaggtgctgtgcgaggtggcaagaaagctgggcaccgacgacagagaagtggtgctgttcctgctgaacgtgttcatccctcagcctacactggcccagctgatcggtgcactgagagccctgaaagaggaaggccggctgacctttcctctgctggccgaatgcctgttcagagccggaagaagggatctgctgcgggacctgctgcatctggaccccagatttctggaaagacacctggccggcaccatgagctacttcagcccttaccagctgaccgtgctgcacgttgacggcgaactgtgcgccagagatattcggagcctgatcttcctgagcaaggacaccatcggcagccggtctacccctcagacatttctgcactgggtgtactgcatggaaaacctggacctgctcggccccacagatgtggatgccctgatgtccatgctgagaagcctgagcagagtggacctccagagacaggtgcagacactgatgggactgcacctgagcggacctagccacagccagcactacagacacacccct

SEQ ID NO: 1616 - DNA, 3648 bp, Artificial Sequence
  Synthetic Polynucleotide
atggccttaccagtgaccgccttgctcctgccgctggccttgctgctccacgccgccaggccggacatccagatgacacagagccctagcagcctgtctgccagcgtgggagacagagtgaccatcacatgcaaggccagcgaccacatcaacaactggctggcctggtatcagcagaagcctggacaggcccctaagctgctgatctacggcgctaccacactggaaacaggcgtgcccagcagattttctggcagcggctctggcaccgactacaccctgacaatatccagcctccagcctgaggacttcgccacctactactgtcagcagagctggaacaccccttggacattcggccagggcaccaagctggaaatcaagagactcgagggacagcctaaggccaatcctaccgtgacactgttccctccaagcagcgaagaactccaggccaacaaggccacacttgtgtgcctgatctccgacttctaccctggggctgtgacagtggcttggaaggccgatggatctcctgtgaaagccggcgtggaaaccaccaagccatccaagcagagcaacaacaaatacgccgccagctcctacctgagcctgacacctgagcagtggaagtcccacagatcctacagctgccaagtgacccacgaaggcagcaccgtggaaaagacagtggcccctacagagtgcagcggatccctgtgggtttcacagcctccagagatcagaaccctggaaggcagcagcgccttcctgccttgcagcttcaatgcctctcagggcagactggctatcggcagcgtgacctggttcagagatgaggtggtgcccggcaaagaagtgcggaacggcacccctgagtttagaggaaggctggcccctctggcctccagcagatttctgcacgatcaccaggccgagctgcacatcagagatgtgcgaggacacgacgccagcatctacgtgtgcagagtggaagtgctcggcctcggagttggcacaggcaatggaacaagactggtggtggaaaaagagcaccctcagctcggagccggaacagtgctgcttctgagagccggcttttacgccgtgtcctttctgtctgtggccgtgggcagcaccgtgtactatcagggcaagtgcctgacctggaagggacctagaaggcaactgcctgctgtggtgcctgctcctttgcctcctccatgtggaagctctgcccatctgctgccacctgttccaggcggaagggccaagcgatctggatctggagcaacaaacttctcactactcaaacaagcaggtgacgtggaggagaatcccgggcctactagtatggactggatttggcgcatccttttccttgtcggcgctgctaccggcgcgcattccttcgaacaagttcagcttcaacagcctggcgctgagctggtcaaacctggcgcttctgtgaagatgagctgcaaagccagcggctacgccttcagcagctactggatcaactggatgaagcagaaacccggccagggactcgaatggatcggccaaatctatcccggcgacggcgacaccaactacaacggcaagttcaagggcagagccacactgaccgccgatacctctagcagcacagcctacatgcagctgagcagcctgaccagcgaagatagcgccgtgtacttctgtgcccggtccatcacaacagtcgtgggctgcgctatggactattggggccagggaacaagcgtgaccgtgtctagtacgcgtgcctctacaaagggaccctccgtgtttcctctggctcccagcagcaagtctacaagcggaggaacagccgctctgggctgcctggtcaaggattactttcccgagcctgtgaccgtgtcctggaatagcggagcactgacaagcggcgtgcacacctttccagccgtgctgcaaagcagcggcctgtactctctgagcagcgtggtcacagtgcctagctctagcctgggcacccagacctacatctgcaatgtgaaccacaagcctagcaacaccaaggtggacaagagagtggaacccaagagctgtggtaccggaatgaggactgaggatcttcccaaagctgtcgtctttctcgaaccccaatggtatcgggtgctcgaaaaagactctgtgacactgaaatgccaaggggcctactctcccgaggacaactccacacagtggtttcataatgagtccctcatcagctctcaggccagctcttatttcattgatgccgctacagtggacgactccggcgagtatcggtgtcagaccaatctgtctacactgtctgaccccgtgcagcttgaggtccacattggatggttgctcttgcaagccccacgctgggttttcaaagaggaagatccaatccatctgcggtgccacagctggaaaaacaccgctctccacaaagtcacatacctgcaaaatggcaaaggacgcaaatacttccatcacaattccgatttttacattccgaaggctaccctgaaagacagcggcagctatttctgccggggactcgtcggctccaagaatgtgtcctccgaaaccgtgaatatcacgattacccaaggactggctgtgcctacaatctctagcttctttccgcctggataccaagtctccttctgtcttgtgatggtcctcctgtttgctgtggacacaggactgtacttttccgtgaaaacgaacatccgcagctccacacgcgattggaaagatcacaagtttaaatggcgcaaagatccccaggacaagcgcgccaagagaagcggatctggcgtgaagcagaccctgaatttcgacctgctgaagctggctggcgacgtggaatccaacccaggcccttctagaggcgggatccacaccatgtccgactccaaggaggtccctagccttccatttttgcgacacttgctcgaagagttggacagccatgaggacagcttgctgctgtttctgtgtcacgacgcggccccgggctgcacgacggtcacgcaagctttgtgctcgcttagccaacagcgcaagctgaccctcgcggctctggtcgagatgctctacgtgctgcagcgtatggatcttctcaagagccgcttcgggctcagcaaggagggggccgagcaattgctgggcacaagctttctcacgcgctaccgcaagctcatggtttgcgtgggtgaggagctcgactcgagcgagctacgcgctctacgcttgttcgcgtgcaacctgaatccgagcctgagcacggcgctttctgagagcagccgctttgtcgagcttgtactcgcgcttgaaaacgtaggactcgtctcgccatcgagtgtttccgtgcttgcggacatgttgcgcactcttcggcgcctcgatttgtgccagcagcttgttgagtacgaacaacaagagcaagccaggtaccgttactgttacgcggcctcgccctcattgccagttcgtacgttacgtcgggggcacggcgcgagtgaacacgagcagctgtgcatgcccgtgcaagaatcctctgacagccccgagctgctgcgcacgcccgtacaagaatcctccagcgacagccccgagcaaacgact

SEQ ID NO: 1617 - DNA, 3516 bp, Artificial Sequence
  Synthetic Polynucleotide
atggccttaccagtgaccgccttgctcctgccgctggccttgctgctccacgccgccaggccggacatccagatgacacagagccctagcagcctgtctgccagcgtgggagacagagtgaccatcacatgcaaggccagcgaccacatcaacaactggctggcctggtatcagcagaagcctggacaggcccctaagctgctgatctacggcgctaccacactggaaacaggcgtgcccagcagattttctggcagcggctctggcaccgactacaccctgacaatatccagcctccagcctgaggacttcgccacctactactgtcagcagagctggaacaccccttggacattcggccagggcaccaagctggaaatcaagagactcgagggacagcctaaggccaatcctaccgtgacactgttccctccaagcagcgaagaactccaggccaacaaggccacacttgtgtgcctgatctccgacttctaccctggggctgtgacagtggcttggaaggccgatggatctcctgtgaaagccggcgtggaaaccaccaagccatccaagcagagcaacaacaaatacgccgccagctcctacctgagcctgacacctgagcagtggaagtcccacagatcctacagctgccaagtgacccacgaaggcagcaccgtggaaaagacagtggcccctacagagtgcagcggatccctgtgggtttcacagcctccagagatcagaaccctggaaggcagcagcgccttcctgccttgcagcttcaatgcctctcagggcagactggctatcggcagcgtgacctggttcagagatgaggtggtgcccggcaaagaagtgcggaacggcacccctgagtttagaggaaggctggcccctctggcctccagcagatttctgcacgatcaccaggccgagctgcacatcagagatgtgcgaggacacgacgccagcatctacgtgtgcagagtggaagtgctcggcctcggagttggcacaggcaatggaacaagactggtggtggaaaaagagcaccctcagctcggagccggaacagtgctgcttctgagagccggcttttacgccgtgtcctttctgtctgtggccgtgggcagcaccgtgtactatcagggcaagtgcctgacctggaagggacctagaaggcaactgcctgctgtggtgcctgctcctttgcctcctccatgtggaagctctgcccatctgctgccacctgttccaggcggaagggccaagcgatctggatctggagcaacaaacttctcactactcaaacaagcaggtgacgtggaggagaatcccgggcctactagtatggactggatttggcgcatccttttccttgtcggcgctgctaccggcgcgcattccttcgaacaagttcagcttcaacagcctggcgctgagctggtcaaacctggcgcttctgtgaagatgagctgcaaagccagcggctacgccttcagcagctactggatcaactggatgaagcagaaacccggccagggactcgaatggatcggccaaatctatcccggcgacggcgacaccaactacaacggcaagttcaagggcagagccacactgaccgccgatacctctagcagcacagcctacatgcagctgagcagcctgaccagcgaagatagcgccgtgtacttctgtgcccggtccatcacaacagtcgtgggctgcgctatggactattggggccagggaacaagcgtgaccgtgtctagtacgcgtgcctctacaaagggaccctccgtgtttcctctggctcccagcagcaagtctacaagcggaggaacagccgctctgggctgcctggtcaaggattactttcccgagcctgtgaccgtgtcctggaatagcggagcactgacaagcggcgtgcacacctttccagccgtgctgcaaagcagcggcctgtactctctgagcagcgtggtcacagtgcctagctctagcctgggcacccagacctacatctgcaatgtgaaccacaagcctagcaacaccaaggtggacaagagagtggaacccaagagctgtggtaccggaatgaggactgaggatcttcccaaagctgtcgtctttctcgaaccccaatggtatcgggtgctcgaaaaagactctgtgacactgaaatgccaaggggcctactctcccgaggacaactccacacagtggtttcataatgagtccctcatcagctctcaggccagctcttatttcattgatgccgctacagtggacgactccggcgagtatcggtgtcagaccaatctgtctacactgtctgaccccgtgcagcttgaggtccacattggatggttgctcttgcaagccccacgctgggttttcaaagaggaagatccaatccatctgcggtgccacagctggaaaaacaccgctctccacaaagtcacatacctgcaaaatggcaaaggacgcaaatacttccatcacaattccgatttttacattccgaaggctaccctgaaagacagcggcagctatttctgccggggactcgtcggctccaagaatgtgtcctccgaaaccgtgaatatcacgattacccaaggactggctgtgcctacaatctctagcttctttccgcctggataccaagtctccttctgtcttgtgatggtcctcctgtttgctgtggacacaggactgtacttttccgtgaaaacgaacatccgcagctccacacgcgattggaaagatcacaagtttaaatggcgcaaagatccccaggacaagcgcgccaagagaagcggatctggcgtgaagcagaccctgaatttcgacctgctgaagctggctggcgacgtggaatccaacccaggcccttctagaggccatatgaccgagtacaagcccacggtgcgcctcgccacccgcgacgacgtccccagggccgtacgcaccctcgccgccgcgttcgccgactaccccgccacgcgccacaccgtcgatccggaccgccacatcgagcgggtcaccgagctgcaagaactcttcctcacgcgcgtcgggctcgacatcggcaaggtgtgggtcgcggacgacggcgccgcggtggcggtctggaccacgccggagagcgtcgaagcgggggcggtgttcgccgagatcggcccgcgcatggccgagttgagcggttcccggctggccgcgcagcaacagatggaaggcctcctggcgccgcaccggcccaaggagcccgcgtggttcctggccaccgtcggcgtctcgcccgaccaccagggcaagggtctgggcagcgccgtcgtgctccccggagtggaggcggccgagcgcgccggggtgcccgccttcctggagacctccgcgccccgcaacctccccttctacgagcggctcggcttcaccgtcaccgccgacgtcgaggtgcccgaaggaccgcgcacctggtgcatgacccgcaagcccggtgcctga

SEQ ID NO: 1618 - DNA, 3927 bp, Artificial Sequence
  Synthetic Polynucleotide
atggccttaccagtgaccgccttgctcctgccgctggccttgctgctccacgccgccaggccggaagtgcagctggttgaatctggcggaggactggttcaggctggcggatctctgagactgtcttgtgccgccagcggcagaacctttagcatgggctggtttagacaggcccctggcaaagagagagagttcgtcgccgccatcacatactctggcggcagcccttactacgccgactctgtgaagggcagattcaccatcagccgggacaacgccaagaacaccgtgtacctccagatgaacagcctgaagcctgaggacaccgccgtgtactactgcgccgccaatccaacatacggcagcgactggaacgccgagaattggggccagggaacccaagtgacagtgtctagcggtaccggcggaggcggatctggcggcggaggtagcggtggcggaggatctgaattcgacatccagatgacacagagccctagcagcctgtctgccagcgtgggagacagagtgaccatcacatgcaaggccagcgaccacatcaacaactggctggcctggtatcagcagaagcctggacaggcccctaagctgctgatctacggcgctaccacactggaaacaggcgtgcccagcagattttctggcagcggctctggcaccgactacaccctgacaatatccagcctccagcctgaggacttcgccacctactactgtcagcagagctggaacaccccttggacattcggccagggcaccaagctggaaatcaagagactcgagggacagcctaaggccaatcctaccgtgacactgttccctccaagcagcgaagaactccaggccaacaaggccacacttgtgtgcctgatctccgacttctaccctggggctgtgacagtggcttggaaggccgatggatctcctgtgaaagccggcgtggaaaccaccaagccatccaagcagagcaacaacaaatacgccgccagctcctacctgagcctgacacctgagcagtggaagtcccacagatcctacagctgccaagtgacccacgaaggcagcaccgtggaaaagacagtggcccctacagagtgcagcggatccctgtgggtttcacagcctccagagatcagaaccctggaaggcagcagcgccttcctgccttgcagcttcaatgcctctcagggcagactggctatcggcagcgtgacctggttcagagatgaggtggtgcccggcaaagaagtgcggaacggcacccctgagtttagaggaaggctggcccctctggcctccagcagatttctgcacgatcaccaggccgagctgcacatcagagatgtgcgaggacacgacgccagcatctacgtgtgcagagtggaagtgctcggcctcggagttggcacaggcaatggaacaagactggtggtggaaaaagagcaccctcagctcggagccggaacagtgctgcttctgagagccggcttttacgccgtgtcctttctgtctgtggccgtgggcagcaccgtgtactatcagggcaagtgcctgacctggaagggacctagaaggcaactgcctgctgtggtgcctgctcctttgcctcctccatgtggaagctctgcccatctgctgccacctgttccaggcggaagggccaagcgatctggatctggagcaacaaacttctcactactcaaacaagcaggtgacgtggaggagaatcccgggcctactagtatggactggatttggcgcatccttttccttgtcggcgctgctaccggcgcgcattccttcgaacaagttcagcttcaacagcctggcgctgagctggtcaaacctggcgcttctgtgaagatgagctgcaaagccagcggctacgccttcagcagctactggatcaactggatgaagcagaaacccggccagggactcgaatggatcggccaaatctatcccggcgacggcgacaccaactacaacggcaagttcaagggcagagccacactgaccgccgatacctctagcagcacagcctacatgcagctgagcagcctgaccagcgaagatagcgccgtgtacttctgtgcccggtccatcacaacagtcgtgggctgcgctatggactattggggccagggaacaagcgtgaccgtgtctagtacgcgtgcctctacaaagggaccctccgtgtttcctctggctcccagcagcaagtctacaagcggaggaacagccgctctgggctgcctggtcaaggattactttcccgagcctgtgaccgtgtcctggaatagcggagcactgacaagcggcgtgcacacctttccagccgtgctgcaaagcagcggcctgtactctctgagcagcgtggtcacagtgcctagctctagcctgggcacccagacctacatctgcaatgtgaaccacaagcctagcaacaccaaggtggacaagagagtggaacccaagagctgtggtaccggaatgaggactgaggatcttcccaaagctgtcgtctttctcgaaccccaatggtatcgggtgctcgaaaaagactctgtgacactgaaatgccaaggggcctactctcccgaggacaactccacacagtggtttcataatgagtccctcatcagctctcaggccagctcttatttcattgatgccgctacagtggacgactccggcgagtatcggtgtcagaccaatctgtctacactgtctgaccccgtgcagcttgaggtccacattggatggttgctcttgcaagccccacgctgggttttcaaagaggaagatccaatccatctgcggtgccacagctggaaaaacaccgctctccacaaagtcacatacctgcaaaatggcaaaggacgcaaatacttccatcacaattccgatttttacattccgaaggctaccctgaaagacagcggcagctatttctgccggggactcgtcggctccaagaatgtgtcctccgaaaccgtgaatatcacgattacccaaggactggctgtgcctacaatctctagcttctttccgcctggataccaagtctccttctgtcttgtgatggtcctcctgtttgctgtggacacaggactgtacttttccgtgaaaacgaacatccgcagctccacacgcgattggaaagatcacaagtttaaatggcgcaaagatccccaggacaagcgcgccaagagaagcggatctggcgtgaagcagaccctgaatttcgacctgctgaagctggctggcgacgtggaatccaacccaggcccttctagaggccatatgaccgagtacaagcccacggtgcgcctcgccacccgcgacgacgtccccagggccgtacgcaccctcgccgccgcgttcgccgactaccccgccacgcgccacaccgtcgatccggaccgccacatcgagcgggtcaccgagctgcaagaactcttcctcacgcgcgtcgggctcgacatcggcaaggtgtgggtcgcggacgacggcgccgcggtggcggtctggaccacgccggagagcgtcgaagcgggggcggtgttcgccgagatcggcccgcgcatggccgagttgagcggttcccggctggccgcgcagcaacagatggaaggcctcctggcgccgcaccggcccaaggagcccgcgtggttcctggccaccgtcggcgtctcgcccgaccaccagggcaagggtctgggcagcgccgtcgtgctccccggagtggaggcggccgagcgcgccggggtgcccgccttcctggagacctccgcgccccgcaacctccccttctacgagcggctcggcttcaccgtcaccgccgacgtcgaggtgcccgaaggaccgcgcacctggtgcatgacccgcaagcccggtgcctga

SEQ ID NO: 1619 - DNA, 4338 bp, Artificial Sequence
  Synthetic Polynucleotide
atggccttaccagtgaccgccttgctcctgccgctggccttgctgctccacgccgccaggccggaagtgcagctggttgaatctggcggaggactggttcaggctggcggatctctgagactgtcttgtgccgccagcggcagaacctttagcatgggctggtttagacaggcccctggcaaagagagagagttcgtcgccgccatcacatactctggcggcagcccttactacgccgactctgtgaagggcagattcaccatcagccgggacaacgccaagaacaccgtgtacctccagatgaacagcctgaagcctgaggacaccgccgtgtactactgcgccgccaatccaacatacggcagcgactggaacgccgagaattggggccagggaacccaagtgacagtgtctagcggtaccggcggaggcggatctggcggcggaggtagcggtggcggaggatctgaattcgacatccagatgacacagagccctagcagcctgtctgccagcgtgggagacagagtgaccatcacatgcaaggccagcgaccacatcaacaactggctggcctggtatcagcagaagcctggacaggcccctaagctgctgatctacggcgctaccacactggaaacaggcgtgcccagcagattttctggcagcggctctggcaccgactacaccctgacaatatccagcctccagcctgaggacttcgccacctactactgtcagcagagctggaacaccccttggacattcggccagggcaccaagctggaaatcaagagactcgagggacagcctaaggccaatcctaccgtgacactgttccctccaagcagcgaagaactccaggccaacaaggccacacttgtgtgcctgatctccgacttctaccctggggctgtgacagtggcttggaaggccgatggatctcctgtgaaagccggcgtggaaaccaccaagccatccaagcagagcaacaacaaatacgccgccagctcctacctgagcctgacacctgagcagtggaagtcccacagatcctacagctgccaagtgacccacgaaggcagcaccgtggaaaagacagtggcccctacagagtgcagcggatccctgtgggtttcacagcctccagagatcagaaccctggaaggcagcagcgccttcctgccttgcagcttcaatgcctctcagggcagactggctatcggcagcgtgacctggttcagagatgaggtggtgcccggcaaagaagtgcggaacggcacccctgagtttagaggaaggctggcccctctggcctccagcagatttctgcacgatcaccaggccgagctgcacatcagagatgtgcgaggacacgacgccagcatctacgtgtgcagagtggaagtgctcggcctcggagttggcacaggcaatggaacaagactggtggtggaaaaagagcaccctcagctcggagccggaacagtgctgcttctgagagccggcttttacgccgtgtcctttctgtctgtggccgtgggcagcaccgtgtactatcagggcaagtgcctgacctggaagggacctagaaggcaactgcctgctgtggtgcctgctcctttgcctcctccatgtggaagctctgcccatctgctgccacctgttccaggcggaagggccaagcgatctggatctggagcaacaaacttctcactactcaaacaagcaggtgacgtggaggagaatcccgggcctactagtatggactggatttggcgcatccttttccttgtcggcgctgctaccggcgcgcattccgggcccgaagtgcaactggttgaatccggtggcggcctggtgcaagcaggcggatctctcagacttagctgtgccgcctccggcagaaccttcacaatgggatggtttaggcaggctccagggaaagagagagagttcgtcgccgccatctctctgtctcccacactggcctactacgccgactctgtgaaaggccggttcaccatctccagagataatgccaagaacaccgtggtgctgcaaatgaactctctgaaacccgaggatacagccctgtactattgtgccgctgaccggaagtccgtgatgagcatcagacccgattactggggacagggcacacaagtcacagtgtcctctggatccggcggcggaggatctggcggaggcggatctgggggcggaggctctttcgaacaagttcagcttcaacagcctggcgctgagctggtcaaacctggcgcttctgtgaagatgagctgcaaagccagcggctacgccttcagcagctactggatcaactggatgaagcagaaacccggccagggactcgaatggatcggccaaatctatcccggcgacggcgacaccaactacaacggcaagttcaagggcagagccacactgaccgccgatacctctagcagcacagcctacatgcagctgagcagcctgaccagcgaagatagcgccgtgtacttctgtgcccggtccatcacaacagtcgtgggctgcgctatggactattggggccagggaacaagcgtgaccgtgtctagtacgcgtgcctctacaaagggaccctccgtgtttcctctggctcccagcagcaagtctacaagcggaggaacagccgctctgggctgcctggtcaaggattactttcccgagcctgtgaccgtgtcctggaatagcggagcactgacaagcggcgtgcacacctttccagccgtgctgcaaagcagcggcctgtactctctgagcagcgtggtcacagtgcctagctctagcctgggcacccagacctacatctgcaatgtgaaccacaagcctagcaacaccaaggtggacaagagagtggaacccaagagctgtggtaccggaatgaggactgaggatcttcccaaagctgtcgtctttctcgaaccccaatggtatcgggtgctcgaaaaagactctgtgacactgaaatgccaaggggcctactctcccgaggacaactccacacagtggtttcataatgagtccctcatcagctctcaggccagctcttatttcattgatgccgctacagtggacgactccggcgagtatcggtgtcagaccaatctgtctacactgtctgaccccgtgcagcttgaggtccacattggatggttgctcttgcaagccccacgctgggttttcaaagaggaagatccaatccatctgcggtgccacagctggaaaaacaccgctctccacaaagtcacatacctgcaaaatggcaaaggacgcaaatacttccatcacaattccgatttttacattccgaaggctaccctgaaagacagcggcagctatttctgccggggactcgtcggctccaagaatgtgtcctccgaaaccgtgaatatcacgattacccaaggactggctgtgcctacaatctctagcttctttccgcctggataccaagtctccttctgtcttgtgatggtcctcctgtttgctgtggacacaggactgtacttttccgtgaaaacgaacatccgcagctccacacgcgattggaaagatcacaagtttaaatggcgcaaagatccccaggacaagcgcgccaagagaagcggatctggcgtgaagcagaccctgaatttcgacctgctgaagctggctggcgacgtggaatccaacccaggcccttctagaggccatatgaccgagtacaagcccacggtgcgcctcgccacccgcgacgacgtccccagggccgtacgcaccctcgccgccgcgttcgccgactaccccgccacgcgccacaccgtcgatccggaccgccacatcgagcgggtcaccgagctgcaagaactcttcctcacgcgcgtcgggctcgacatcggcaaggtgtgggtcgcggacgacggcgccgcggtggcggtctggaccacgccggagagcgtcgaagcgggggcggtgttcgccgagatcggcccgcgcatggccgagttgagcggttcccggctggccgcgcagcaacagatggaaggcctcctggcgccgcaccggcccaaggagcccgcgtggttcctggccaccgtcggcgtctcgcccgaccaccagggcaagggtctgggcagcgccgtcgtgctccccggagtggaggcggccgagcgcgccggggtgcccgccttcctggagacctccgcgccccgcaacctccccttctacgagcggctcggcttcaccgtcaccgccgacgtcgaggtgcccgaaggaccgcgcacctggtgcatgacccgcaagcccggtgcctga

SEQ ID NO: 1620 - DNA, 3537 bp, Artificial Sequence
  Synthetic Polynucleotide
atggccttaccagtgaccgccttgctcctgccgctggccttgctgctccacgccgccaggccggaagtgcagctggttgaatctggcggaggactggttcaggctggcggatctctgagactgtcttgtgccgccagcggcagaacctttagcatgggctggtttagacaggcccctggcaaagagagagagttcgtcgccgccatcacatactctggcggcagcccttactacgccgactctgtgaagggcagattcaccatcagccgggacaacgccaagaacaccgtgtacctccagatgaacagcctgaagcctgaggacaccgccgtgtactactgcgccgccaatccaacatacggcagcgactggaacgccgagaattggggccagggaacccaagtgacagtgtctagcctcgagggacagcctaaggccaatcctaccgtgacactgttccctccaagcagcgaagaactccaggccaacaaggccacacttgtgtgcctgatctccgacttctaccctggggctgtgacagtggcttggaaggccgatggatctcctgtgaaagccggcgtggaaaccaccaagccatccaagcagagcaacaacaaatacgccgccagctcctacctgagcctgacacctgagcagtggaagtcccacagatcctacagctgccaagtgacccacgaaggcagcaccgtggaaaagacagtggcccctacagagtgcagcggatccctgtgggtttcacagcctccagagatcagaaccctggaaggcagcagcgccttcctgccttgcagcttcaatgcctctcagggcagactggctatcggcagcgtgacctggttcagagatgaggtggtgcccggcaaagaagtgcggaacggcacccctgagtttagaggaaggctggcccctctggcctccagcagatttctgcacgatcaccaggccgagctgcacatcagagatgtgcgaggacacgacgccagcatctacgtgtgcagagtggaagtgctcggcctcggagttggcacaggcaatggaacaagactggtggtggaaaaagagcaccctcagctcggagccggaacagtgctgcttctgagagccggcttttacgccgtgtcctttctgtctgtggccgtgggcagcaccgtgtactatcagggcaagtgcctgacctggaagggacctagaaggcaactgcctgctgtggtgcctgctcctttgcctcctccatgtggaagctctgcccatctgctgccacctgttccaggcggaagggccaagcgatctggatctggagcaacaaacttctcactactcaaacaagcaggtgacgtggaggagaatcccgggcctactagtatggactggatttggcgcatccttttccttgtcggcgctgctaccggcgcgcattccgggcccgaagtgcaactggttgaatccggtggcggcctggtgcaagcaggcggatctctcagacttagctgtgccgcctccggcagaaccttcacaatgggatggtttaggcaggctccagggaaagagagagagttcgtcgccgccatctctctgtctcccacactggcctactacgccgactctgtgaaaggccggttcaccatctccagagataatgccaagaacaccgtggtgctgcaaatgaactctctgaaacccgaggatacagccctgtactattgtgccgctgaccggaagtccgtgatgagcatcagacccgattactggggacagggcacacaagtcacagtgtcctctacgcgtgcctctacaaagggaccctccgtgtttcctctggctcccagcagcaagtctacaagcggaggaacagccgctctgggctgcctggtcaaggattactttcccgagcctgtgaccgtgtcctggaatagcggagcactgacaagcggcgtgcacacctttccagccgtgctgcaaagcagcggcctgtactctctgagcagcgtggtcacagtgcctagctctagcctgggcacccagacctacatctgcaatgtgaaccacaagcctagcaacaccaaggtggacaagagagtggaacccaagagctgtggtaccggaatgaggactgaggatcttcccaaagctgtcgtctttctcgaaccccaatggtatcgggtgctcgaaaaagactctgtgacactgaaatgccaaggggcctactctcccgaggacaactccacacagtggtttcataatgagtccctcatcagctctcaggccagctcttatttcattgatgccgctacagtggacgactccggcgagtatcggtgtcagaccaatctgtctacactgtctgaccccgtgcagcttgaggtccacattggatggttgctcttgcaagccccacgctgggttttcaaagaggaagatccaatccatctgcggtgccacagctggaaaaacaccgctctccacaaagtcacatacctgcaaaatggcaaaggacgcaaatacttccatcacaattccgatttttacattccgaaggctaccctgaaagacagcggcagctatttctgccggggactcgtcggctccaagaatgtgtcctccgaaaccgtgaatatcacgattacccaaggactggctgtgcctacaatctctagcttctttccgcctggataccaagtctccttctgtcttgtgatggtcctcctgtttgctgtggacacaggactgtacttttccgtgaaaacgaacatccgcagctccacacgcgattggaaagatcacaagtttaaatggcgcaaagatccccaggacaagcgcgccaagagaagcggatctggcgtgaagcagaccctgaatttcgacctgctgaagctggctggcgacgtggaatccaacccaggcccttctagaggccatatgaccgagtacaagcccacggtgcgcctcgccacccgcgacgacgtccccagggccgtacgcaccctcgccgccgcgttcgccgactaccccgccacgcgccacaccgtcgatccggaccgccacatcgagcgggtcaccgagctgcaagaactcttcctcacgcgcgtcgggctcgacatcggcaaggtgtgggtcgcggacgacggcgccgcggtggcggtctggaccacgccggagagcgtcgaagcgggggcggtgttcgccgagatcggcccgcgcatggccgagttgagcggttcccggctggccgcgcagcaacagatggaaggcctcctggcgccgcaccggcccaaggagcccgcgtggttcctggccaccgtcggcgtctcgcccgaccaccagggcaagggtctgggcagcgccgtcgtgctccccggagtggaggcggccgagcgcgccggggtgcccgccttcctggagacctccgcgccccgcaacctccccttctacgagcggctcggcttcaccgtcaccgccgacgtcgaggtgcccgaaggaccgcgcacctggtgcatgacccgcaagcccggtgcctga

SEQ ID NO: 1621 - DNA, 3561 bp, Artificial Sequence
  Synthetic Polynucleotide
atggccttaccagtgaccgccttgctcctgccgctggccttgctgctccacgccgccaggccggacatccagatgacacagagccctagcagcctgtctgccagcgtgggagacagagtgaccatcacatgcaaggccagcgaccacatcaacaactggctggcctggtatcagcagaagcctggacaggcccctaagctgctgatctacggcgctaccacactggaaacaggcgtgcccagcagattttctggcagcggctctggcaccgactacaccctgacaatatccagcctccagcctgaggacttcgccacctactactgtcagcagagctggaacaccccttggacattcggccagggcaccaagctggaaatcaagagactcgaggacctgaagaacgtgttcccacctgaggtggccgtgttcgagcctagcgaggccgagatcagccacacccagaaagccaccctcgtgtgcctggctaccggcttctaccccgaccatgtggaactgtcttggtgggtcaacggcaaagaggtgcacagcggcgtgtctaccgacccccagccactgaaagaacagcccgccctgaacgacagccggtactgcctgagcagcagactgagagtgtccgccaccttctggcagaacccccggaaccacttcagatgccaggtgcagttctacggcctgagcgagaacgacgagtggacccaggacagagccaagcccgtgacccagatcgtgtctgccgaagcctggggcagagccgattgcggatccctgtgggtttcacagcctccagagatcagaaccctggaaggcagcagcgccttcctgccttgcagcttcaatgcctctcagggcagactggctatcggcagcgtgacctggttcagagatgaggtggtgcccggcaaagaagtgcggaacggcacccctgagtttagaggaaggctggcccctctggcctccagcagatttctgcacgatcaccaggccgagctgcacatcagagatgtgcgaggacacgacgccagcatctacgtgtgcagagtggaagtgctcggcctcggagttggcacaggcaatggaacaagactggtggtggaaaaagagcaccctcagctcggagccggaacagtgctgcttctgagagccggcttttacgccgtgtcctttctgtctgtggccgtgggcagcaccgtgtactatcagggcaagtgcctgacctggaagggacctagaaggcaactgcctgctgtggtgcctgctcctttgcctcctccatgtggaagctctgcccatctgctgccacctgttccaggcggaagggccaagcgatctggatctggagcaacaaacttctcactactcaaacaagcaggtgacgtggaggagaatcccgggcctactagtatggactggatttggcgcatccttttccttgtcggcgctgctaccggcgcgcattccttcgaacaagttcagcttcaacagcctggcgctgagctggtcaaacctggcgcttctgtgaagatgagctgcaaagccagcggctacgccttcagcagctactggatcaactggatgaagcagaaacccggccagggactcgaatggatcggccaaatctatcccggcgacggcgacaccaactacaacggcaagttcaagggcagagccacactgaccgccgatacctctagcagcacagcctacatgcagctgagcagcctgaccagcgaagatagcgccgtgtacttctgtgcccggtccatcacaacagtcgtgggctgcgctatggactattggggccagggaacaagcgtgaccgtgtctagtacgcgtatccagaaccctgatcctgccgtgtaccagctgcgggatagcaagagcagcgacaagagcgtgtgtctgttcaccgacttcgacagccagaccaacgtgtcccagagcaaggactccgacgtgtacatcaccgataagaccgtgctggacatgcggagcatggacttcaagagcaactccgccgtggcctggtccaacaagtccgatttcgcctgcgccaacgccttcaacaacagcattatccccgaggacacattcttcccaagccccgagagcagctgcggtaccggaatgaggactgaggatcttcccaaagctgtcgtctttctcgaaccccaatggtatcgggtgctcgaaaaagactctgtgacactgaaatgccaaggggcctactctcccgaggacaactccacacagtggtttcataatgagtccctcatcagctctcaggccagctcttatttcattgatgccgctacagtggacgactccggcgagtatcggtgtcagaccaatctgtctacactgtctgaccccgtgcagcttgaggtccacattggatggttgctcttgcaagccccacgctgggttttcaaagaggaagatccaatccatctgcggtgccacagctggaaaaacaccgctctccacaaagtcacatacctgcaaaatggcaaaggacgcaaatacttccatcacaattccgatttttacattccgaaggctaccctgaaagacagcggcagctatttctgccggggactcgtcggctccaagaatgtgtcctccgaaaccgtgaatatcacgattacccaaggactggctgtgcctacaatctctagcttctttccgcctggataccaagtctccttctgtcttgtgatggtcctcctgtttgctgtggacacaggactgtacttttccgtgaaaacgaacatccgcagctccacacgcgattggaaagatcacaagtttaaatggcgcaaagatccccaggacaagcgcgccaagagaagcggatctggcgtgaagcagaccctgaatttcgacctgctgaagctggctggcgacgtggaatccaacccaggcccttctagaggccatatgaccgagtacaagcccacggtgcgcctcgccacccgcgacgacgtccccagggccgtacgcaccctcgccgccgcgttcgccgactaccccgccacgcgccacaccgtcgatccggaccgccacatcgagcgggtcaccgagctgcaagaactcttcctcacgcgcgtcgggctcgacatcggcaaggtgtgggtcgcggacgacggcgccgcggtggcggtctggaccacgccggagagcgtcgaagcgggggcggtgttcgccgagatcggcccgcgcatggccgagttgagcggttcccggctggccgcgcagcaacagatggaaggcctcctggcgccgcaccggcccaaggagcccgcgtggttcctggccaccgtcggcgtctcgcccgaccaccagggcaagggtctgggcagcgccgtcgtgctccccggagtggaggcggccgagcgcgccggggtgcccgccttcctggagacctccgcgccccgcaacctccccttctacgagcggctcggcttcaccgtcaccgccgacgtcgaggtgcccgaaggaccgcgcacctggtgcatgacccgcaagcccggtgcctga

SEQ ID NO: 1622 - DNA, 3972 bp, Artificial Sequence
  Synthetic Polynucleotide
atggccttaccagtgaccgccttgctcctgccgctggccttgctgctccacgccgccaggccggaagtgcagctggttgaatctggcggaggactggttcaggctggcggatctctgagactgtcttgtgccgccagcggcagaacctttagcatgggctggtttagacaggcccctggcaaagagagagagttcgtcgccgccatcacatactctggcggcagcccttactacgccgactctgtgaagggcagattcaccatcagccgggacaacgccaagaacaccgtgtacctccagatgaacagcctgaagcctgaggacaccgccgtgtactactgcgccgccaatccaacatacggcagcgactggaacgccgagaattggggccagggaacccaagtgacagtgtctagcggtaccggcggaggcggatctggcggcggaggtagcggtggcggaggatctgaattcgacatccagatgacacagagccctagcagcctgtctgccagcgtgggagacagagtgaccatcacatgcaaggccagcgaccacatcaacaactggctggcctggtatcagcagaagcctggacaggcccctaagctgctgatctacggcgctaccacactggaaacaggcgtgcccagcagattttctggcagcggctctggcaccgactacaccctgacaatatccagcctccagcctgaggacttcgccacctactactgtcagcagagctggaacaccccttggacattcggccagggcaccaagctggaaatcaagagactcgaggacctgaagaacgtgttcccacctgaggtggccgtgttcgagcctagcgaggccgagatcagccacacccagaaagccaccctcgtgtgcctggctaccggcttctaccccgaccatgtggaactgtcttggtgggtcaacggcaaagaggtgcacagcggcgtgtctaccgacccccagccactgaaagaacagcccgccctgaacgacagccggtactgcctgagcagcagactgagagtgtccgccaccttctggcagaacccccggaaccacttcagatgccaggtgcagttctacggcctgagcgagaacgacgagtggacccaggacagagccaagcccgtgacccagatcgtgtctgccgaagcctggggcagagccgattgcggatccctgtgggtttcacagcctccagagatcagaaccctggaaggcagcagcgccttcctgccttgcagcttcaatgcctctcagggcagactggctatcggcagcgtgacctggttcagagatgaggtggtgcccggcaaagaagtgcggaacggcacccctgagtttagaggaaggctggcccctctggcctccagcagatttctgcacgatcaccaggccgagctgcacatcagagatgtgcgaggacacgacgccagcatctacgtgtgcagagtggaagtgctcggcctcggagttggcacaggcaatggaacaagactggtggtggaaaaagagcaccctcagctcggagccggaacagtgctgcttctgagagccggcttttacgccgtgtcctttctgtctgtggccgtgggcagcaccgtgtactatcagggcaagtgcctgacctggaagggacctagaaggcaactgcctgctgtggtgcctgctcctttgcctcctccatgtggaagctctgcccatctgctgccacctgttccaggcggaagggccaagcgatctggatctggagcaacaaacttctcactactcaaacaagcaggtgacgtggaggagaatcccgggcctactagtatggactggatttggcgcatccttttccttgtcggcgctgctaccggcgcgcattccttcgaacaagttcagcttcaacagcctggcgctgagctggtcaaacctggcgcttctgtgaagatgagctgcaaagccagcggctacgccttcagcagctactggatcaactggatgaagcagaaacccggccagggactcgaatggatcggccaaatctatcccggcgacggcgacaccaactacaacggcaagttcaagggcagagccacactgaccgccgatacctctagcagcacagcctacatgcagctgagcagcctgaccagcgaagatagcgccgtgtacttctgtgcccggtccatcacaacagtcgtgggctgcgctatggactattggggccagggaacaagcgtgaccgtgtctagtacgcgtatccagaaccctgatcctgccgtgtaccagctgcgggatagcaagagcagcgacaagagcgtgtgtctgttcaccgacttcgacagccagaccaacgtgtcccagagcaaggactccgacgtgtacatcaccgataagaccgtgctggacatgcggagcatggacttcaagagcaactccgccgtggcctggtccaacaagtccgatttcgcctgcgccaacgccttcaacaacagcattatccccgaggacacattcttcccaagccccgagagcagctgcggtaccggaatgaggactgaggatcttcccaaagctgtcgtctttctcgaaccccaatggtatcgggtgctcgaaaaagactctgtgacactgaaatgccaaggggcctactctcccgaggacaactccacacagtggtttcataatgagtccctcatcagctctcaggccagctcttatttcattgatgccgctacagtggacgactccggcgagtatcggtgtcagaccaatctgtctacactgtctgaccccgtgcagcttgaggtccacattggatggttgctcttgcaagccccacgctgggttttcaaagaggaagatccaatccatctgcggtgccacagctggaaaaacaccgctctccacaaagtcacatacctgcaaaatggcaaaggacgcaaatacttccatcacaattccgatttttacattccgaaggctaccctgaaagacagcggcagctatttctgccggggactcgtcggctccaagaatgtgtcctccgaaaccgtgaatatcacgattacccaaggactggctgtgcctacaatctctagcttctttccgcctggataccaagtctccttctgtcttgtgatggtcctcctgtttgctgtggacacaggactgtacttttccgtgaaaacgaacatccgcagctccacacgcgattggaaagatcacaagtttaaatggcgcaaagatccccaggacaagcgcgccaagagaagcggatctggcgtgaagcagaccctgaatttcgacctgctgaagctggctggcgacgtggaatccaacccaggcccttctagaggccatatgaccgagtacaagcccacggtgcgcctcgccacccgcgacgacgtccccagggccgtacgcaccctcgccgccgcgttcgccgactaccccgccacgcgccacaccgtcgatccggaccgccacatcgagcgggtcaccgagctgcaagaactcttcctcacgcgcgtcgggctcgacatcggcaaggtgtgggtcgcggacgacggcgccgcggtggcggtctggaccacgccggagagcgtcgaagcgggggcggtgttcgccgagatcggcccgcgcatggccgagttgagcggttcccggctggccgcgcagcaacagatggaaggcctcctggcgccgcaccggcccaaggagcccgcgtggttcctggccaccgtcggcgtctcgcccgaccaccagggcaagggtctgggcagcgccgtcgtgctccccggagtggaggcggccgagcgcgccggggtgcccgccttcctggagacctccgcgccccgcaacctccccttctacgagcggctcggcttcaccgtcaccgccgacgtcgaggtgcccgaaggaccgcgcacctggtgcatgacccgcaagcccggtgcctga

SEQ ID NO: 1623 - DNA, 4383 bp, Artificial Sequence
  Synthetic Polynucleotide
atggccttaccagtgaccgccttgctcctgccgctggccttgctgctccacgccgccaggccggaagtgcagctggttgaatctggcggaggactggttcaggctggcggatctctgagactgtcttgtgccgccagcggcagaacctttagcatgggctggtttagacaggcccctggcaaagagagagagttcgtcgccgccatcacatactctggcggcagcccttactacgccgactctgtgaagggcagattcaccatcagccgggacaacgccaagaacaccgtgtacctccagatgaacagcctgaagcctgaggacaccgccgtgtactactgcgccgccaatccaacatacggcagcgactggaacgccgagaattggggccagggaacccaagtgacagtgtctagcggtaccggcggaggcggatctggcggcggaggtagcggtggcggaggatctgaattcgacatccagatgacacagagccctagcagcctgtctgccagcgtgggagacagagtgaccatcacatgcaaggccagcgaccacatcaacaactggctggcctggtatcagcagaagcctggacaggcccctaagctgctgatctacggcgctaccacactggaaacaggcgtgcccagcagattttctggcagcggctctggcaccgactacaccctgacaatatccagcctccagcctgaggacttcgccacctactactgtcagcagagctggaacaccccttggacattcggccagggcaccaagctggaaatcaagagactcgaggacctgaagaacgtgttcccacctgaggtggccgtgttcgagcctagcgaggccgagatcagccacacccagaaagccaccctcgtgtgcctggctaccggcttctaccccgaccatgtggaactgtcttggtgggtcaacggcaaagaggtgcacagcggcgtgtctaccgacccccagccactgaaagaacagcccgccctgaacgacagccggtactgcctgagcagcagactgagagtgtccgccaccttctggcagaacccccggaaccacttcagatgccaggtgcagttctacggcctgagcgagaacgacgagtggacccaggacagagccaagcccgtgacccagatcgtgtctgccgaagcctggggcagagccgattgcggatccctgtgggtttcacagcctccagagatcagaaccctggaaggcagcagcgccttcctgccttgcagcttcaatgcctctcagggcagactggctatcggcagcgtgacctggttcagagatgaggtggtgcccggcaaagaagtgcggaacggcacccctgagtttagaggaaggctggcccctctggcctccagcagatttctgcacgatcaccaggccgagctgcacatcagagatgtgcgaggacacgacgccagcatctacgtgtgcagagtggaagtgctcggcctcggagttggcacaggcaatggaacaagactggtggtggaaaaagagcaccctcagctcggagccggaacagtgctgcttctgagagccggcttttacgccgtgtcctttctgtctgtggccgtgggcagcaccgtgtactatcagggcaagtgcctgacctggaagggacctagaaggcaactgcctgctgtggtgcctgctcctttgcctcctccatgtggaagctctgcccatctgctgccacctgttccaggcggaagggccaagcgatctggatctggagcaacaaacttctcactactcaaacaagcaggtgacgtggaggagaatcccgggcctactagtatggactggatttggcgcatccttttccttgtcggcgctgctaccggcgcgcattccgggcccgaagtgcaactggttgaatccggtggcggcctggtgcaagcaggcggatctctcagacttagctgtgccgcctccggcagaaccttcacaatgggatggtttaggcaggctccagggaaagagagagagttcgtcgccgccatctctctgtctcccacactggcctactacgccgactctgtgaaaggccggttcaccatctccagagataatgccaagaacaccgtggtgctgcaaatgaactctctgaaacccgaggatacagccctgtactattgtgccgctgaccggaagtccgtgatgagcatcagacccgattactggggacagggcacacaagtcacagtgtcctctggatccggcggcggaggatctggcggaggcggatctgggggcggaggctctttcgaacaagttcagcttcaacagcctggcgctgagctggtcaaacctggcgcttctgtgaagatgagctgcaaagccagcggctacgccttcagcagctactggatcaactggatgaagcagaaacccggccagggactcgaatggatcggccaaatctatcccggcgacggcgacaccaactacaacggcaagttcaagggcagagccacactgaccgccgatacctctagcagcacagcctacatgcagctgagcagcctgaccagcgaagatagcgccgtgtacttctgtgcccggtccatcacaacagtcgtgggctgcgctatggactattggggccagggaacaagcgtgaccgtgtctagtacgcgtatccagaaccctgatcctgccgtgtaccagctgcgggatagcaagagcagcgacaagagcgtgtgtctgttcaccgacttcgacagccagaccaacgtgtcccagagcaaggactccgacgtgtacatcaccgataagaccgtgctggacatgcggagcatggacttcaagagcaactccgccgtggcctggtccaacaagtccgatttcgcctgcgccaacgccttcaacaacagcattatccccgaggacacattcttcccaagccccgagagcagctgcggtaccggaatgaggactgaggatcttcccaaagctgtcgtctttctcgaaccccaatggtatcgggtgctcgaaaaagactctgtgacactgaaatgccaaggggcctactctcccgaggacaactccacacagtggtttcataatgagtccctcatcagctctcaggccagctcttatttcattgatgccgctacagtggacgactccggcgagtatcggtgtcagaccaatctgtctacactgtctgaccccgtgcagcttgaggtccacattggatggttgctcttgcaagccccacgctgggttttcaaagaggaagatccaatccatctgcggtgccacagctggaaaaacaccgctctccacaaagtcacatacctgcaaaatggcaaaggacgcaaatacttccatcacaattccgatttttacattccgaaggctaccctgaaagacagcggcagctatttctgccggggactcgtcggctccaagaatgtgtcctccgaaaccgtgaatatcacgattacccaaggactggctgtgcctacaatctctagcttctttccgcctggataccaagtctccttctgtcttgtgatggtcctcctgtttgctgtggacacaggactgtacttttccgtgaaaacgaacatccgcagctccacacgcgattggaaagatcacaagtttaaatggcgcaaagatccccaggacaagcgcgccaagagaagcggatctggcgtgaagcagaccctgaatttcgacctgctgaagctggctggcgacgtggaatccaacccaggcccttctagaggccatatgaccgagtacaagcccacggtgcgcctcgccacccgcgacgacgtccccagggccgtacgcaccctcgccgccgcgttcgccgactaccccgccacgcgccacaccgtcgatccggaccgccacatcgagcgggtcaccgagctgcaagaactcttcctcacgcgcgtcgggctcgacatcggcaaggtgtgggtcgcggacgacggcgccgcggtggcggtctggaccacgccggagagcgtcgaagcgggggcggtgttcgccgagatcggcccgcgcatggccgagttgagcggttcccggctggccgcgcagcaacagatggaaggcctcctggcgccgcaccggcccaaggagcccgcgtggttcctggccaccgtcggcgtctcgcccgaccaccagggcaagggtctgggcagcgccgtcgtgctccccggagtggaggcggccgagcgcgccggggtgcccgccttcctggagacctccgcgccccgcaacctccccttctacgagcggctcggcttcaccgtcaccgccgacgtcgaggtgcccgaaggaccgcgcacctggtgcatgacccgcaagcccggtgcctga

SEQ ID NO: 1624 - DNA, 3582 bp, Artificial Sequence
  Synthetic Polynucleotide
atggccttaccagtgaccgccttgctcctgccgctggccttgctgctccacgccgccaggccggaagtgcagctggttgaatctggcggaggactggttcaggctggcggatctctgagactgtcttgtgccgccagcggcagaacctttagcatgggctggtttagacaggcccctggcaaagagagagagttcgtcgccgccatcacatactctggcggcagcccttactacgccgactctgtgaagggcagattcaccatcagccgggacaacgccaagaacaccgtgtacctccagatgaacagcctgaagcctgaggacaccgccgtgtactactgcgccgccaatccaacatacggcagcgactggaacgccgagaattggggccagggaacccaagtgacagtgtctagcctcgaggacctgaagaacgtgttcccacctgaggtggccgtgttcgagcctagcgaggccgagatcagccacacccagaaagccaccctcgtgtgcctggctaccggcttctaccccgaccatgtggaactgtcttggtgggtcaacggcaaagaggtgcacagcggcgtgtctaccgacccccagccactgaaagaacagcccgccctgaacgacagccggtactgcctgagcagcagactgagagtgtccgccaccttctggcagaacccccggaaccacttcagatgccaggtgcagttctacggcctgagcgagaacgacgagtggacccaggacagagccaagcccgtgacccagatcgtgtctgccgaagcctggggcagagccgattgcggatccctgtgggtttcacagcctccagagatcagaaccctggaaggcagcagcgccttcctgccttgcagcttcaatgcctctcagggcagactggctatcggcagcgtgacctggttcagagatgaggtggtgcccggcaaagaagtgcggaacggcacccctgagtttagaggaaggctggcccctctggcctccagcagatttctgcacgatcaccaggccgagctgcacatcagagatgtgcgaggacacgacgccagcatctacgtgtgcagagtggaagtgctcggcctcggagttggcacaggcaatggaacaagactggtggtggaaaaagagcaccctcagctcggagccggaacagtgctgcttctgagagccggcttttacgccgtgtcctttctgtctgtggccgtgggcagcaccgtgtactatcagggcaagtgcctgacctggaagggacctagaaggcaactgcctgctgtggtgcctgctcctttgcctcctccatgtggaagctctgcccatctgctgccacctgttccaggcggaagggccaagcgatctggatctggagcaacaaacttctcactactcaaacaagcaggtgacgtggaggagaatcccgggcctactagtatggactggatttggcgcatccttttccttgtcggcgctgctaccggcgcgcattccgggcccgaagtgcaactggttgaatccggtggcggcctggtgcaagcaggcggatctctcagacttagctgtgccgcctccggcagaaccttcacaatgggatggtttaggcaggctccagggaaagagagagagttcgtcgccgccatctctctgtctcccacactggcctactacgccgactctgtgaaaggccggttcaccatctccagagataatgccaagaacaccgtggtgctgcaaatgaactctctgaaacccgaggatacagccctgtactattgtgccgctgaccggaagtccgtgatgagcatcagacccgattactggggacagggcacacaagtcacagtgtcctctacgcgtatccagaaccctgatcctgccgtgtaccagctgcgggatagcaagagcagcgacaagagcgtgtgtctgttcaccgacttcgacagccagaccaacgtgtcccagagcaaggactccgacgtgtacatcaccgataagaccgtgctggacatgcggagcatggacttcaagagcaactccgccgtggcctggtccaacaagtccgatttcgcctgcgccaacgccttcaacaacagcattatccccgaggacacattcttcccaagccccgagagcagctgcggtaccggaatgaggactgaggatcttcccaaagctgtcgtctttctcgaaccccaatggtatcgggtgctcgaaaaagactctgtgacactgaaatgccaaggggcctactctcccgaggacaactccacacagtggtttcataatgagtccctcatcagctctcaggccagctcttatttcattgatgccgctacagtggacgactccggcgagtatcggtgtcagaccaatctgtctacactgtctgaccccgtgcagcttgaggtccacattggatggttgctcttgcaagccccacgctgggttttcaaagaggaagatccaatccatctgcggtgccacagctggaaaaacaccgctctccacaaagtcacatacctgcaaaatggcaaaggacgcaaatacttccatcacaattccgatttttacattccgaaggctaccctgaaagacagcggcagctatttctgccggggactcgtcggctccaagaatgtgtcctccgaaaccgtgaatatcacgattacccaaggactggctgtgcctacaatctctagcttctttccgcctggataccaagtctccttctgtcttgtgatggtcctcctgtttgctgtggacacaggactgtacttttccgtgaaaacgaacatccgcagctccacacgcgattggaaagatcacaagtttaaatggcgcaaagatccccaggacaagcgcgccaagagaagcggatctggcgtgaagcagaccctgaatttcgacctgctgaagctggctggcgacgtggaatccaacccaggcccttctagaggccatatgaccgagtacaagcccacggtgcgcctcgccacccgcgacgacgtccccagggccgtacgcaccctcgccgccgcgttcgccgactaccccgccacgcgccacaccgtcgatccggaccgccacatcgagcgggtcaccgagctgcaagaactcttcctcacgcgcgtcgggctcgacatcggcaaggtgtgggtcgcggacgacggcgccgcggtggcggtctggaccacgccggagagcgtcgaagcgggggcggtgttcgccgagatcggcccgcgcatggccgagttgagcggttcccggctggccgcgcagcaacagatggaaggcctcctggcgccgcaccggcccaaggagcccgcgtggttcctggccaccgtcggcgtctcgcccgaccaccagggcaagggtctgggcagcgccgtcgtgctccccggagtggaggcggccgagcgcgccggggtgcccgccttcctggagacctccgcgccccgcaacctccccttctacgagcggctcggcttcaccgtcaccgccgacgtcgaggtgcccgaaggaccgcgcacctggtgcatgacccgcaagcccggtgcctga

SEQ ID NO: 1625 - DNA, 1737 bp, Artificial Sequence; identical to SEQ ID NO: 1612
  Synthetic Polynucleotide

SEQ ID NO: 1626 - DNA, 3042 bp, Artificial Sequence
  Synthetic Polynucleotide
atggccttaccagtgaccgccttgctcctgccgctggccttgctgctccacgccgccaggccggacatccagatgacacagagccctagcagcctgtctgccagcgtgggagacagagtgaccatcacatgcaaggccagcgaccacatcaacaactggctggcctggtatcagcagaagcctggacaggcccctaagctgctgatctacggcgctaccacactggaaacaggcgtgcccagcagattttctggcagcggctctggcaccgactacaccctgacaatatccagcctccagcctgaggacttcgccacctactactgtcagcagagctggaacaccccttggacattcggccagggcaccaagctggaaatcaagagactcgagggcatgcggactgaagacctcccaaaggctgtggtgttcctggagcctcaatggtacagggtgctggagaaggacagtgtgactctgaagtgccagggagcctactcccctgaggacaattccacacagtggtttcacaatgagagcctcatctcaagccaggcctccagctacttcattgacgctgccacagtggacgacagtggagagtacaggtgccagacaaacctctccaccctcagtgacccggtgcagctagaagtccatatcggctggctgttgctccaggcccctcggtgggtgttcaaggaggaagaccctattcacctgaggtgtcacagctggaagaacactgctctgcataaggtcacatatttacagaatggcaaaggcaggaagtattttcatcataattctgacttctacattccaaaagccacactcaaagacagcggctcctacttctgcagggggcttgttgggagtaaaaatgtgtcttcagagactgtgaacatcaccatcactcaaggtttggcagtgtcaaccatctcatcattctttccacctggctaccaagtgtccttctgcctggtcatggtgctgctgttcgccgtggataccggcctgtacttcagcgtcaagaccaacatccggtccagcaccagagactggaaggaccacaagttcaagtggcggaaggaccctcaggacaagagggccaagcgatctggatctggagcaacaaacttctcactactcaaacaagcaggtgacgtggaggagaatcccgggcctactagtatggactggatttggcgcatccttttccttgtcggcgctgctaccggcgcgcattccttcgaacaagttcagcttcaacagcctggcgctgagctggtcaaacctggcgcttctgtgaagatgagctgcaaagccagcggctacgccttcagcagctactggatcaactggatgaagcagaaacccggccagggactcgaatggatcggccaaatctatcccggcgacggcgacaccaactacaacggcaagttcaagggcagagccacactgaccgccgatacctctagcagcacagcctacatgcagctgagcagcctgaccagcgaagatagcgccgtgtacttctgtgcccggtccatcacaacagtcgtgggctgcgctatggactattggggccagggaacaagcgtgaccgtgtctagtacgcgtggaatgaggactgaggatcttcccaaagctgtcgtctttctcgaaccccaatggtatcgggtgctcgaaaaagactctgtgacactgaaatgccaaggggcctactctcccgaggacaactccacacagtggtttcataatgagtccctcatcagctctcaggccagctcttatttcattgatgccgctacagtggacgactccggcgagtatcggtgtcagaccaatctgtctacactgtctgaccccgtgcagcttgaggtccacattggatggttgctcttgcaagccccacgctgggttttcaaagaggaagatccaatccatctgcggtgccacagctggaaaaacaccgctctccacaaagtcacatacctgcaaaatggcaaaggacgcaaatacttccatcacaattccgatttttacattccgaaggctaccctgaaagacagcggcagctatttctgccggggactcgtcggctccaagaatgtgtcctccgaaaccgtgaatatcacgattacccaaggactggctgtgcctacaatctctagcttctttccgcctggataccaagtctccttctgtcttgtgatggtcctcctgtttgctgtggacacaggactgtacttttccgtgaaaacgaacatccgcagctccacacgcgattggaaagatcacaagtttaaatggcgcaaagatccccaggacaagcgcgccaagagaagcggatctggcgtgaagcagaccctgaatttcgacctgctgaagctggctggcgacgtggaatccaacccaggcccttctagaggccatatgaccgagtacaagcccacggtgcgcctcgccacccgcgacgacgtccccagggccgtacgcaccctcgccgccgcgttcgccgactaccccgccacgcgccacaccgtcgatccggaccgccacatcgagcgggtcaccgagctgcaagaactcttcctcacgcgcgtcgggctcgacatcggcaaggtgtgggtcgcggacgacggcgccgcggtggcggtctggaccacgccggagagcgtcgaagcgggggcggtgttcgccgagatcggcccgcgcatggccgagttgagcggttcccggctggccgcgcagcaacagatggaaggcctcctggcgccgcaccggcccaaggagcccgcgtggttcctggccaccgtcggcgtctcgcccgaccaccagggcaagggtctgggcagcgccgtcgtgctccccggagtggaggcggccgagcgcgccggggtgcccgccttcctggagacctccgcgccccgcaacctccccttctacgagcggctcggcttcaccgtcaccgccgacgtcgaggtgcccgaaggaccgcgcacctggtgcatgacccgcaagcccggtgcctga

SEQ ID NO: 1627 - DNA, 3204 bp, Artificial Sequence
  Synthetic Polynucleotide
atggccttaccagtgaccgccttgctcctgccgctggccttgctgctccacgccgccaggccggcatgcgaagtgcagctgcttgaaagtggcggcggactgattcagcctggcggatctctgagactgagctgtgccgccagcggcttcaccttttctagccacgccatgacctgggtccgacaggcacctggaaaagggcttgaatgggtgtccgccatcagcggctctggcgattacacacactacgccgacagcgtgaagggcagattcaccatcagcagagacaacagcaagaacaccgtgtacctccagatgaacagcctgagagccgaggacagcgccgtgtattattgcgccaaggatgaggatggcggcagcctgcttggacacagaggacaaggcaccctggtcaccgtttcttccggtaccggcggaggcggatctggcggcggaggtagcggtggcggaggatctgaattcggatctctcgagggcatgcggactgaagacctcccaaaggctgtggtgttcctggagcctcaatggtacagggtgctggagaaggacagtgtgactctgaagtgccagggagcctactcccctgaggacaattccacacagtggtttcacaatgagagcctcatctcaagccaggcctccagctacttcattgacgctgccacagtggacgacagtggagagtacaggtgccagacaaacctctccaccctcagtgacccggtgcagctagaagtccatatcggctggctgttgctccaggcccctcggtgggtgttcaaggaggaagaccctattcacctgaggtgtcacagctggaagaacactgctctgcataaggtcacatatttacagaatggcaaaggcaggaagtattttcatcataattctgacttctacattccaaaagccacactcaaagacagcggctcctacttctgcagggggcttgttgggagtaaaaatgtgtcttcagagactgtgaacatcaccatcactcaaggtttggcagtgtcaaccatctcatcattctttccacctggctaccaagtgtccttctgcctggtcatggtgctgctgttcgccgtggataccggcctgtacttcagcgtcaagaccaacatccggtccagcaccagagactggaaggaccacaagttcaagtggcggaaggaccctcaggacaagagggccaagcgatctggatctggagcaacaaacttctcactactcaaacaagcaggtgacgtggaggagaatcccgggcctactagtgccaccatggactggatttggcgcatccttttccttgtcggcgctgctaccggcgcccattccgggcccgaagtgcagctggttgaatctggcggaggactggttcaggctggcggatctctgagactgtcttgtgccgccagcggcagaacctttagcatgggctggtttagacaggcccctggcaaagagagagagttcgtcgccgccatcacatactctggcggcagcccttactacgccgactctgtgaagggcagattcaccatcagccgggacaacgccaagaacaccgtgtacctccagatgaacagcctgaagcctgaggacaccgccgtgtactactgcgccgccaatccaacatacggcagcgactggaacgccgagaattggggccagggaacccaagtgacagtgtctagcggatccggcggcggaggatctggcggaggcggatctgggggcggaggctctttcgaaggcagcacgcgtggaatgaggactgaggatcttcccaaagctgtcgtctttctcgaaccccaatggtatcgggtgctcgaaaaagactctgtgacactgaaatgccaaggggcctactctcccgaggacaactccacacagtggtttcataatgagtccctcatcagctctcaggccagctcttatttcattgatgccgctacagtggacgactccggcgagtatcggtgtcagaccaatctgtctacactgtctgaccccgtgcagcttgaggtccacattggatggttgctcttgcaagccccacgctgggttttcaaagaggaagatccaatccatctgcggtgccacagctggaaaaacaccgctctccacaaagtcacatacctgcaaaatggcaaaggacgcaaatacttccatcacaattccgatttttacattccgaaggctaccctgaaagacagcggcagctatttctgccggggactcgtcggctccaagaatgtgtcctccgaaaccgtgaatatcacgattacccaaggactggctgtgcctacaatctctagcttctttccgcctggataccaagtctccttctgtcttgtgatggtcctcctgtttgctgtggacacaggactgtacttttccgtgaaaacgaacatccgcagctccacacgcgattggaaagatcacaagtttaaatggcgcaaagatccccaggacaagcgcgccaagagaagcggatctggcgtgaagcagaccctgaatttcgacctgctgaagctggctggcgacgtggaatccaacccaggcccttctagaggccatatgaccgagtacaagcccacggtgcgcctcgccacccgcgacgacgtccccagggccgtacgcaccctcgccgccgcgttcgccgactaccccgccacgcgccacaccgtcgatccggaccgccacatcgagcgggtcaccgagctgcaagaactcttcctcacgcgcgtcgggctcgacatcggcaaggtgtgggtcgcggacgacggcgccgcggtggcggtctggaccacgccggagagcgtcgaagcgggggcggtgttcgccgagatcggcccgcgcatggccgagttgagcggttcccggctggccgcgcagcaacagatggaaggcctcctggcgccgcaccggcccaaggagcccgcgtggttcctggccaccgtcggcgtctcgcccgaccaccagggcaagggtctgggcagcgccgtcgtgctccccggagtggaggcggccgagcgcgccggggtgcccgccttcctggagacctccgcgccccgcaacctccccttctacgagcggctcggcttcaccgtcaccgccgacgtcgaggtgcccgaaggaccgcgcacctggtgcatgacccgcaagcccggtgcctga

SEQ ID NO: 1628 - DNA, 3654 bp, Artificial Sequence
  Synthetic Polynucleotide
atggccttaccagtgaccgccttgctcctgccgctggccttgctgctccacgccgccaggccggacatccagatgacacagagccctagcagcctgtctgccagcgtgggagacagagtgaccatcacatgcaaggccagcgaccacatcaacaactggctggcctggtatcagcagaagcctggacaggcccctaagctgctgatctacggcgctaccacactggaaacaggcgtgcccagcagattttctggcagcggctctggcaccgactacaccctgacaatatccagcctccagcctgaggacttcgccacctactactgtcagcagagctggaacaccccttggacattcggccagggcaccaagctggaaatcaagagactcgagggacagcctaaggccaatcctaccgtgacactgttccctccaagcagcgaagaactccaggccaacaaggccacacttgtgtgcctgatctccgacttctaccctggggctgtgacagtggcttggaaggccgatggatctcctgtgaaagccggcgtggaaaccaccaagccatccaagcagagcaacaacaaatacgccgccagctcctacctgagcctgacacctgagcagtggaagtcccacagatcctacagctgccaagtgacccacgaaggcagcaccgtggaaaagacagtggcccctacagagtgcagcggatccggcatgcggactgaagacctcccaaaggctgtggtgttcctggagcctcaatggtacagggtgctggagaaggacagtgtgactctgaagtgccagggagcctactcccctgaggacaattccacacagtggtttcacaatgagagcctcatctcaagccaggcctccagctacttcattgacgctgccacagtggacgacagtggagagtacaggtgccagacaaacctctccaccctcagtgacccggtgcagctagaagtccatatcggctggctgttgctccaggcccctcggtgggtgttcaaggaggaagaccctattcacctgaggtgtcacagctggaagaacactgctctgcataaggtcacatatttacagaatggcaaaggcaggaagtattttcatcataattctgacttctacattccaaaagccacactcaaagacagcggctcctacttctgcagggggcttgttgggagtaaaaatgtgtcttcagagactgtgaacatcaccatcactcaaggtttggcagtgtcaaccatctcatcattctttccacctggctaccaagtgtccttctgcctggtcatggtgctgctgttcgccgtggataccggcctgtacttcagcgtcaagaccaacatccggtccagcaccagagactggaaggaccacaagttcaagtggcggaaggaccctcaggacaagagggccaagcgatctggatctggagcaacaaacttctcactactcaaacaagcaggtgacgtggaggagaatcccgggcctactagtatggactggatttggcgcatccttttccttgtcggcgctgctaccggcgcgcattccttcgaacaagttcagcttcaacagcctggcgctgagctggtcaaacctggcgcttctgtgaagatgagctgcaaagccagcggctacgccttcagcagctactggatcaactggatgaagcagaaacccggccagggactcgaatggatcggccaaatctatcccggcgacggcgacaccaactacaacggcaagttcaagggcagagccacactgaccgccgatacctctagcagcacagcctacatgcagctgagcagcctgaccagcgaagatagcgccgtgtacttctgtgcccggtccatcacaacagtcgtgggctgcgctatggactattggggccagggaacaagcgtgaccgtgtctagtacgcgtgcctctacaaagggaccctccgtgtttcctctggctcccagcagcaagtctacaagcggaggaacagccgctctgggctgcctggtcaaggattactttcccgagcctgtgaccgtgtcctggaatagcggagcactgacaagcggcgtgcacacctttccagccgtgctgcaaagcagcggcctgtactctctgagcagcgtggtcacagtgcctagctctagcctgggcacccagacctacatctgcaatgtgaaccacaagcctagcaacaccaaggtggacaagagagtggaacccaagagctgtggtaccggaatgaggactgaggatcttcccaaagctgtcgtctttctcgaaccccaatggtatcgggtgctcgaaaaagactctgtgacactgaaatgccaaggggcctactctcccgaggacaactccacacagtggtttcataatgagtccctcatcagctctcaggccagctcttatttcattgatgccgctacagtggacgactccggcgagtatcggtgtcagaccaatctgtctacactgtctgaccccgtgcagcttgaggtccacattggatggttgctcttgcaagccccacgctgggttttcaaagaggaagatccaatccatctgcggtgccacagctggaaaaacaccgctctccacaaagtcacatacctgcaaaatggcaaaggacgcaaatacttccatcacaattccgatttttacattccgaaggctaccctgaaagacagcggcagctatttctgccggggactcgtcggctccaagaatgtgtcctccgaaaccgtgaatatcacgattacccaaggactggctgtgcctacaatctctagcttctttccgcctggataccaagtctccttctgtcttgtgatggtcctcctgtttgctgtggacacaggactgtacttttccgtgaaaacgaacatccgcagctccacacgcgattggaaagatcacaagtttaaatggcgcaaagatccccaggacaagcgcgccaagagaagcggatctggcgtgaagcagaccctgaatttcgacctgctgaagctggctggcgacgtggaatccaacccaggcccttctagaggcgggatccacaccatggctacctacgaggtgctgtgcgaggtggcaagaaagctgggcaccgacgacagagaagtggtgctgttcctgctgaacgtgttcatccctcagcctacactggcccagctgatcggtgcactgagagccctgaaagaggaaggccggctgacctttcctctgctggccgaatgcctgttcagagccggaagaagggatctgctgcgggacctgctgcatctggaccccagatttctggaaagacacctggccggcaccatgagctacttcagcccttaccagctgaccgtgctgcacgttgacggcgaactgtgcgccagagatattcggagcctgatcttcctgagcaaggacaccatcggcagccggtctacccctcagacatttctgcactgggtgtactgcatggaaaacctggacctgctcggccccacagatgtggatgccctgatgtccatgctgagaagcctgagcagagtggacctccagagacaggtgcagacactgatgggactgcacctgagcggacctagccacagccagcactacagacacacccct

SEQ ID NO: 1629 - DNA, 3813 bp, Artificial Sequence
  Synthetic Polynucleotide
atggccttaccagtgaccgccttgctcctgccgctggccttgctgctccacgccgccaggccggacatccagatgacacagagccctagcagcctgtctgccagcgtgggagacagagtgaccatcacatgcaaggccagcgaccacatcaacaactggctggcctggtatcagcagaagcctggacaggcccctaagctgctgatctacggcgctaccacactggaaacaggcgtgcccagcagattttctggcagcggctctggcaccgactacaccctgacaatatccagcctccagcctgaggacttcgccacctactactgtcagcagagctggaacaccccttggacattcggccagggcaccaagctggaaatcaagagactcgagggacagcctaaggccaatcctaccgtgacactgttccctccaagcagcgaagaactccaggccaacaaggccacacttgtgtgcctgatctccgacttctaccctggggctgtgacagtggcttggaaggccgatggatctcctgtgaaagccggcgtggaaaccaccaagccatccaagcagagcaacaacaaatacgccgccagctcctacctgagcctgacacctgagcagtggaagtcccacagatcctacagctgccaagtgacccacgaaggcagcaccgtggaaaagacagtggcccctacagagtgcagcggatccggcatgcggactgaagacctcccaaaggctgtggtgttcctggagcctcaatggtacagggtgctggagaaggacagtgtgactctgaagtgccagggagcctactcccctgaggacaattccacacagtggtttcacaatgagagcctcatctcaagccaggcctccagctacttcattgacgctgccacagtggacgacagtggagagtacaggtgccagacaaacctctccaccctcagtgacccggtgcagctagaagtccatatcggctggctgttgctccaggcccctcggtgggtgttcaaggaggaagaccctattcacctgaggtgtcacagctggaagaacactgctctgcataaggtcacatatttacagaatggcaaaggcaggaagtattttcatcataattctgacttctacattccaaaagccacactcaaagacagcggctcctacttctgcagggggcttgttgggagtaaaaatgtgtcttcagagactgtgaacatcaccatcactcaaggtttggcagtgtcaaccatctcatcattctttccacctggctaccaagtgtccttctgcctggtcatggtgctgctgttcgccgtggataccggcctgtacttcagcgtcaagaccaacatccggtccagcaccagagactggaaggaccacaagttcaagtggcggaaggaccctcaggacaagagggccaagcgatctggatctggagcaacaaacttctcactactcaaacaagcaggtgacgtggaggagaatcccgggcctactagtatggactggatttggcgcatccttttccttgtcggcgctgctaccggcgcgcattccttcgaacaagttcagcttcaacagcctggcgctgagctggtcaaacctggcgcttctgtgaagatgagctgcaaagccagcggctacgccttcagcagctactggatcaactggatgaagcagaaacccggccagggactcgaatggatcggccaaatctatcccggcgacggcgacaccaactacaacggcaagttcaagggcagagccacactgaccgccgatacctctagcagcacagcctacatgcagctgagcagcctgaccagcgaagatagcgccgtgtacttctgtgcccggtccatcacaacagtcgtgggctgcgctatggactattggggccagggaacaagcgtgaccgtgtctagtacgcgtgcctctacaaagggaccctccgtgtttcctctggctcccagcagcaagtctacaagcggaggaacagccgctctgggctgcctggtcaaggattactttcccgagcctgtgaccgtgtcctggaatagcggagcactgacaagcggcgtgcacacctttccagccgtgctgcaaagcagcggcctgtactctctgagcagcgtggtcacagtgcctagctctagcctgggcacccagacctacatctgcaatgtgaaccacaagcctagcaacaccaaggtggacaagagagtggaacccaagagctgtggtaccggaatgaggactgaggatcttcccaaagctgtcgtctttctcgaaccccaatggtatcgggtgctcgaaaaagactctgtgacactgaaatgccaaggggcctactctcccgaggacaactccacacagtggtttcataatgagtccctcatcagctctcaggccagctcttatttcattgatgccgctacagtggacgactccggcgagtatcggtgtcagaccaatctgtctacactgtctgaccccgtgcagcttgaggtccacattggatggttgctcttgcaagccccacgctgggttttcaaagaggaagatccaatccatctgcggtgccacagctggaaaaacaccgctctccacaaagtcacatacctgcaaaatggcaaaggacgcaaatacttccatcacaattccgatttttacattccgaaggctaccctgaaagacagcggcagctatttctgccggggactcgtcggctccaagaatgtgtcctccgaaaccgtgaatatcacgattacccaaggactggctgtgcctacaatctctagcttctttccgcctggataccaagtctccttctgtcttgtgatggtcctcctgtttgctgtggacacaggactgtacttttccgtgaaaacgaacatccgcagctccacacgcgattggaaagatcacaagtttaaatggcgcaaagatccccaggacaagcgcgccaagagaagcggatctggcgtgaagcagaccctgaatttcgacctgctgaagctggctggcgacgtggaatccaacccaggcccttctagaggcgggatccacaccatgtccgactccaaggaggtccctagccttccatttttgcgacacttgctcgaagagttggacagccatgaggacagcttgctgctgtttctgtgtcacgacgcggccccgggctgcacgacggtcacgcaagctttgtgctcgcttagccaacagcgcaagctgaccctcgcggctctggtcgagatgctctacgtgctgcagcgtatggatcttctcaagagccgcttcgggctcagcaaggagggggccgagcaattgctgggcacaagctttctcacgcgctaccgcaagctcatggtttgcgtgggtgaggagctcgactcgagcgagctacgcgctctacgcttgttcgcgtgcaacctgaatccgagcctgagcacggcgctttctgagagcagccgctttgtcgagcttgtactcgcgcttgaaaacgtaggactcgtctcgccatcgagtgtttccgtgcttgcggacatgttgcgcactcttcggcgcctcgatttgtgccagcagcttgttgagtacgaacaacaagagcaagccaggtaccgttactgttacgcggcctcgccctcattgccagttcgtacgttacgtcgggggcacggcgcgagtgaacacgagcagctgtgcatgcccgtgcaagaatcctctgacagccccgagctgctgcgcacgcccgtacaagaatcctccagcgacagccccgagcaaacgact

SEQ ID NO: 1630 - DNA, 3681 bp, Artificial Sequence
  Synthetic Polynucleotide
atggccttaccagtgaccgccttgctcctgccgctggccttgctgctccacgccgccaggccggacatccagatgacacagagccctagcagcctgtctgccagcgtgggagacagagtgaccatcacatgcaaggccagcgaccacatcaacaactggctggcctggtatcagcagaagcctggacaggcccctaagctgctgatctacggcgctaccacactggaaacaggcgtgcccagcagattttctggcagcggctctggcaccgactacaccctgacaatatccagcctccagcctgaggacttcgccacctactactgtcagcagagctggaacaccccttggacattcggccagggcaccaagctggaaatcaagagactcgagggacagcctaaggccaatcctaccgtgacactgttccctccaagcagcgaagaactccaggccaacaaggccacacttgtgtgcctgatctccgacttctaccctggggctgtgacagtggcttggaaggccgatggatctcctgtgaaagccggcgtggaaaccaccaagccatccaagcagagcaacaacaaatacgccgccagctcctacctgagcctgacacctgagcagtggaagtcccacagatcctacagctgccaagtgacccacgaaggcagcaccgtggaaaagacagtggcccctacagagtgcagcggatccggcatgcggactgaagacctcccaaaggctgtggtgttcctggagcctcaatggtacagggtgctggagaaggacagtgtgactctgaagtgccagggagcctactcccctgaggacaattccacacagtggtttcacaatgagagcctcatctcaagccaggcctccagctacttcattgacgctgccacagtggacgacagtggagagtacaggtgccagacaaacctctccaccctcagtgacccggtgcagctagaagtccatatcggctggctgttgctccaggcccctcggtgggtgttcaaggaggaagaccctattcacctgaggtgtcacagctggaagaacactgctctgcataaggtcacatatttacagaatggcaaaggcaggaagtattttcatcataattctgacttctacattccaaaagccacactcaaagacagcggctcctacttctgcagggggcttgttgggagtaaaaatgtgtcttcagagactgtgaacatcaccatcactcaaggtttggcagtgtcaaccatctcatcattctttccacctggctaccaagtgtccttctgcctggtcatggtgctgctgttcgccgtggataccggcctgtacttcagcgtcaagaccaacatccggtccagcaccagagactggaaggaccacaagttcaagtggcggaaggaccctcaggacaagagggccaagcgatctggatctggagcaacaaacttctcactactcaaacaagcaggtgacgtggaggagaatcccgggcctactagtatggactggatttggcgcatccttttccttgtcggcgctgctaccggcgcgcattccttcgaacaagttcagcttcaacagcctggcgctgagctggtcaaacctggcgcttctgtgaagatgagctgcaaagccagcggctacgccttcagcagctactggatcaactggatgaagcagaaacccggccagggactcgaatggatcggccaaatctatcccggcgacggcgacaccaactacaacggcaagttcaagggcagagccacactgaccgccgatacctctagcagcacagcctacatgcagctgagcagcctgaccagcgaagatagcgccgtgtacttctgtgcccggtccatcacaacagtcgtgggctgcgctatggactattggggccagggaacaagcgtgaccgtgtctagtacgcgtgcctctacaaagggaccctccgtgtttcctctggctcccagcagcaagtctacaagcggaggaacagccgctctgggctgcctggtcaaggattactttcccgagcctgtgaccgtgtcctggaatagcggagcactgacaagcggcgtgcacacctttccagccgtgctgcaaagcagcggcctgtactctctgagcagcgtggtcacagtgcctagctctagcctgggcacccagacctacatctgcaatgtgaaccacaagcctagcaacaccaaggtggacaagagagtggaacccaagagctgtggtaccggaatgaggactgaggatcttcccaaagctgtcgtctttctcgaaccccaatggtatcgggtgctcgaaaaagactctgtgacactgaaatgccaaggggcctactctcccgaggacaactccacacagtggtttcataatgagtccctcatcagctctcaggccagctcttatttcattgatgccgctacagtggacgactccggcgagtatcggtgtcagaccaatctgtctacactgtctgaccccgtgcagcttgaggtccacattggatggttgctcttgcaagccccacgctgggttttcaaagaggaagatccaatccatctgcggtgccacagctggaaaaacaccgctctccacaaagtcacatacctgcaaaatggcaaaggacgcaaatacttccatcacaattccgatttttacattccgaaggctaccctgaaagacagcggcagctatttctgccggggactcgtcggctccaagaatgtgtcctccgaaaccgtgaatatcacgattacccaaggactggctgtgcctacaatctctagcttctttccgcctggataccaagtctccttctgtcttgtgatggtcctcctgtttgctgtggacacaggactgtacttttccgtgaaaacgaacatccgcagctccacacgcgattggaaagatcacaagtttaaatggcgcaaagatccccaggacaagcgcgccaagagaagcggatctggcgtgaagcagaccctgaatttcgacctgctgaagctggctggcgacgtggaatccaacccaggcccttctagaggccatatgaccgagtacaagcccacggtgcgcctcgccacccgcgacgacgtccccagggccgtacgcaccctcgccgccgcgttcgccgactaccccgccacgcgccacaccgtcgatccggaccgccacatcgagcgggtcaccgagctgcaagaactcttcctcacgcgcgtcgggctcgacatcggcaaggtgtgggtcgcggacgacggcgccgcggtggcggtctggaccacgccggagagcgtcgaagcgggggcggtgttcgccgagatcggcccgcgcatggccgagttgagcggttcccggctggccgcgcagcaacagatggaaggcctcctggcgccgcaccggcccaaggagcccgcgtggttcctggccaccgtcggcgtctcgcccgaccaccagggcaagggtctgggcagcgccgtcgtgctccccggagtggaggcggccgagcgcgccggggtgcccgccttcctggagacctccgcgccccgcaacctccccttctacgagcggctcggcttcaccgtcaccgccgacgtcgaggtgcccgaaggaccgcgcacctggtgcatgacccgcaagcccggtgcctga

SEQ ID NO: 1631 - DNA, 4092 bp, Artificial Sequence
  Synthetic Polynucleotide
atggccttaccagtgaccgccttgctcctgccgctggccttgctgctccacgccgccaggccggaagtgcagctggttgaatctggcggaggactggttcaggctggcggatctctgagactgtcttgtgccgccagcggcagaacctttagcatgggctggtttagacaggcccctggcaaagagagagagttcgtcgccgccatcacatactctggcggcagcccttactacgccgactctgtgaagggcagattcaccatcagccgggacaacgccaagaacaccgtgtacctccagatgaacagcctgaagcctgaggacaccgccgtgtactactgcgccgccaatccaacatacggcagcgactggaacgccgagaattggggccagggaacccaagtgacagtgtctagcggtaccggcggaggcggatctggcggcggaggtagcggtggcggaggatctgaattcgacatccagatgacacagagccctagcagcctgtctgccagcgtgggagacagagtgaccatcacatgcaaggccagcgaccacatcaacaactggctggcctggtatcagcagaagcctggacaggcccctaagctgctgatctacggcgctaccacactggaaacaggcgtgcccagcagattttctggcagcggctctggcaccgactacaccctgacaatatccagcctccagcctgaggacttcgccacctactactgtcagcagagctggaacaccccttggacattcggccagggcaccaagctggaaatcaagagactcgagggacagcctaaggccaatcctaccgtgacactgttccctccaagcagcgaagaactccaggccaacaaggccacacttgtgtgcctgatctccgacttctaccctggggctgtgacagtggcttggaaggccgatggatctcctgtgaaagccggcgtggaaaccaccaagccatccaagcagagcaacaacaaatacgccgccagctcctacctgagcctgacacctgagcagtggaagtcccacagatcctacagctgccaagtgacccacgaaggcagcaccgtggaaaagacagtggcccctacagagtgcagcggatccggcatgcggactgaagacctcccaaaggctgtggtgttcctggagcctcaatggtacagggtgctggagaaggacagtgtgactctgaagtgccagggagcctactcccctgaggacaattccacacagtggtttcacaatgagagcctcatctcaagccaggcctccagctacttcattgacgctgccacagtggacgacagtggagagtacaggtgccagacaaacctctccaccctcagtgacccggtgcagctagaagtccatatcggctggctgttgctccaggcccctcggtgggtgttcaaggaggaagaccctattcacctgaggtgtcacagctggaagaacactgctctgcataaggtcacatatttacagaatggcaaaggcaggaagtattttcatcataattctgacttctacattccaaaagccacactcaaagacagcggctcctacttctgcagggggcttgttgggagtaaaaatgtgtcttcagagactgtgaacatcaccatcactcaaggtttggcagtgtcaaccatctcatcattctttccacctggctaccaagtgtccttctgcctggtcatggtgctgctgttcgccgtggataccggcctgtacttcagcgtcaagaccaacatccggtccagcaccagagactggaaggaccacaagttcaagtggcggaaggaccctcaggacaagagggccaagcgatctggatctggagcaacaaacttctcactactcaaacaagcaggtgacgtggaggagaatcccgggcctactagtatggactggatttggcgcatccttttccttgtcggcgctgctaccggcgcgcattccttcgaacaagttcagcttcaacagcctggcgctgagctggtcaaacctggcgcttctgtgaagatgagctgcaaagccagcggctacgccttcagcagctactggatcaactggatgaagcagaaacccggccagggactcgaatggatcggccaaatctatcccggcgacggcgacaccaactacaacggcaagttcaagggcagagccacactgaccgccgatacctctagcagcacagcctacatgcagctgagcagcctgaccagcgaagatagcgccgtgtacttctgtgcccggtccatcacaacagtcgtgggctgcgctatggactattggggccagggaacaagcgtgaccgtgtctagtacgcgtgcctctacaaagggaccctccgtgtttcctctggctcccagcagcaagtctacaagcggaggaacagccgctctgggctgcctggtcaaggattactttcccgagcctgtgaccgtgtcctggaatagcggagcactgacaagcggcgtgcacacctttccagccgtgctgcaaagcagcggcctgtactctctgagcagcgtggtcacagtgcctagctctagcctgggcacccagacctacatctgcaatgtgaaccacaagcctagcaacaccaaggtggacaagagagtggaacccaagagctgtggtaccggaatgaggactgaggatcttcccaaagctgtcgtctttctcgaaccccaatggtatcgggtgctcgaaaaagactctgtgacactgaaatgccaaggggcctactctcccgaggacaactccacacagtggtttcataatgagtccctcatcagctctcaggccagctcttatttcattgatgccgctacagtggacgactccggcgagtatcggtgtcagaccaatctgtctacactgtctgaccccgtgcagcttgaggtccacattggatggttgctcttgcaagccccacgctgggttttcaaagaggaagatccaatccatctgcggtgccacagctggaaaaacaccgctctccacaaagtcacatacctgcaaaatggcaaaggacgcaaatacttccatcacaattccgatttttacattccgaaggctaccctgaaagacagcggcagctatttctgccggggactcgtcggctccaagaatgtgtcctccgaaaccgtgaatatcacgattacccaaggactggctgtgcctacaatctctagcttctttccgcctggataccaagtctccttctgtcttgtgatggtcctcctgtttgctgtggacacaggactgtacttttccgtgaaaacgaacatccgcagctccacacgcgattggaaagatcacaagtttaaatggcgcaaagatccccaggacaagcgcgccaagagaagcggatctggcgtgaagcagaccctgaatttcgacctgctgaagctggctggcgacgtggaatccaacccaggcccttctagaggccatatgaccgagtacaagcccacggtgcgcctcgccacccgcgacgacgtccccagggccgtacgcaccctcgccgccgcgttcgccgactaccccgccacgcgccacaccgtcgatccggaccgccacatcgagcgggtcaccgagctgcaagaactcttcctcacgcgcgtcgggctcgacatcggcaaggtgtgggtcgcggacgacggcgccgcggtggcggtctggaccacgccggagagcgtcgaagcgggggcggtgttcgccgagatcggcccgcgcatggccgagttgagcggttcccggctggccgcgcagcaacagatggaaggcctcctggcgccgcaccggcccaaggagcccgcgtggttcctggccaccgtcggcgtctcgcccgaccaccagggcaagggtctgggcagcgccgtcgtgctccccggagtggaggcggccgagcgcgccggggtgcccgccttcctggagacctccgcgccccgcaacctccccttctacgagcggctcggcttcaccgtcaccgccgacgtcgaggtgcccgaaggaccgcgcacctggtgcatgacccgcaagcccggtgcctga

SEQ ID NO: 1632 - DNA, 4503 bp, Artificial Sequence
  Synthetic Polynucleotide
atggccttaccagtgaccgccttgctcctgccgctggccttgctgctccacgccgccaggccggaagtgcagctggttgaatctggcggaggactggttcaggctggcggatctctgagactgtcttgtgccgccagcggcagaacctttagcatgggctggtttagacaggcccctggcaaagagagagagttcgtcgccgccatcacatactctggcggcagcccttactacgccgactctgtgaagggcagattcaccatcagccgggacaacgccaagaacaccgtgtacctccagatgaacagcctgaagcctgaggacaccgccgtgtactactgcgccgccaatccaacatacggcagcgactggaacgccgagaattggggccagggaacccaagtgacagtgtctagcggtaccggcggaggcggatctggcggcggaggtagcggtggcggaggatctgaattcgacatccagatgacacagagccctagcagcctgtctgccagcgtgggagacagagtgaccatcacatgcaaggccagcgaccacatcaacaactggctggcctggtatcagcagaagcctggacaggcccctaagctgctgatctacggcgctaccacactggaaacaggcgtgcccagcagattttctggcagcggctctggcaccgactacaccctgacaatatccagcctccagcctgaggacttcgccacctactactgtcagcagagctggaacaccccttggacattcggccagggcaccaagctggaaatcaagagactcgagggacagcctaaggccaatcctaccgtgacactgttccctccaagcagcgaagaactccaggccaacaaggccacacttgtgtgcctgatctccgacttctaccctggggctgtgacagtggcttggaaggccgatggatctcctgtgaaagccggcgtggaaaccaccaagccatccaagcagagcaacaacaaatacgccgccagctcctacctgagcctgacacctgagcagtggaagtcccacagatcctacagctgccaagtgacccacgaaggcagcaccgtggaaaagacagtggcccctacagagtgcagcggatccggcatgcggactgaagacctcccaaaggctgtggtgttcctggagcctcaatggtacagggtgctggagaaggacagtgtgactctgaagtgccagggagcctactcccctgaggacaattccacacagtggtttcacaatgagagcctcatctcaagccaggcctccagctacttcattgacgctgccacagtggacgacagtggagagtacaggtgccagacaaacctctccaccctcagtgacccggtgcagctagaagtccatatcggctggctgttgctccaggcccctcggtgggtgttcaaggaggaagaccctattcacctgaggtgtcacagctggaagaacactgctctgcataaggtcacatatttacagaatggcaaaggcaggaagtattttcatcataattctgacttctacattccaaaagccacactcaaagacagcggctcctacttctgcagggggcttgttgggagtaaaaatgtgtcttcagagactgtgaacatcaccatcactcaaggtttggcagtgtcaaccatctcatcattctttccacctggctaccaagtgtccttctgcctggtcatggtgctgctgttcgccgtggataccggcctgtacttcagcgtcaagaccaacatccggtccagcaccagagactggaaggaccacaagttcaagtggcggaaggaccctcaggacaagagggccaagcgatctggatctggagcaacaaacttctcactactcaaacaagcaggtgacgtggaggagaatcccgggcctactagtatggactggatttggcgcatccttttccttgtcggcgctgctaccggcgcgcattccgggcccgaagtgcaactggttgaatccggtggcggcctggtgcaagcaggcggatctctcagacttagctgtgccgcctccggcagaaccttcacaatgggatggtttaggcaggctccagggaaagagagagagttcgtcgccgccatctctctgtctcccacactggcctactacgccgactctgtgaaaggccggttcaccatctccagagataatgccaagaacaccgtggtgctgcaaatgaactctctgaaacccgaggatacagccctgtactattgtgccgctgaccggaagtccgtgatgagcatcagacccgattactggggacagggcacacaagtcacagtgtcctctggatccggcggcggaggatctggcggaggcggatctgggggcggaggctctttcgaacaagttcagcttcaacagcctggcgctgagctggtcaaacctggcgcttctgtgaagatgagctgcaaagccagcggctacgccttcagcagctactggatcaactggatgaagcagaaacccggccagggactcgaatggatcggccaaatctatcccggcgacggcgacaccaactacaacggcaagttcaagggcagagccacactgaccgccgatacctctagcagcacagcctacatgcagctgagcagcctgaccagcgaagatagcgccgtgtacttctgtgcccggtccatcacaacagtcgtgggctgcgctatggactattggggccagggaacaagcgtgaccgtgtctagtacgcgtgcctctacaaagggaccctccgtgtttcctctggctcccagcagcaagtctacaagcggaggaacagccgctctgggctgcctggtcaaggattactttcccgagcctgtgaccgtgtcctggaatagcggagcactgacaagcggcgtgcacacctttccagccgtgctgcaaagcagcggcctgtactctctgagcagcgtggtcacagtgcctagctctagcctgggcacccagacctacatctgcaatgtgaaccacaagcctagcaacaccaaggtggacaagagagtggaacccaagagctgtggtaccggaatgaggactgaggatcttcccaaagctgtcgtctttctcgaaccccaatggtatcgggtgctcgaaaaagactctgtgacactgaaatgccaaggggcctactctcccgaggacaactccacacagtggtttcataatgagtccctcatcagctctcaggccagctcttatttcattgatgccgctacagtggacgactccggcgagtatcggtgtcagaccaatctgtctacactgtctgaccccgtgcagcttgaggtccacattggatggttgctcttgcaagccccacgctgggttttcaaagaggaagatccaatccatctgcggtgccacagctggaaaaacaccgctctccacaaagtcacatacctgcaaaatggcaaaggacgcaaatacttccatcacaattccgatttttacattccgaaggctaccctgaaagacagcggcagctatttctgccggggactcgtcggctccaagaatgtgtcctccgaaaccgtgaatatcacgattacccaaggactggctgtgcctacaatctctagcttctttccgcctggataccaagtctccttctgtcttgtgatggtcctcctgtttgctgtggacacaggactgtacttttccgtgaaaacgaacatccgcagctccacacgcgattggaaagatcacaagtttaaatggcgcaaagatccccaggacaagcgcgccaagagaagcggatctggcgtgaagcagaccctgaatttcgacctgctgaagctggctggcgacgtggaatccaacccaggcccttctagaggccatatgaccgagtacaagcccacggtgcgcctcgccacccgcgacgacgtccccagggccgtacgcaccctcgccgccgcgttcgccgactaccccgccacgcgccacaccgtcgatccggaccgccacatcgagcgggtcaccgagctgcaagaactcttcctcacgcgcgtcgggctcgacatcggcaaggtgtgggtcgcggacgacggcgccgcggtggcggtctggaccacgccggagagcgtcgaagcgggggcggtgttcgccgagatcggcccgcgcatggccgagttgagcggttcccggctggccgcgcagcaacagatggaaggcctcctggcgccgcaccggcccaaggagcccgcgtggttcctggccaccgtcggcgtctcgcccgaccaccagggcaagggtctgggcagcgccgtcgtgctccccggagtggaggcggccgagcgcgccggggtgcccgccttcctggagacctccgcgccccgcaacctccccttctacgagcggctcggcttcaccgtcaccgccgacgtcgaggtgcccgaaggaccgcgcacctggtgcatgacccgcaagcccggtgcctga

SEQ ID NO: 1633 - DNA, 3702 bp, Artificial Sequence
  Synthetic Polynucleotide
atggccttaccagtgaccgccttgctcctgccgctggccttgctgctccacgccgccaggccggaagtgcagctggttgaatctggcggaggactggttcaggctggcggatctctgagactgtcttgtgccgccagcggcagaacctttagcatgggctggtttagacaggcccctggcaaagagagagagttcgtcgccgccatcacatactctggcggcagcccttactacgccgactctgtgaagggcagattcaccatcagccgggacaacgccaagaacaccgtgtacctccagatgaacagcctgaagcctgaggacaccgccgtgtactactgcgccgccaatccaacatacggcagcgactggaacgccgagaattggggccagggaacccaagtgacagtgtctagcctcgagggacagcctaaggccaatcctaccgtgacactgttccctccaagcagcgaagaactccaggccaacaaggccacacttgtgtgcctgatctccgacttctaccctggggctgtgacagtggcttggaaggccgatggatctcctgtgaaagccggcgtggaaaccaccaagccatccaagcagagcaacaacaaatacgccgccagctcctacctgagcctgacacctgagcagtggaagtcccacagatcctacagctgccaagtgacccacgaaggcagcaccgtggaaaagacagtggcccctacagagtgcagcggatccggcatgcggactgaagacctcccaaaggctgtggtgttcctggagcctcaatggtacagggtgctggagaaggacagtgtgactctgaagtgccagggagcctactcccctgaggacaattccacacagtggtttcacaatgagagcctcatctcaagccaggcctccagctacttcattgacgctgccacagtggacgacagtggagagtacaggtgccagacaaacctctccaccctcagtgacccggtgcagctagaagtccatatcggctggctgttgctccaggcccctcggtgggtgttcaaggaggaagaccctattcacctgaggtgtcacagctggaagaacactgctctgcataaggtcacatatttacagaatggcaaaggcaggaagtattttcatcataattctgacttctacattccaaaagccacactcaaagacagcggctcctacttctgcagggggcttgttgggagtaaaaatgtgtcttcagagactgtgaacatcaccatcactcaaggtttggcagtgtcaaccatctcatcattctttccacctggctaccaagtgtccttctgcctggtcatggtgctgctgttcgccgtggataccggcctgtacttcagcgtcaagaccaacatccggtccagcaccagagactggaaggaccacaagttcaagtggcggaaggaccctcaggacaagagggccaagcgatctggatctggagcaacaaacttctcactactcaaacaagcaggtgacgtggaggagaatcccgggcctactagtatggactggatttggcgcatccttttccttgtcggcgctgctaccggcgcgcattccgggcccgaagtgcaactggttgaatccggtggcggcctggtgcaagcaggcggatctctcagacttagctgtgccgcctccggcagaaccttcacaatgggatggtttaggcaggctccagggaaagagagagagttcgtcgccgccatctctctgtctcccacactggcctactacgccgactctgtgaaaggccggttcaccatctccagagataatgccaagaacaccgtggtgctgcaaatgaactctctgaaacccgaggatacagccctgtactattgtgccgctgaccggaagtccgtgatgagcatcagacccgattactggggacagggcacacaagtcacagtgtcctctacgcgtgcctctacaaagggaccctccgtgtttcctctggctcccagcagcaagtctacaagcggaggaacagccgctctgggctgcctggtcaaggattactttcccgagcctgtgaccgtgtcctggaatagcggagcactgacaagcggcgtgcacacctttccagccgtgctgcaaagcagcggcctgtactctctgagcagcgtggtcacagtgcctagctctagcctgggcacccagacctacatctgcaatgtgaaccacaagcctagcaacaccaaggtggacaagagagtggaacccaagagctgtggtaccggaatgaggactgaggatcttcccaaagctgtcgtctttctcgaaccccaatggtatcgggtgctcgaaaaagactctgtgacactgaaatgccaaggggcctactctcccgaggacaactccacacagtggtttcataatgagtccctcatcagctctcaggccagctcttatttcattgatgccgctacagtggacgactccggcgagtatcggtgtcagaccaatctgtctacactgtctgaccccgtgcagcttgaggtccacattggatggttgctcttgcaagccccacgctgggttttcaaagaggaagatccaatccatctgcggtgccacagctggaaaaacaccgctctccacaaagtcacatacctgcaaaatggcaaaggacgcaaatacttccatcacaattccgatttttacattccgaaggctaccctgaaagacagcggcagctatttctgccggggactcgtcggctccaagaatgtgtcctccgaaaccgtgaatatcacgattacccaaggactggctgtgcctacaatctctagcttctttccgcctggataccaagtctccttctgtcttgtgatggtcctcctgtttgctgtggacacaggactgtacttttccgtgaaaacgaacatccgcagctccacacgcgattggaaagatcacaagtttaaatggcgcaaagatccccaggacaagcgcgccaagagaagcggatctggcgtgaagcagaccctgaatttcgacctgctgaagctggctggcgacgtggaatccaacccaggcccttctagaggccatatgaccgagtacaagcccacggtgcgcctcgccacccgcgacgacgtccccagggccgtacgcaccctcgccgccgcgttcgccgactaccccgccacgcgccacaccgtcgatccggaccgccacatcgagcgggtcaccgagctgcaagaactcttcctcacgcgcgtcgggctcgacatcggcaaggtgtgggtcgcggacgacggcgccgcggtggcggtctggaccacgccggagagcgtcgaagcgggggcggtgttcgccgagatcggcccgcgcatggccgagttgagcggttcccggctggccgcgcagcaacagatggaaggcctcctggcgccgcaccggcccaaggagcccgcgtggttcctggccaccgtcggcgtctcgcccgaccaccagggcaagggtctgggcagcgccgtcgtgctccccggagtggaggcggccgagcgcgccggggtgcccgccttcctggagacctccgcgccccgcaacctccccttctacgagcggctcggcttcaccgtcaccgccgacgtcgaggtgcccgaaggaccgcgcacctggtgcatgacccgcaagcccggtgcctga

SEQ ID NO: 1634 - DNA, 3726 bp, Artificial Sequence
  Synthetic Polynucleotide
atggccttaccagtgaccgccttgctcctgccgctggccttgctgctccacgccgccaggccggacatccagatgacacagagccctagcagcctgtctgccagcgtgggagacagagtgaccatcacatgcaaggccagcgaccacatcaacaactggctggcctggtatcagcagaagcctggacaggcccctaagctgctgatctacggcgctaccacactggaaacaggcgtgcccagcagattttctggcagcggctctggcaccgactacaccctgacaatatccagcctccagcctgaggacttcgccacctactactgtcagcagagctggaacaccccttggacattcggccagggcaccaagctggaaatcaagagactcgaggacctgaagaacgtgttcccacctgaggtggccgtgttcgagcctagcgaggccgagatcagccacacccagaaagccaccctcgtgtgcctggctaccggcttctaccccgaccatgtggaactgtcttggtgggtcaacggcaaagaggtgcacagcggcgtgtctaccgacccccagccactgaaagaacagcccgccctgaacgacagccggtactgcctgagcagcagactgagagtgtccgccaccttctggcagaacccccggaaccacttcagatgccaggtgcagttctacggcctgagcgagaacgacgagtggacccaggacagagccaagcccgtgacccagatcgtgtctgccgaagcctggggcagagccgattgcggatccggcatgcggactgaagacctcccaaaggctgtggtgttcctggagcctcaatggtacagggtgctggagaaggacagtgtgactctgaagtgccagggagcctactcccctgaggacaattccacacagtggtttcacaatgagagcctcatctcaagccaggcctccagctacttcattgacgctgccacagtggacgacagtggagagtacaggtgccagacaaacctctccaccctcagtgacccggtgcagctagaagtccatatcggctggctgttgctccaggcccctcggtgggtgttcaaggaggaagaccctattcacctgaggtgtcacagctggaagaacactgctctgcataaggtcacatatttacagaatggcaaaggcaggaagtattttcatcataattctgacttctacattccaaaagccacactcaaagacagcggctcctacttctgcagggggcttgttgggagtaaaaatgtgtcttcagagactgtgaacatcaccatcactcaaggtttggcagtgtcaaccatctcatcattctttccacctggctaccaagtgtccttctgcctggtcatggtgctgctgttcgccgtggataccggcctgtacttcagcgtcaagaccaacatccggtccagcaccagagactggaaggaccacaagttcaagtggcggaaggaccctcaggacaagagggccaagcgatctggatctggagcaacaaacttctcactactcaaacaagcaggtgacgtggaggagaatcccgggcctactagtatggactggatttggcgcatccttttccttgtcggcgctgctaccggcgcgcattccttcgaacaagttcagcttcaacagcctggcgctgagctggtcaaacctggcgcttctgtgaagatgagctgcaaagccagcggctacgccttcagcagctactggatcaactggatgaagcagaaacccggccagggactcgaatggatcggccaaatctatcccggcgacggcgacaccaactacaacggcaagttcaagggcagagccacactgaccgccgatacctctagcagcacagcctacatgcagctgagcagcctgaccagcgaagatagcgccgtgtacttctgtgcccggtccatcacaacagtcgtgggctgcgctatggactattggggccagggaacaagcgtgaccgtgtctagtacgcgtatccagaaccctgatcctgccgtgtaccagctgcgggatagcaagagcagcgacaagagcgtgtgtctgttcaccgacttcgacagccagaccaacgtgtcccagagcaaggactccgacgtgtacatcaccgataagaccgtgctggacatgcggagcatggacttcaagagcaactccgccgtggcctggtccaacaagtccgatttcgcctgcgccaacgccttcaacaacagcattatccccgaggacacattcttcccaagccccgagagcagctgcggtaccggaatgaggactgaggatcttcccaaagctgtcgtctttctcgaaccccaatggtatcgggtgctcgaaaaagactctgtgacactgaaatgccaaggggcctactctcccgaggacaactccacacagtggtttcataatgagtccctcatcagctctcaggccagctcttatttcattgatgccgctacagtggacgactccggcgagtatcggtgtcagaccaatctgtctacactgtctgaccccgtgcagcttgaggtccacattggatggttgctcttgcaagccccacgctgggttttcaaagaggaagatccaatccatctgcggtgccacagctggaaaaacaccgctctccacaaagtcacatacctgcaaaatggcaaaggacgcaaatacttccatcacaattccgatttttacattccgaaggctaccctgaaagacagcggcagctatttctgccggggactcgtcggctccaagaatgtgtcctccgaaaccgtgaatatcacgattacccaaggactggctgtgcctacaatctctagcttctttccgcctggataccaagtctccttctgtcttgtgatggtcctcctgtttgctgtggacacaggactgtacttttccgtgaaaacgaacatccgcagctccacacgcgattggaaagatcacaagtttaaatggcgcaaagatccccaggacaagcgcgccaagagaagcggatctggcgtgaagcagaccctgaatttcgacctgctgaagctggctggcgacgtggaatccaacccaggcccttctagaggccatatgaccgagtacaagcccacggtgcgcctcgccacccgcgacgacgtccccagggccgtacgcaccctcgccgccgcgttcgccgactaccccgccacgcgccacaccgtcgatccggaccgccacatcgagcgggtcaccgagctgcaagaactcttcctcacgcgcgtcgggctcgacatcggcaaggtgtgggtcgcggacgacggcgccgcggtggcggtctggaccacgccggagagcgtcgaagcgggggcggtgttcgccgagatcggcccgcgcatggccgagttgagcggttcccggctggccgcgcagcaacagatggaaggcctcctggcgccgcaccggcccaaggagcccgcgtggttcctggccaccgtcggcgtctcgcccgaccaccagggcaagggtctgggcagcgccgtcgtgctccccggagtggaggcggccgagcgcgccggggtgcccgccttcctggagacctccgcgccccgcaacctccccttctacgagcggctcggcttcaccgtcaccgccgacgtcgaggtgcccgaaggaccgcgcacctggtgcatgacccgcaagcccggtgcctga

SEQ ID NO: 1635 - DNA, 4137 bp, Artificial Sequence
  Synthetic Polynucleotide
atggccttaccagtgaccgccttgctcctgccgctggccttgctgctccacgccgccaggccggaagtgcagctggttgaatctggcggaggactggttcaggctggcggatctctgagactgtcttgtgccgccagcggcagaacctttagcatgggctggtttagacaggcccctggcaaagagagagagttcgtcgccgccatcacatactctggcggcagcccttactacgccgactctgtgaagggcagattcaccatcagccgggacaacgccaagaacaccgtgtacctccagatgaacagcctgaagcctgaggacaccgccgtgtactactgcgccgccaatccaacatacggcagcgactggaacgccgagaattggggccagggaacccaagtgacagtgtctagcggtaccggcggaggcggatctggcggcggaggtagcggtggcggaggatctgaattcgacatccagatgacacagagccctagcagcctgtctgccagcgtgggagacagagtgaccatcacatgcaaggccagcgaccacatcaacaactggctggcctggtatcagcagaagcctggacaggcccctaagctgctgatctacggcgctaccacactggaaacaggcgtgcccagcagattttctggcagcggctctggcaccgactacaccctgacaatatccagcctccagcctgaggacttcgccacctactactgtcagcagagctggaacaccccttggacattcggccagggcaccaagctggaaatcaagagactcgaggacctgaagaacgtgttcccacctgaggtggccgtgttcgagcctagcgaggccgagatcagccacacccagaaagccaccctcgtgtgcctggctaccggcttctaccccgaccatgtggaactgtcttggtgggtcaacggcaaagaggtgcacagcggcgtgtctaccgacccccagccactgaaagaacagcccgccctgaacgacagccggtactgcctgagcagcagactgagagtgtccgccaccttctggcagaacccccggaaccacttcagatgccaggtgcagttctacggcctgagcgagaacgacgagtggacccaggacagagccaagcccgtgacccagatcgtgtctgccgaagcctggggcagagccgattgcggatccggcatgcggactgaagacctcccaaaggctgtggtgttcctggagcctcaatggtacagggtgctggagaaggacagtgtgactctgaagtgccagggagcctactcccctgaggacaattccacacagtggtttcacaatgagagcctcatctcaagccaggcctccagctacttcattgacgctgccacagtggacgacagtggagagtacaggtgccagacaaacctctccaccctcagtgacccggtgcagctagaagtccatatcggctggctgttgctccaggcccctcggtgggtgttcaaggaggaagaccctattcacctgaggtgtcacagctggaagaacactgctctgcataaggtcacatatttacagaatggcaaaggcaggaagtattttcatcataattctgacttctacattccaaaagccacactcaaagacagcggctcctacttctgcagggggcttgttgggagtaaaaatgtgtcttcagagactgtgaacatcaccatcactcaaggtttggcagtgtcaaccatctcatcattctttccacctggctaccaagtgtccttctgcctggtcatggtgctgctgttcgccgtggataccggcctgtacttcagcgtcaagaccaacatccggtccagcaccagagactggaaggaccacaagttcaagtggcggaaggaccctcaggacaagagggccaagcgatctggatctggagcaacaaacttctcactactcaaacaagcaggtgacgtggaggagaatcccgggcctactagtatggactggatttggcgcatccttttccttgtcggcgctgctaccggcgcgcattccttcgaacaagttcagcttcaacagcctggcgctgagctggtcaaacctggcgcttctgtgaagatgagctgcaaagccagcggctacgccttcagcagctactggatcaactggatgaagcagaaacccggccagggactcgaatggatcggccaaatctatcccggcgacggcgacaccaactacaacggcaagttcaagggcagagccacactgaccgccgatacctctagcagcacagcctacatgcagctgagcagcctgaccagcgaagatagcgccgtgtacttctgtgcccggtccatcacaacagtcgtgggctgcgctatggactattggggccagggaacaagcgtgaccgtgtctagtacgcgtatccagaaccctgatcctgccgtgtaccagctgcgggatagcaagagcagcgacaagagcgtgtgtctgttcaccgacttcgacagccagaccaacgtgtcccagagcaaggactccgacgtgtacatcaccgataagaccgtgctggacatgcggagcatggacttcaagagcaactccgccgtggcctggtccaacaagtccgatttcgcctgcgccaacgccttcaacaacagcattatccccgaggacacattcttcccaagccccgagagcagctgcggtaccggaatgaggactgaggatcttcccaaagctgtcgtctttctcgaaccccaatggtatcgggtgctcgaaaaagactctgtgacactgaaatgccaaggggcctactctcccgaggacaactccacacagtggtttcataatgagtccctcatcagctctcaggccagctcttatttcattgatgccgctacagtggacgactccggcgagtatcggtgtcagaccaatctgtctacactgtctgaccccgtgcagcttgaggtccacattggatggttgctcttgcaagccccacgctgggttttcaaagaggaagatccaatccatctgcggtgccacagctggaaaaacaccgctctccacaaagtcacatacctgcaaaatggcaaaggacgcaaatacttccatcacaattccgatttttacattccgaaggctaccctgaaagacagcggcagctatttctgccggggactcgtcggctccaagaatgtgtcctccgaaaccgtgaatatcacgattacccaaggactggctgtgcctacaatctctagcttctttccgcctggataccaagtctccttctgtcttgtgatggtcctcctgtttgctgtggacacaggactgtacttttccgtgaaaacgaacatccgcagctccacacgcgattggaaagatcacaagtttaaatggcgcaaagatccccaggacaagcgcgccaagagaagcggatctggcgtgaagcagaccctgaatttcgacctgctgaagctggctggcgacgtggaatccaacccaggcccttctagaggccatatgaccgagtacaagcccacggtgcgcctcgccacccgcgacgacgtccccagggccgtacgcaccctcgccgccgcgttcgccgactaccccgccacgcgccacaccgtcgatccggaccgccacatcgagcgggtcaccgagctgcaagaactcttcctcacgcgcgtcgggctcgacatcggcaaggtgtgggtcgcggacgacggcgccgcggtggcggtctggaccacgccggagagcgtcgaagcgggggcggtgttcgccgagatcggcccgcgcatggccgagttgagcggttcccggctggccgcgcagcaacagatggaaggcctcctggcgccgcaccggcccaaggagcccgcgtggttcctggccaccgtcggcgtctcgcccgaccaccagggcaagggtctgggcagcgccgtcgtgctccccggagtggaggcggccgagcgcgccggggtgcccgccttcctggagacctccgcgccccgcaacctccccttctacgagcggctcggcttcaccgtcaccgccgacgtcgaggtgcccgaaggaccgcgcacctggtgcatgacccgcaagcccggtgcctga

SEQ ID NO: 1636 - DNA, 4548 bp, Artificial Sequence
  Synthetic Polynucleotide
atggccttaccagtgaccgccttgctcctgccgctggccttgctgctccacgccgccaggccggaagtgcagctggttgaatctggcggaggactggttcaggctggcggatctctgagactgtcttgtgccgccagcggcagaacctttagcatgggctggtttagacaggcccctggcaaagagagagagttcgtcgccgccatcacatactctggcggcagcccttactacgccgactctgtgaagggcagattcaccatcagccgggacaacgccaagaacaccgtgtacctccagatgaacagcctgaagcctgaggacaccgccgtgtactactgcgccgccaatccaacatacggcagcgactggaacgccgagaattggggccagggaacccaagtgacagtgtctagcggtaccggcggaggcggatctggcggcggaggtagcggtggcggaggatctgaattcgacatccagatgacacagagccctagcagcctgtctgccagcgtgggagacagagtgaccatcacatgcaaggccagcgaccacatcaacaactggctggcctggtatcagcagaagcctggacaggcccctaagctgctgatctacggcgctaccacactggaaacaggcgtgcccagcagattttctggcagcggctctggcaccgactacaccctgacaatatccagcctccagcctgaggacttcgccacctactactgtcagcagagctggaacaccccttggacattcggccagggcaccaagctggaaatcaagagactcgaggacctgaagaacgtgttcccacctgaggtggccgtgttcgagcctagcgaggccgagatcagccacacccagaaagccaccctcgtgtgcctggctaccggcttctaccccgaccatgtggaactgtcttggtgggtcaacggcaaagaggtgcacagcggcgtgtctaccgacccccagccactgaaagaacagcccgccctgaacgacagccggtactgcctgagcagcagactgagagtgtccgccaccttctggcagaacccccggaaccacttcagatgccaggtgcagttctacggcctgagcgagaacgacgagtggacccaggacagagccaagcccgtgacccagatcgtgtctgccgaagcctggggcagagccgattgcggatccggcatgcggactgaagacctcccaaaggctgtggtgttcctggagcctcaatggtacagggtgctggagaaggacagtgtgactctgaagtgccagggagcctactcccctgaggacaattccacacagtggtttcacaatgagagcctcatctcaagccaggcctccagctacttcattgacgctgccacagtggacgacagtggagagtacaggtgccagacaaacctctccaccctcagtgacccggtgcagctagaagtccatatcggctggctgttgctccaggcccctcggtgggtgttcaaggaggaagaccctattcacctgaggtgtcacagctggaagaacactgctctgcataaggtcacatatttacagaatggcaaaggcaggaagtattttcatcataattctgacttctacattccaaaagccacactcaaagacagcggctcctacttctgcagggggcttgttgggagtaaaaatgtgtcttcagagactgtgaacatcaccatcactcaaggtttggcagtgtcaaccatctcatcattctttccacctggctaccaagtgtccttctgcctggtcatggtgctgctgttcgccgtggataccggcctgtacttcagcgtcaagaccaacatccggtccagcaccagagactggaaggaccacaagttcaagtggcggaaggaccctcaggacaagagggccaagcgatctggatctggagcaacaaacttctcactactcaaacaagcaggtgacgtggaggagaatcccgggcctactagtatggactggatttggcgcatccttttccttgtcggcgctgctaccggcgcgcattccgggcccgaagtgcaactggttgaatccggtggcggcctggtgcaagcaggcggatctctcagacttagctgtgccgcctccggcagaaccttcacaatgggatggtttaggcaggctccagggaaagagagagagttcgtcgccgccatctctctgtctcccacactggcctactacgccgactctgtgaaaggccggttcaccatctccagagataatgccaagaacaccgtggtgctgcaaatgaactctctgaaacccgaggatacagccctgtactattgtgccgctgaccggaagtccgtgatgagcatcagacccgattactggggacagggcacacaagtcacagtgtcctctggatccggcggcggaggatctggcggaggcggatctgggggcggaggctctttcgaacaagttcagcttcaacagcctggcgctgagctggtcaaacctggcgcttctgtgaagatgagctgcaaagccagcggctacgccttcagcagctactggatcaactggatgaagcagaaacccggccagggactcgaatggatcggccaaatctatcccggcgacggcgacaccaactacaacggcaagttcaagggcagagccacactgaccgccgatacctctagcagcacagcctacatgcagctgagcagcctgaccagcgaagatagcgccgtgtacttctgtgcccggtccatcacaacagtcgtgggctgcgctatggactattggggccagggaacaagcgtgaccgtgtctagtacgcgtatccagaaccctgatcctgccgtgtaccagctgcgggatagcaagagcagcgacaagagcgtgtgtctgttcaccgacttcgacagccagaccaacgtgtcccagagcaaggactccgacgtgtacatcaccgataagaccgtgctggacatgcggagcatggacttcaagagcaactccgccgtggcctggtccaacaagtccgatttcgcctgcgccaacgccttcaacaacagcattatccccgaggacacattcttcccaagccccgagagcagctgcggtaccggaatgaggactgaggatcttcccaaagctgtcgtctttctcgaaccccaatggtatcgggtgctcgaaaaagactctgtgacactgaaatgccaaggggcctactctcccgaggacaactccacacagtggtttcataatgagtccctcatcagctctcaggccagctcttatttcattgatgccgctacagtggacgactccggcgagtatcggtgtcagaccaatctgtctacactgtctgaccccgtgcagcttgaggtccacattggatggttgctcttgcaagccccacgctgggttttcaaagaggaagatccaatccatctgcggtgccacagctggaaaaacaccgctctccacaaagtcacatacctgcaaaatggcaaaggacgcaaatacttccatcacaattccgatttttacattccgaaggctaccctgaaagacagcggcagctatttctgccggggactcgtcggctccaagaatgtgtcctccgaaaccgtgaatatcacgattacccaaggactggctgtgcctacaatctctagcttctttccgcctggataccaagtctccttctgtcttgtgatggtcctcctgtttgctgtggacacaggactgtacttttccgtgaaaacgaacatccgcagctccacacgcgattggaaagatcacaagtttaaatggcgcaaagatccccaggacaagcgcgccaagagaagcggatctggcgtgaagcagaccctgaatttcgacctgctgaagctggctggcgacgtggaatccaacccaggcccttctagaggccatatgaccgagtacaagcccacggtgcgcctcgccacccgcgacgacgtccccagggccgtacgcaccctcgccgccgcgttcgccgactaccccgccacgcgccacaccgtcgatccggaccgccacatcgagcgggtcaccgagctgcaagaactcttcctcacgcgcgtcgggctcgacatcggcaaggtgtgggtcgcggacgacggcgccgcggtggcggtctggaccacgccggagagcgtcgaagcgggggcggtgttcgccgagatcggcccgcgcatggccgagttgagcggttcccggctggccgcgcagcaacagatggaaggcctcctggcgccgcaccggcccaaggagcccgcgtggttcctggccaccgtcggcgtctcgcccgaccaccagggcaagggtctgggcagcgccgtcgtgctccccggagtggaggcggccgagcgcgccggggtgcccgccttcctggagacctccgcgccccgcaacctccccttctacgagcggctcggcttcaccgtcaccgccgacgtcgaggtgcccgaaggaccgcgcacctggtgcatgacccgcaagcccggtgcctga

SEQ ID NO: 1637 - DNA, 3747 bp, Artificial Sequence
  Synthetic Polynucleotide
atggccttaccagtgaccgccttgctcctgccgctggccttgctgctccacgccgccaggccggaagtgcagctggttgaatctggcggaggactggttcaggctggcggatctctgagactgtcttgtgccgccagcggcagaacctttagcatgggctggtttagacaggcccctggcaaagagagagagttcgtcgccgccatcacatactctggcggcagcccttactacgccgactctgtgaagggcagattcaccatcagccgggacaacgccaagaacaccgtgtacctccagatgaacagcctgaagcctgaggacaccgccgtgtactactgcgccgccaatccaacatacggcagcgactggaacgccgagaattggggccagggaacccaagtgacagtgtctagcctcgaggacctgaagaacgtgttcccacctgaggtggccgtgttcgagcctagcgaggccgagatcagccacacccagaaagccaccctcgtgtgcctggctaccggcttctaccccgaccatgtggaactgtcttggtgggtcaacggcaaagaggtgcacagcggcgtgtctaccgacccccagccactgaaagaacagcccgccctgaacgacagccggtactgcctgagcagcagactgagagtgtccgccaccttctggcagaacccccggaaccacttcagatgccaggtgcagttctacggcctgagcgagaacgacgagtggacccaggacagagccaagcccgtgacccagatcgtgtctgccgaagcctggggcagagccgattgcggatccggcatgcggactgaagacctcccaaaggctgtggtgttcctggagcctcaatggtacagggtgctggagaaggacagtgtgactctgaagtgccagggagcctactcccctgaggacaattccacacagtggtttcacaatgagagcctcatctcaagccaggcctccagctacttcattgacgctgccacagtggacgacagtggagagtacaggtgccagacaaacctctccaccctcagtgacccggtgcagctagaagtccatatcggctggctgttgctccaggcccctcggtgggtgttcaaggaggaagaccctattcacctgaggtgtcacagctggaagaacactgctctgcataaggtcacatatttacagaatggcaaaggcaggaagtattttcatcataattctgacttctacattccaaaagccacactcaaagacagcggctcctacttctgcagggggcttgttgggagtaaaaatgtgtcttcagagactgtgaacatcaccatcactcaaggtttggcagtgtcaaccatctcatcattctttccacctggctaccaagtgtccttctgcctggtcatggtgctgctgttcgccgtggataccggcctgtacttcagcgtcaagaccaacatccggtccagcaccagagactggaaggaccacaagttcaagtggcggaaggaccctcaggacaagagggccaagcgatctggatctggagcaacaaacttctcactactcaaacaagcaggtgacgtggaggagaatcccgggcctactagtatggactggatttggcgcatccttttccttgtcggcgctgctaccggcgcgcattccgggcccgaagtgcaactggttgaatccggtggcggcctggtgcaagcaggcggatctctcagacttagctgtgccgcctccggcagaaccttcacaatgggatggtttaggcaggctccagggaaagagagagagttcgtcgccgccatctctctgtctcccacactggcctactacgccgactctgtgaaaggccggttcaccatctccagagataatgccaagaacaccgtggtgctgcaaatgaactctctgaaacccgaggatacagccctgtactattgtgccgctgaccggaagtccgtgatgagcatcagacccgattactggggacagggcacacaagtcacagtgtcctctacgcgtatccagaaccctgatcctgccgtgtaccagctgcgggatagcaagagcagcgacaagagcgtgtgtctgttcaccgacttcgacagccagaccaacgtgtcccagagcaaggactccgacgtgtacatcaccgataagaccgtgctggacatgcggagcatggacttcaagagcaactccgccgtggcctggtccaacaagtccgatttcgcctgcgccaacgccttcaacaacagcattatccccgaggacacattcttcccaagccccgagagcagctgcggtaccggaatgaggactgaggatcttcccaaagctgtcgtctttctcgaaccccaatggtatcgggtgctcgaaaaagactctgtgacactgaaatgccaaggggcctactctcccgaggacaactccacacagtggtttcataatgagtccctcatcagctctcaggccagctcttatttcattgatgccgctacagtggacgactccggcgagtatcggtgtcagaccaatctgtctacactgtctgaccccgtgcagcttgaggtccacattggatggttgctcttgcaagccccacgctgggttttcaaagaggaagatccaatccatctgcggtgccacagctggaaaaacaccgctctccacaaagtcacatacctgcaaaatggcaaaggacgcaaatacttccatcacaattccgatttttacattccgaaggctaccctgaaagacagcggcagctatttctgccggggactcgtcggctccaagaatgtgtcctccgaaaccgtgaatatcacgattacccaaggactggctgtgcctacaatctctagcttctttccgcctggataccaagtctccttctgtcttgtgatggtcctcctgtttgctgtggacacaggactgtacttttccgtgaaaacgaacatccgcagctccacacgcgattggaaagatcacaagtttaaatggcgcaaagatccccaggacaagcgcgccaagagaagcggatctggcgtgaagcagaccctgaatttcgacctgctgaagctggctggcgacgtggaatccaacccaggcccttctagaggccatatgaccgagtacaagcccacggtgcgcctcgccacccgcgacgacgtccccagggccgtacgcaccctcgccgccgcgttcgccgactaccccgccacgcgccacaccgtcgatccggaccgccacatcgagcgggtcaccgagctgcaagaactcttcctcacgcgcgtcgggctcgacatcggcaaggtgtgggtcgcggacgacggcgccgcggtggcggtctggaccacgccggagagcgtcgaagcgggggcggtgttcgccgagatcggcccgcgcatggccgagttgagcggttcccggctggccgcgcagcaacagatggaaggcctcctggcgccgcaccggcccaaggagcccgcgtggttcctggccaccgtcggcgtctcgcccgaccaccagggcaagggtctgggcagcgccgtcgtgctccccggagtggaggcggccgagcgcgccggggtgcccgccttcctggagacctccgcgccccgcaacctccccttctacgagcggctcggcttcaccgtcaccgccgacgtcgaggtgcccgaaggaccgcgcacctggtgcatgacccgcaagcccggtgcctga

SEQ ID NO: 1638 - DNA, 1902 bp, Artificial Sequence
  Synthetic Polynucleotide
atggccttaccagtgaccgccttgctcctgccgctggccttgctgctccacgccgccaggccggcatgcgaagtgcagctgcttgaaagtggcggcggactgattcagcctggcggatctctgagactgagctgtgccgccagcggcttcaccttttctagccacgccatgacctgggtccgacaggcacctggaaaagggcttgaatgggtgtccgccatcagcggctctggcgattacacacactacgccgacagcgtgaagggcagattcaccatcagcagagacaacagcaagaacaccgtgtacctccagatgaacagcctgagagccgaggacagcgccgtgtattattgcgccaaggatgaggatggcggcagcctgcttggacacagaggacaaggcaccctggtcaccgtttcttccggtaccggcggaggcggatctggcggcggaggtagcggtggcggaggatctgaattcggatctctcgagggcatgcggactgaagacctcccaaaggctgtggtgttcctggagcctcaatggtacagggtgctggagaaggacagtgtgactctgaagtgccagggagcctactcccctgaggacaattccacacagtggtttcacaatgagagcctcatctcaagccaggcctccagctacttcattgacgctgccacagtggacgacagtggagagtacaggtgccagacaaacctctccaccctcagtgacccggtgcagctagaagtccatatcggctggctgttgctccaggcccctcggtgggtgttcaaggaggaagaccctattcacctgaggtgtcacagctggaagaacactgctctgcataaggtcacatatttacagaatggcaaaggcaggaagtattttcatcataattctgacttctacattccaaaagccacactcaaagacagcggctcctacttctgcagggggcttgttgggagtaaaaatgtgtcttcagagactgtgaacatcaccatcactcaaggtttggcagtgtcaaccatctcatcattctttccacctggctaccaagtgtccttctgcctggtcatggtgctgctgttcgccgtggataccggcctgtacttcagcgtcaagaccaacatccggtccagcaccagagactggaaggaccacaagttcaagtggcggaaggaccctcaggacaagagggccaagcgatctggatctggagcaacaaacttctcactactcaaacaagcaggtgacgtggaggagaatcccgggcctactagaggccatatgaccgagtacaagcccacggtgcgcctcgccacccgcgacgacgtccccagggccgtacgcaccctcgccgccgcgttcgccgactaccccgccacgcgccacaccgtcgatccggaccgccacatcgagcgggtcaccgagctgcaagaactcttcctcacgcgcgtcgggctcgacatcggcaaggtgtgggtcgcggacgacggcgccgcggtggcggtctggaccacgccggagagcgtcgaagcgggggcggtgttcgccgagatcggcccgcgcatggccgagttgagcggttcccggctggccgcgcagcaacagatggaaggcctcctggcgccgcaccggcccaaggagcccgcgtggttcctggccaccgtcggcgtctcgcccgaccaccagggcaagggtctgggcagcgccgtcgtgctccccggagtggaggcggccgagcgcgccggggtgcccgccttcctggagacctccgcgccccgcaacctccccttctacgagcggctcggcttcaccgtcaccgccgacgtcgaggtgcccgaaggaccgcgcacctggtgcatgacccgcaagcccggtgcctga

SEQ ID NO: 1639 - DNA, 2610 bp, Artificial Sequence
  Synthetic Polynucleotide
atggccttaccagtgaccgccttgctcctgccgctggccttgctgctccacgccgccaggccggacatccagatgacacagagccctagcagcctgtctgccagcgtgggagacagagtgaccatcacatgcaaggccagcgaccacatcaacaactggctggcctggtatcagcagaagcctggacaggcccctaagctgctgatctacggcgctaccacactggaaacaggcgtgcccagcagattttctggcagcggctctggcaccgactacaccctgacaatatccagcctccagcctgaggacttcgccacctactactgtcagcagagctggaacaccccttggacattcggccagggcaccaagctggaaatcaagagactcgagctgtgggtttcacagcctccagagatcagaaccctggaaggcagcagcgccttcctgccttgcagcttcaatgcctctcagggcagactggctatcggcagcgtgacctggttcagagatgaggtggtgcccggcaaagaagtgcggaacggcacccctgagtttagaggaaggctggcccctctggcctccagcagatttctgcacgatcaccaggccgagctgcacatcagagatgtgcgaggacacgacgccagcatctacgtgtgcagagtggaagtgctcggcctcggagttggcacaggcaatggaacaagactggtggtggaaaaagagcaccctcagctcggagccggaacagtgctgcttctgagagccggcttttacgccgtgtcctttctgtctgtggccgtgggcagcaccgtgtactatcagggcaagtgcctgacctggaagggacctagaaggcaactgcctgctgtggtgcctgctcctttgcctcctccatgtggaagctctgcccatctgctgccacctgttccaggcggaagggccaagcgatctggatctggagcaacaaacttctcactactcaaacaagcaggtgacgtggaggagaatcccgggcctactagtatggactggatttggcgcatccttttccttgtcggcgctgctaccggcgcgcattccttcgaacaagttcagcttcaacagcctggcgctgagctggtcaaacctggcgcttctgtgaagatgagctgcaaagccagcggctacgccttcagcagctactggatcaactggatgaagcagaaacccggccagggactcgaatggatcggccaaatctatcccggcgacggcgacaccaactacaacggcaagttcaagggcagagccacactgaccgccgatacctctagcagcacagcctacatgcagctgagcagcctgaccagcgaagatagcgccgtgtacttctgtgcccggtccatcacaacagtcgtgggctgcgctatggactattggggccagggaacaagcgtgaccgtgtctagtacgcgtattggatggttgctcttgcaagccccacgctgggttttcaaagaggaagatccaatccatctgcggtgccacagctggaaaaacaccgctctccacaaagtcacatacctgcaaaatggcaaaggacgcaaatacttccatcacaattccgatttttacattccgaaggctaccctgaaagacagcggcagctatttctgccggggactcgtcggctccaagaatgtgtcctccgaaaccgtgaatatcacgattacccaaggactggctgtgcctacaatctctagcttctttccgcctggataccaagtctccttctgtcttgtgatggtcctcctgtttgctgtggacacaggactgtacttttccgtgaaaacgaacatccgcagctccacacgcgattggaaagatcacaagtttaaatggcgcaaagatccccaggacaagcgcgccaagagaagcggatctggcgtgaagcagaccctgaatttcgacctgctgaagctggctggcgacgtggaatccaacccaggcccttctagaggccatatgaccgagtacaagcccacggtgcgcctcgccacccgcgacgacgtccccagggccgtacgcaccctcgccgccgcgttcgccgactaccccgccacgcgccacaccgtcgatccggaccgccacatcgagcgggtcaccgagctgcaagaactcttcctcacgcgcgtcgggctcgacatcggcaaggtgtgggtcgcggacgacggcgccgcggtggcggtctggaccacgccggagagcgtcgaagcgggggcggtgttcgccgagatcggcccgcgcatggccgagttgagcggttcccggctggccgcgcagcaacagatggaaggcctcctggcgccgcaccggcccaaggagcccgcgtggttcctggccaccgtcggcgtctcgcccgaccaccagggcaagggtctgggcagcgccgtcgtgctccccggagtggaggcggccgagcgcgccggggtgcccgccttcctggagacctccgcgccccgcaacctccccttctacgagcggctcggcttcaccgtcaccgccgacgtcgaggtgcccgaaggaccgcgcacctggtgcatgacccgcaagcccggtgcctga

SEQ ID NO: 1640 - DNA, 2772 bp, Artificial Sequence
  Synthetic Polynucleotide
atggccttaccagtgaccgccttgctcctgccgctggccttgctgctccacgccgccaggccggcatgcgaagtgcagctgcttgaaagtggcggcggactgattcagcctggcggatctctgagactgagctgtgccgccagcggcttcaccttttctagccacgccatgacctgggtccgacaggcacctggaaaagggcttgaatgggtgtccgccatcagcggctctggcgattacacacactacgccgacagcgtgaagggcagattcaccatcagcagagacaacagcaagaacaccgtgtacctccagatgaacagcctgagagccgaggacagcgccgtgtattattgcgccaaggatgaggatggcggcagcctgcttggacacagaggacaaggcaccctggtcaccgtttcttccggtaccggcggaggcggatctggcggcggaggtagcggtggcggaggatctgaattcggatctctcgagctgtgggtttcacagcctccagagatcagaaccctggaaggcagcagcgccttcctgccttgcagcttcaatgcctctcagggcagactggctatcggcagcgtgacctggttcagagatgaggtggtgcccggcaaagaagtgcggaacggcacccctgagtttagaggaaggctggcccctctggcctccagcagatttctgcacgatcaccaggccgagctgcacatcagagatgtgcgaggacacgacgccagcatctacgtgtgcagagtggaagtgctcggcctcggagttggcacaggcaatggaacaagactggtggtggaaaaagagcaccctcagctcggagccggaacagtgctgcttctgagagccggcttttacgccgtgtcctttctgtctgtggccgtgggcagcaccgtgtactatcagggcaagtgcctgacctggaagggacctagaaggcaactgcctgctgtggtgcctgctcctttgcctcctccatgtggaagctctgcccatctgctgccacctgttccaggcggaagggccaagcgatctggatctggagcaacaaacttctcactactcaaacaagcaggtgacgtggaggagaatcccgggcctactagtgccaccatggactggatttggcgcatccttttccttgtcggcgctgctaccggcgcccattccgggcccgaagtgcagctggttgaatctggcggaggactggttcaggctggcggatctctgagactgtcttgtgccgccagcggcagaacctttagcatgggctggtttagacaggcccctggcaaagagagagagttcgtcgccgccatcacatactctggcggcagcccttactacgccgactctgtgaagggcagattcaccatcagccgggacaacgccaagaacaccgtgtacctccagatgaacagcctgaagcctgaggacaccgccgtgtactactgcgccgccaatccaacatacggcagcgactggaacgccgagaattggggccagggaacccaagtgacagtgtctagcggatccggcggcggaggatctggcggaggcggatctgggggcggaggctctttcgaaggcagcacgcgtattggatggttgctcttgcaagccccacgctgggttttcaaagaggaagatccaatccatctgcggtgccacagctggaaaaacaccgctctccacaaagtcacatacctgcaaaatggcaaaggacgcaaatacttccatcacaattccgatttttacattccgaaggctaccctgaaagacagcggcagctatttctgccggggactcgtcggctccaagaatgtgtcctccgaaaccgtgaatatcacgattacccaaggactggctgtgcctacaatctctagcttctttccgcctggataccaagtctccttctgtcttgtgatggtcctcctgtttgctgtggacacaggactgtacttttccgtgaaaacgaacatccgcagctccacacgcgattggaaagatcacaagtttaaatggcgcaaagatccccaggacaagcgcgccaagagaagcggatctggcgtgaagcagaccctgaatttcgacctgctgaagctggctggcgacgtggaatccaacccaggcccttctagaggccatatgaccgagtacaagcccacggtgcgcctcgccacccgcgacgacgtccccagggccgtacgcaccctcgccgccgcgttcgccgactaccccgccacgcgccacaccgtcgatccggaccgccacatcgagcgggtcaccgagctgcaagaactcttcctcacgcgcgtcgggctcgacatcggcaaggtgtgggtcgcggacgacggcgccgcggtggcggtctggaccacgccggagagcgtcgaagcgggggcggtgttcgccgagatcggcccgcgcatggccgagttgagcggttcccggctggccgcgcagcaacagatggaaggcctcctggcgccgcaccggcccaaggagcccgcgtggttcctggccaccgtcggcgtctcgcccgaccaccagggcaagggtctgggcagcgccgtcgtgctccccggagtggaggcggccgagcgcgccggggtgcccgccttcctggagacctccgcgccccgcaacctccccttctacgagcggctcggcttcaccgtcaccgccgacgtcgaggtgcccgaaggaccgcgcacctggtgcatgacccgcaagcccggtgcctga

SEQ ID NO: 1641 - DNA, 3222 bp, Artificial Sequence
  Synthetic Polynucleotide
atggccttaccagtgaccgccttgctcctgccgctggccttgctgctccacgccgccaggccggacatccagatgacacagagccctagcagcctgtctgccagcgtgggagacagagtgaccatcacatgcaaggccagcgaccacatcaacaactggctggcctggtatcagcagaagcctggacaggcccctaagctgctgatctacggcgctaccacactggaaacaggcgtgcccagcagattttctggcagcggctctggcaccgactacaccctgacaatatccagcctccagcctgaggacttcgccacctactactgtcagcagagctggaacaccccttggacattcggccagggcaccaagctggaaatcaagagactcgagggacagcctaaggccaatcctaccgtgacactgttccctccaagcagcgaagaactccaggccaacaaggccacacttgtgtgcctgatctccgacttctaccctggggctgtgacagtggcttggaaggccgatggatctcctgtgaaagccggcgtggaaaccaccaagccatccaagcagagcaacaacaaatacgccgccagctcctacctgagcctgacacctgagcagtggaagtcccacagatcctacagctgccaagtgacccacgaaggcagcaccgtggaaaagacagtggcccctacagagtgcagcggatccctgtgggtttcacagcctccagagatcagaaccctggaaggcagcagcgccttcctgccttgcagcttcaatgcctctcagggcagactggctatcggcagcgtgacctggttcagagatgaggtggtgcccggcaaagaagtgcggaacggcacccctgagtttagaggaaggctggcccctctggcctccagcagatttctgcacgatcaccaggccgagctgcacatcagagatgtgcgaggacacgacgccagcatctacgtgtgcagagtggaagtgctcggcctcggagttggcacaggcaatggaacaagactggtggtggaaaaagagcaccctcagctcggagccggaacagtgctgcttctgagagccggcttttacgccgtgtcctttctgtctgtggccgtgggcagcaccgtgtactatcagggcaagtgcctgacctggaagggacctagaaggcaactgcctgctgtggtgcctgctcctttgcctcctccatgtggaagctctgcccatctgctgccacctgttccaggcggaagggccaagcgatctggatctggagcaacaaacttctcactactcaaacaagcaggtgacgtggaggagaatcccgggcctactagtatggactggatttggcgcatccttttccttgtcggcgctgctaccggcgcgcattccttcgaacaagttcagcttcaacagcctggcgctgagctggtcaaacctggcgcttctgtgaagatgagctgcaaagccagcggctacgccttcagcagctactggatcaactggatgaagcagaaacccggccagggactcgaatggatcggccaaatctatcccggcgacggcgacaccaactacaacggcaagttcaagggcagagccacactgaccgccgatacctctagcagcacagcctacatgcagctgagcagcctgaccagcgaagatagcgccgtgtacttctgtgcccggtccatcacaacagtcgtgggctgcgctatggactattggggccagggaacaagcgtgaccgtgtctagtacgcgtgcctctacaaagggaccctccgtgtttcctctggctcccagcagcaagtctacaagcggaggaacagccgctctgggctgcctggtcaaggattactttcccgagcctgtgaccgtgtcctggaatagcggagcactgacaagcggcgtgcacacctttccagccgtgctgcaaagcagcggcctgtactctctgagcagcgtggtcacagtgcctagctctagcctgggcacccagacctacatctgcaatgtgaaccacaagcctagcaacaccaaggtggacaagagagtggaacccaagagctgtggtaccattggatggttgctcttgcaagccccacgctgggttttcaaagaggaagatccaatccatctgcggtgccacagctggaaaaacaccgctctccacaaagtcacatacctgcaaaatggcaaaggacgcaaatacttccatcacaattccgatttttacattccgaaggctaccctgaaagacagcggcagctatttctgccggggactcgtcggctccaagaatgtgtcctccgaaaccgtgaatatcacgattacccaaggactggctgtgcctacaatctctagcttctttccgcctggataccaagtctccttctgtcttgtgatggtcctcctgtttgctgtggacacaggactgtacttttccgtgaaaacgaacatccgcagctccacacgcgattggaaagatcacaagtttaaatggcgcaaagatccccaggacaagcgcgccaagagaagcggatctggcgtgaagcagaccctgaatttcgacctgctgaagctggctggcgacgtggaatccaacccaggcccttctagaggcgggatccacaccatggctacctacgaggtgctgtgcgaggtggcaagaaagctgggcaccgacgacagagaagtggtgctgttcctgctgaacgtgttcatccctcagcctacactggcccagctgatcggtgcactgagagccctgaaagaggaaggccggctgacctttcctctgctggccgaatgcctgttcagagccggaagaagggatctgctgcgggacctgctgcatctggaccccagatttctggaaagacacctggccggcaccatgagctacttcagcccttaccagctgaccgtgctgcacgttgacggcgaactgtgcgccagagatattcggagcctgatcttcctgagcaaggacaccatcggcagccggtctacccctcagacatttctgcactgggtgtactgcatggaaaacctggacctgctcggccccacagatgtggatgccctgatgtccatgctgagaagcctgagcagagtggacctccagagacaggtgcagacactgatgggactgcacctgagcggacctagccacagccagcactacagacacacccct

SEQ ID NO: 1642 - DNA, 3381 bp, Artificial Sequence
  Synthetic Polynucleotide
atggccttaccagtgaccgccttgctcctgccgctggccttgctgctccacgccgccaggccggacatccagatgacacagagccctagcagcctgtctgccagcgtgggagacagagtgaccatcacatgcaaggccagcgaccacatcaacaactggctggcctggtatcagcagaagcctggacaggcccctaagctgctgatctacggcgctaccacactggaaacaggcgtgcccagcagattttctggcagcggctctggcaccgactacaccctgacaatatccagcctccagcctgaggacttcgccacctactactgtcagcagagctggaacaccccttggacattcggccagggcaccaagctggaaatcaagagactcgagggacagcctaaggccaatcctaccgtgacactgttccctccaagcagcgaagaactccaggccaacaaggccacacttgtgtgcctgatctccgacttctaccctggggctgtgacagtggcttggaaggccgatggatctcctgtgaaagccggcgtggaaaccaccaagccatccaagcagagcaacaacaaatacgccgccagctcctacctgagcctgacacctgagcagtggaagtcccacagatcctacagctgccaagtgacccacgaaggcagcaccgtggaaaagacagtggcccctacagagtgcagcggatccctgtgggtttcacagcctccagagatcagaaccctggaaggcagcagcgccttcctgccttgcagcttcaatgcctctcagggcagactggctatcggcagcgtgacctggttcagagatgaggtggtgcccggcaaagaagtgcggaacggcacccctgagtttagaggaaggctggcccctctggcctccagcagatttctgcacgatcaccaggccgagctgcacatcagagatgtgcgaggacacgacgccagcatctacgtgtgcagagtggaagtgctcggcctcggagttggcacaggcaatggaacaagactggtggtggaaaaagagcaccctcagctcggagccggaacagtgctgcttctgagagccggcttttacgccgtgtcctttctgtctgtggccgtgggcagcaccgtgtactatcagggcaagtgcctgacctggaagggacctagaaggcaactgcctgctgtggtgcctgctcctttgcctcctccatgtggaagctctgcccatctgctgccacctgttccaggcggaagggccaagcgatctggatctggagcaacaaacttctcactactcaaacaagcaggtgacgtggaggagaatcccgggcctactagtatggactggatttggcgcatccttttccttgtcggcgctgctaccggcgcgcattccttcgaacaagttcagcttcaacagcctggcgctgagctggtcaaacctggcgcttctgtgaagatgagctgcaaagccagcggctacgccttcagcagctactggatcaactggatgaagcagaaacccggccagggactcgaatggatcggccaaatctatcccggcgacggcgacaccaactacaacggcaagttcaagggcagagccacactgaccgccgatacctctagcagcacagcctacatgcagctgagcagcctgaccagcgaagatagcgccgtgtacttctgtgcccggtccatcacaacagtcgtgggctgcgctatggactattggggccagggaacaagcgtgaccgtgtctagtacgcgtgcctctacaaagggaccctccgtgtttcctctggctcccagcagcaagtctacaagcggaggaacagccgctctgggctgcctggtcaaggattactttcccgagcctgtgaccgtgtcctggaatagcggagcactgacaagcggcgtgcacacctttccagccgtgctgcaaagcagcggcctgtactctctgagcagcgtggtcacagtgcctagctctagcctgggcacccagacctacatctgcaatgtgaaccacaagcctagcaacaccaaggtggacaagagagtggaacccaagagctgtggtaccattggatggttgctcttgcaagccccacgctgggttttcaaagaggaagatccaatccatctgcggtgccacagctggaaaaacaccgctctccacaaagtcacatacctgcaaaatggcaaaggacgcaaatacttccatcacaattccgatttttacattccgaaggctaccctgaaagacagcggcagctatttctgccggggactcgtcggctccaagaatgtgtcctccgaaaccgtgaatatcacgattacccaaggactggctgtgcctacaatctctagcttctttccgcctggataccaagtctccttctgtcttgtgatggtcctcctgtttgctgtggacacaggactgtacttttccgtgaaaacgaacatccgcagctccacacgcgattggaaagatcacaagtttaaatggcgcaaagatccccaggacaagcgcgccaagagaagcggatctggcgtgaagcagaccctgaatttcgacctgctgaagctggctggcgacgtggaatccaacccaggcccttctagaggcgggatccacaccatgtccgactccaaggaggtccctagccttccatttttgcgacacttgctcgaagagttggacagccatgaggacagcttgctgctgtttctgtgtcacgacgcggccccgggctgcacgacggtcacgcaagctttgtgctcgcttagccaacagcgcaagctgaccctcgcggctctggtcgagatgctctacgtgctgcagcgtatggatcttctcaagagccgcttcgggctcagcaaggagggggccgagcaattgctgggcacaagctttctcacgcgctaccgcaagctcatggtttgcgtgggtgaggagctcgactcgagcgagctacgcgctctacgcttgttcgcgtgcaacctgaatccgagcctgagcacggcgctttctgagagcagccgctttgtcgagcttgtactcgcgcttgaaaacgtaggactcgtctcgccatcgagtgtttccgtgcttgcggacatgttgcgcactcttcggcgcctcgatttgtgccagcagcttgttgagtacgaacaacaagagcaagccaggtaccgttactgttacgcggcctcgccctcattgccagttcgtacgttacgtcgggggcacggcgcgagtgaacacgagcagctgtgcatgcccgtgcaagaatcctctgacagccccgagctgctgcgcacgcccgtacaagaatcctccagcgacagccccgagcaaacgact

SEQ ID NO: 1643 - DNA, 3249 bp, Artificial Sequence
  Synthetic Polynucleotide
atggccttaccagtgaccgccttgctcctgccgctggccttgctgctccacgccgccaggccggacatccagatgacacagagccctagcagcctgtctgccagcgtgggagacagagtgaccatcacatgcaaggccagcgaccacatcaacaactggctggcctggtatcagcagaagcctggacaggcccctaagctgctgatctacggcgctaccacactggaaacaggcgtgcccagcagattttctggcagcggctctggcaccgactacaccctgacaatatccagcctccagcctgaggacttcgccacctactactgtcagcagagctggaacaccccttggacattcggccagggcaccaagctggaaatcaagagactcgagggacagcctaaggccaatcctaccgtgacactgttccctccaagcagcgaagaactccaggccaacaaggccacacttgtgtgcctgatctccgacttctaccctggggctgtgacagtggcttggaaggccgatggatctcctgtgaaagccggcgtggaaaccaccaagccatccaagcagagcaacaacaaatacgccgccagctcctacctgagcctgacacctgagcagtggaagtcccacagatcctacagctgccaagtgacccacgaaggcagcaccgtggaaaagacagtggcccctacagagtgcagcggatccctgtgggtttcacagcctccagagatcagaaccctggaaggcagcagcgccttcctgccttgcagcttcaatgcctctcagggcagactggctatcggcagcgtgacctggttcagagatgaggtggtgcccggcaaagaagtgcggaacggcacccctgagtttagaggaaggctggcccctctggcctccagcagatttctgcacgatcaccaggccgagctgcacatcagagatgtgcgaggacacgacgccagcatctacgtgtgcagagtggaagtgctcggcctcggagttggcacaggcaatggaacaagactggtggtggaaaaagagcaccctcagctcggagccggaacagtgctgcttctgagagccggcttttacgccgtgtcctttctgtctgtggccgtgggcagcaccgtgtactatcagggcaagtgcctgacctggaagggacctagaaggcaactgcctgctgtggtgcctgctcctttgcctcctccatgtggaagctctgcccatctgctgccacctgttccaggcggaagggccaagcgatctggatctggagcaacaaacttctcactactcaaacaagcaggtgacgtggaggagaatcccgggcctactagtatggactggatttggcgcatccttttccttgtcggcgctgctaccggcgcgcattccttcgaacaagttcagcttcaacagcctggcgctgagctggtcaaacctggcgcttctgtgaagatgagctgcaaagccagcggctacgccttcagcagctactggatcaactggatgaagcagaaacccggccagggactcgaatggatcggccaaatctatcccggcgacggcgacaccaactacaacggcaagttcaagggcagagccacactgaccgccgatacctctagcagcacagcctacatgcagctgagcagcctgaccagcgaagatagcgccgtgtacttctgtgcccggtccatcacaacagtcgtgggctgcgctatggactattggggccagggaacaagcgtgaccgtgtctagtacgcgtgcctctacaaagggaccctccgtgtttcctctggctcccagcagcaagtctacaagcggaggaacagccgctctgggctgcctggtcaaggattactttcccgagcctgtgaccgtgtcctggaatagcggagcactgacaagcggcgtgcacacctttccagccgtgctgcaaagcagcggcctgtactctctgagcagcgtggtcacagtgcctagctctagcctgggcacccagacctacatctgcaatgtgaaccacaagcctagcaacaccaaggtggacaagagagtggaacccaagagctgtggtaccattggatggttgctcttgcaagccccacgctgggttttcaaagaggaagatccaatccatctgcggtgccacagctggaaaaacaccgctctccacaaagtcacatacctgcaaaatggcaaaggacgcaaatacttccatcacaattccgatttttacattccgaaggctaccctgaaagacagcggcagctatttctgccggggactcgtcggctccaagaatgtgtcctccgaaaccgtgaatatcacgattacccaaggactggctgtgcctacaatctctagcttctttccgcctggataccaagtctccttctgtcttgtgatggtcctcctgtttgctgtggacacaggactgtacttttccgtgaaaacgaacatccgcagctccacacgcgattggaaagatcacaagtttaaatggcgcaaagatccccaggacaagcgcgccaagagaagcggatctggcgtgaagcagaccctgaatttcgacctgctgaagctggctggcgacgtggaatccaacccaggcccttctagaggccatatgaccgagtacaagcccacggtgcgcctcgccacccgcgacgacgtccccagggccgtacgcaccctcgccgccgcgttcgccgactaccccgccacgcgccacaccgtcgatccggaccgccacatcgagcgggtcaccgagctgcaagaactcttcctcacgcgcgtcgggctcgacatcggcaaggtgtgggtcgcggacgacggcgccgcggtggcggtctggaccacgccggagagcgtcgaagcgggggcggtgttcgccgagatcggcccgcgcatggccgagttgagcggttcccggctggccgcgcagcaacagatggaaggcctcctggcgccgcaccggcccaaggagcccgcgtggttcctggccaccgtcggcgtctcgcccgaccaccagggcaagggtctgggcagcgccgtcgtgctccccggagtggaggcggccgagcgcgccggggtgcccgccttcctggagacctccgcgccccgcaacctccccttctacgagcggctcggcttcaccgtcaccgccgacgtcgaggtgcccgaaggaccgcgcacctggtgcatgacccgcaagcccggtgcctga

SEQ ID NO: 1644 - DNA, 3660 bp, Artificial Sequence
  Synthetic Polynucleotide
atggccttaccagtgaccgccttgctcctgccgctggccttgctgctccacgccgccaggccggaagtgcagctggttgaatctggcggaggactggttcaggctggcggatctctgagactgtcttgtgccgccagcggcagaacctttagcatgggctggtttagacaggcccctggcaaagagagagagttcgtcgccgccatcacatactctggcggcagcccttactacgccgactctgtgaagggcagattcaccatcagccgggacaacgccaagaacaccgtgtacctccagatgaacagcctgaagcctgaggacaccgccgtgtactactgcgccgccaatccaacatacggcagcgactggaacgccgagaattggggccagggaacccaagtgacagtgtctagcggtaccggcggaggcggatctggcggcggaggtagcggtggcggaggatctgaattcgacatccagatgacacagagccctagcagcctgtctgccagcgtgggagacagagtgaccatcacatgcaaggccagcgaccacatcaacaactggctggcctggtatcagcagaagcctggacaggcccctaagctgctgatctacggcgctaccacactggaaacaggcgtgcccagcagattttctggcagcggctctggcaccgactacaccctgacaatatccagcctccagcctgaggacttcgccacctactactgtcagcagagctggaacaccccttggacattcggccagggcaccaagctggaaatcaagagactcgagggacagcctaaggccaatcctaccgtgacactgttccctccaagcagcgaagaactccaggccaacaaggccacacttgtgtgcctgatctccgacttctaccctggggctgtgacagtggcttggaaggccgatggatctcctgtgaaagccggcgtggaaaccaccaagccatccaagcagagcaacaacaaatacgccgccagctcctacctgagcctgacacctgagcagtggaagtcccacagatcctacagctgccaagtgacccacgaaggcagcaccgtggaaaagacagtggcccctacagagtgcagcggatccctgtgggtttcacagcctccagagatcagaaccctggaaggcagcagcgccttcctgccttgcagcttcaatgcctctcagggcagactggctatcggcagcgtgacctggttcagagatgaggtggtgcccggcaaagaagtgcggaacggcacccctgagtttagaggaaggctggcccctctggcctccagcagatttctgcacgatcaccaggccgagctgcacatcagagatgtgcgaggacacgacgccagcatctacgtgtgcagagtggaagtgctcggcctcggagttggcacaggcaatggaacaagactggtggtggaaaaagagcaccctcagctcggagccggaacagtgctgcttctgagagccggcttttacgccgtgtcctttctgtctgtggccgtgggcagcaccgtgtactatcagggcaagtgcctgacctggaagggacctagaaggcaactgcctgctgtggtgcctgctcctttgcctcctccatgtggaagctctgcccatctgctgccacctgttccaggcggaagggccaagcgatctggatctggagcaacaaacttctcactactcaaacaagcaggtgacgtggaggagaatcccgggcctactagtatggactggatttggcgcatccttttccttgtcggcgctgctaccggcgcgcattccttcgaacaagttcagcttcaacagcctggcgctgagctggtcaaacctggcgcttctgtgaagatgagctgcaaagccagcggctacgccttcagcagctactggatcaactggatgaagcagaaacccggccagggactcgaatggatcggccaaatctatcccggcgacggcgacaccaactacaacggcaagttcaagggcagagccacactgaccgccgatacctctagcagcacagcctacatgcagctgagcagcctgaccagcgaagatagcgccgtgtacttctgtgcccggtccatcacaacagtcgtgggctgcgctatggactattggggccagggaacaagcgtgaccgtgtctagtacgcgtgcctctacaaagggaccctccgtgtttcctctggctcccagcagcaagtctacaagcggaggaacagccgctctgggctgcctggtcaaggattactttcccgagcctgtgaccgtgtcctggaatagcggagcactgacaagcggcgtgcacacctttccagccgtgctgcaaagcagcggcctgtactctctgagcagcgtggtcacagtgcctagctctagcctgggcacccagacctacatctgcaatgtgaaccacaagcctagcaacaccaaggtggacaagagagtggaacccaagagctgtggtaccattggatggttgctcttgcaagccccacgctgggttttcaaagaggaagatccaatccatctgcggtgccacagctggaaaaacaccgctctccacaaagtcacatacctgcaaaatggcaaaggacgcaaatacttccatcacaattccgatttttacattccgaaggctaccctgaaagacagcggcagctatttctgccggggactcgtcggctccaagaatgtgtcctccgaaaccgtgaatatcacgattacccaaggactggctgtgcctacaatctctagcttctttccgcctggataccaagtctccttctgtcttgtgatggtcctcctgtttgctgtggacacaggactgtacttttccgtgaaaacgaacatccgcagctccacacgcgattggaaagatcacaagtttaaatggcgcaaagatccccaggacaagcgcgccaagagaagcggatctggcgtgaagcagaccctgaatttcgacctgctgaagctggctggcgacgtggaatccaacccaggcccttctagaggccatatgaccgagtacaagcccacggtgcgcctcgccacccgcgacgacgtccccagggccgtacgcaccctcgccgccgcgttcgccgactaccccgccacgcgccacaccgtcgatccggaccgccacatcgagcgggtcaccgagctgcaagaactcttcctcacgcgcgtcgggctcgacatcggcaaggtgtgggtcgcggacgacggcgccgcggtggcggtctggaccacgccggagagcgtcgaagcgggggcggtgttcgccgagatcggcccgcgcatggccgagttgagcggttcccggctggccgcgcagcaacagatggaaggcctcctggcgccgcaccggcccaaggagcccgcgtggttcctggccaccgtcggcgtctcgcccgaccaccagggcaagggtctgggcagcgccgtcgtgctccccggagtggaggcggccgagcgcgccggggtgcccgccttcctggagacctccgcgccccgcaacctccccttctacgagcggctcggcttcaccgtcaccgccgacgtcgaggtgcccgaaggaccgcgcacctggtgcatgacccgcaagcccggtgcctga

SEQ ID NO: 1645 - DNA, 4071 bp, Artificial Sequence
  Synthetic Polynucleotide
atggccttaccagtgaccgccttgctcctgccgctggccttgctgctccacgccgccaggccggaagtgcagctggttgaatctggcggaggactggttcaggctggcggatctctgagactgtcttgtgccgccagcggcagaacctttagcatgggctggtttagacaggcccctggcaaagagagagagttcgtcgccgccatcacatactctggcggcagcccttactacgccgactctgtgaagggcagattcaccatcagccgggacaacgccaagaacaccgtgtacctccagatgaacagcctgaagcctgaggacaccgccgtgtactactgcgccgccaatccaacatacggcagcgactggaacgccgagaattggggccagggaacccaagtgacagtgtctagcggtaccggcggaggcggatctggcggcggaggtagcggtggcggaggatctgaattcgacatccagatgacacagagccctagcagcctgtctgccagcgtgggagacagagtgaccatcacatgcaaggccagcgaccacatcaacaactggctggcctggtatcagcagaagcctggacaggcccctaagctgctgatctacggcgctaccacactggaaacaggcgtgcccagcagattttctggcagcggctctggcaccgactacaccctgacaatatccagcctccagcctgaggacttcgccacctactactgtcagcagagctggaacaccccttggacattcggccagggcaccaagctggaaatcaagagactcgagggacagcctaaggccaatcctaccgtgacactgttccctccaagcagcgaagaactccaggccaacaaggccacacttgtgtgcctgatctccgacttctaccctggggctgtgacagtggcttggaaggccgatggatctcctgtgaaagccggcgtggaaaccaccaagccatccaagcagagcaacaacaaatacgccgccagctcctacctgagcctgacacctgagcagtggaagtcccacagatcctacagctgccaagtgacccacgaaggcagcaccgtggaaaagacagtggcccctacagagtgcagcggatccctgtgggtttcacagcctccagagatcagaaccctggaaggcagcagcgccttcctgccttgcagcttcaatgcctctcagggcagactggctatcggcagcgtgacctggttcagagatgaggtggtgcccggcaaagaagtgcggaacggcacccctgagtttagaggaaggctggcccctctggcctccagcagatttctgcacgatcaccaggccgagctgcacatcagagatgtgcgaggacacgacgccagcatctacgtgtgcagagtggaagtgctcggcctcggagttggcacaggcaatggaacaagactggtggtggaaaaagagcaccctcagctcggagccggaacagtgctgcttctgagagccggcttttacgccgtgtcctttctgtctgtggccgtgggcagcaccgtgtactatcagggcaagtgcctgacctggaagggacctagaaggcaactgcctgctgtggtgcctgctcctttgcctcctccatgtggaagctctgcccatctgctgccacctgttccaggcggaagggccaagcgatctggatctggagcaacaaacttctcactactcaaacaagcaggtgacgtggaggagaatcccgggcctactagtatggactggatttggcgcatccttttccttgtcggcgctgctaccggcgcgcattccgggcccgaagtgcaactggttgaatccggtggcggcctggtgcaagcaggcggatctctcagacttagctgtgccgcctccggcagaaccttcacaatgggatggtttaggcaggctccagggaaagagagagagttcgtcgccgccatctctctgtctcccacactggcctactacgccgactctgtgaaaggccggttcaccatctccagagataatgccaagaacaccgtggtgctgcaaatgaactctctgaaacccgaggatacagccctgtactattgtgccgctgaccggaagtccgtgatgagcatcagacccgattactggggacagggcacacaagtcacagtgtcctctggatccggcggcggaggatctggcggaggcggatctgggggcggaggctctttcgaacaagttcagcttcaacagcctggcgctgagctggtcaaacctggcgcttctgtgaagatgagctgcaaagccagcggctacgccttcagcagctactggatcaactggatgaagcagaaacccggccagggactcgaatggatcggccaaatctatcccggcgacggcgacaccaactacaacggcaagttcaagggcagagccacactgaccgccgatacctctagcagcacagcctacatgcagctgagcagcctgaccagcgaagatagcgccgtgtacttctgtgcccggtccatcacaacagtcgtgggctgcgctatggactattggggccagggaacaagcgtgaccgtgtctagtacgcgtgcctctacaaagggaccctccgtgtttcctctggctcccagcagcaagtctacaagcggaggaacagccgctctgggctgcctggtcaaggattactttcccgagcctgtgaccgtgtcctggaatagcggagcactgacaagcggcgtgcacacctttccagccgtgctgcaaagcagcggcctgtactctctgagcagcgtggtcacagtgcctagctctagcctgggcacccagacctacatctgcaatgtgaaccacaagcctagcaacaccaaggtggacaagagagtggaacccaagagctgtggtaccattggatggttgctcttgcaagccccacgctgggttttcaaagaggaagatccaatccatctgcggtgccacagctggaaaaacaccgctctccacaaagtcacatacctgcaaaatggcaaaggacgcaaatacttccatcacaattccgatttttacattccgaaggctaccctgaaagacagcggcagctatttctgccggggactcgtcggctccaagaatgtgtcctccgaaaccgtgaatatcacgattacccaaggactggctgtgcctacaatctctagcttctttccgcctggataccaagtctccttctgtcttgtgatggtcctcctgtttgctgtggacacaggactgtacttttccgtgaaaacgaacatccgcagctccacacgcgattggaaagatcacaagtttaaatggcgcaaagatccccaggacaagcgcgccaagagaagcggatctggcgtgaagcagaccctgaatttcgacctgctgaagctggctggcgacgtggaatccaacccaggcccttctagaggccatatgaccgagtacaagcccacggtgcgcctcgccacccgcgacgacgtccccagggccgtacgcaccctcgccgccgcgttcgccgactaccccgccacgcgccacaccgtcgatccggaccgccacatcgagcgggtcaccgagctgcaagaactcttcctcacgcgcgtcgggctcgacatcggcaaggtgtgggtcgcggacgacggcgccgcggtggcggtctggaccacgccggagagcgtcgaagcgggggcggtgttcgccgagatcggcccgcgcatggccgagttgagcggttcccggctggccgcgcagcaacagatggaaggcctcctggcgccgcaccggcccaaggagcccgcgtggttcctggccaccgtcggcgtctcgcccgaccaccagggcaagggtctgggcagcgccgtcgtgctccccggagtggaggcggccgagcgcgccggggtgcccgccttcctggagacctccgcgccccgcaacctccccttctacgagcggctcggcttcaccgtcaccgccgacgtcgaggtgcccgaaggaccgcgcacctggtgcatgacccgcaagcccggtgcctga

SEQ ID NO: 1646 - DNA, 3270 bp, Artificial Sequence
  Synthetic Polynucleotide
atggccttaccagtgaccgccttgctcctgccgctggccttgctgctccacgccgccaggccggaagtgcagctggttgaatctggcggaggactggttcaggctggcggatctctgagactgtcttgtgccgccagcggcagaacctttagcatgggctggtttagacaggcccctggcaaagagagagagttcgtcgccgccatcacatactctggcggcagcccttactacgccgactctgtgaagggcagattcaccatcagccgggacaacgccaagaacaccgtgtacctccagatgaacagcctgaagcctgaggacaccgccgtgtactactgcgccgccaatccaacatacggcagcgactggaacgccgagaattggggccagggaacccaagtgacagtgtctagcctcgagggacagcctaaggccaatcctaccgtgacactgttccctccaagcagcgaagaactccaggccaacaaggccacacttgtgtgcctgatctccgacttctaccctggggctgtgacagtggcttggaaggccgatggatctcctgtgaaagccggcgtggaaaccaccaagccatccaagcagagcaacaacaaatacgccgccagctcctacctgagcctgacacctgagcagtggaagtcccacagatcctacagctgccaagtgacccacgaaggcagcaccgtggaaaagacagtggcccctacagagtgcagcggatccctgtgggtttcacagcctccagagatcagaaccctggaaggcagcagcgccttcctgccttgcagcttcaatgcctctcagggcagactggctatcggcagcgtgacctggttcagagatgaggtggtgcccggcaaagaagtgcggaacggcacccctgagtttagaggaaggctggcccctctggcctccagcagatttctgcacgatcaccaggccgagctgcacatcagagatgtgcgaggacacgacgccagcatctacgtgtgcagagtggaagtgctcggcctcggagttggcacaggcaatggaacaagactggtggtggaaaaagagcaccctcagctcggagccggaacagtgctgcttctgagagccggcttttacgccgtgtcctttctgtctgtggccgtgggcagcaccgtgtactatcagggcaagtgcctgacctggaagggacctagaaggcaactgcctgctgtggtgcctgctcctttgcctcctccatgtggaagctctgcccatctgctgccacctgttccaggcggaagggccaagcgatctggatctggagcaacaaacttctcactactcaaacaagcaggtgacgtggaggagaatcccgggcctactagtatggactggatttggcgcatccttttccttgtcggcgctgctaccggcgcgcattccgggcccgaagtgcaactggttgaatccggtggcggcctggtgcaagcaggcggatctctcagacttagctgtgccgcctccggcagaaccttcacaatgggatggtttaggcaggctccagggaaagagagagagttcgtcgccgccatctctctgtctcccacactggcctactacgccgactctgtgaaaggccggttcaccatctccagagataatgccaagaacaccgtggtgctgcaaatgaactctctgaaacccgaggatacagccctgtactattgtgccgctgaccggaagtccgtgatgagcatcagacccgattactggggacagggcacacaagtcacagtgtcctctacgcgtgcctctacaaagggaccctccgtgtttcctctggctcccagcagcaagtctacaagcggaggaacagccgctctgggctgcctggtcaaggattactttcccgagcctgtgaccgtgtcctggaatagcggagcactgacaagcggcgtgcacacctttccagccgtgctgcaaagcagcggcctgtactctctgagcagcgtggtcacagtgcctagctctagcctgggcacccagacctacatctgcaatgtgaaccacaagcctagcaacaccaaggtggacaagagagtggaacccaagagctgtggtaccattggatggttgctcttgcaagccccacgctgggttttcaaagaggaagatccaatccatctgcggtgccacagctggaaaaacaccgctctccacaaagtcacatacctgcaaaatggcaaaggacgcaaatacttccatcacaattccgatttttacattccgaaggctaccctgaaagacagcggcagctatttctgccggggactcgtcggctccaagaatgtgtcctccgaaaccgtgaatatcacgattacccaaggactggctgtgcctacaatctctagcttctttccgcctggataccaagtctccttctgtcttgtgatggtcctcctgtttgctgtggacacaggactgtacttttccgtgaaaacgaacatccgcagctccacacgcgattggaaagatcacaagtttaaatggcgcaaagatccccaggacaagcgcgccaagagaagcggatctggcgtgaagcagaccctgaatttcgacctgctgaagctggctggcgacgtggaatccaacccaggcccttctagaggccatatgaccgagtacaagcccacggtgcgcctcgccacccgcgacgacgtccccagggccgtacgcaccctcgccgccgcgttcgccgactaccccgccacgcgccacaccgtcgatccggaccgccacatcgagcgggtcaccgagctgcaagaactcttcctcacgcgcgtcgggctcgacatcggcaaggtgtgggtcgcggacgacggcgccgcggtggcggtctggaccacgccggagagcgtcgaagcgggggcggtgttcgccgagatcggcccgcgcatggccgagttgagcggttcccggctggccgcgcagcaacagatggaaggcctcctggcgccgcaccggcccaaggagcccgcgtggttcctggccaccgtcggcgtctcgcccgaccaccagggcaagggtctgggcagcgccgtcgtgctccccggagtggaggcggccgagcgcgccggggtgcccgccttcctggagacctccgcgccccgcaacctccccttctacgagcggctcggcttcaccgtcaccgccgacgtcgaggtgcccgaaggaccgcgcacctggtgcatgacccgcaagcccggtgcctga

SEQ ID NO: 1647 - DNA, 3294 bp, Artificial Sequence
  Synthetic Polynucleotide
atggccttaccagtgaccgccttgctcctgccgctggccttgctgctccacgccgccaggccggacatccagatgacacagagccctagcagcctgtctgccagcgtgggagacagagtgaccatcacatgcaaggccagcgaccacatcaacaactggctggcctggtatcagcagaagcctggacaggcccctaagctgctgatctacggcgctaccacactggaaacaggcgtgcccagcagattttctggcagcggctctggcaccgactacaccctgacaatatccagcctccagcctgaggacttcgccacctactactgtcagcagagctggaacaccccttggacattcggccagggcaccaagctggaaatcaagagactcgaggacctgaagaacgtgttcccacctgaggtggccgtgttcgagcctagcgaggccgagatcagccacacccagaaagccaccctcgtgtgcctggctaccggcttctaccccgaccatgtggaactgtcttggtgggtcaacggcaaagaggtgcacagcggcgtgtctaccgacccccagccactgaaagaacagcccgccctgaacgacagccggtactgcctgagcagcagactgagagtgtccgccaccttctggcagaacccccggaaccacttcagatgccaggtgcagttctacggcctgagcgagaacgacgagtggacccaggacagagccaagcccgtgacccagatcgtgtctgccgaagcctggggcagagccgattgcggatccctgtgggtttcacagcctccagagatcagaaccctggaaggcagcagcgccttcctgccttgcagcttcaatgcctctcagggcagactggctatcggcagcgtgacctggttcagagatgaggtggtgcccggcaaagaagtgcggaacggcacccctgagtttagaggaaggctggcccctctggcctccagcagatttctgcacgatcaccaggccgagctgcacatcagagatgtgcgaggacacgacgccagcatctacgtgtgcagagtggaagtgctcggcctcggagttggcacaggcaatggaacaagactggtggtggaaaaagagcaccctcagctcggagccggaacagtgctgcttctgagagccggcttttacgccgtgtcctttctgtctgtggccgtgggcagcaccgtgtactatcagggcaagtgcctgacctggaagggacctagaaggcaactgcctgctgtggtgcctgctcctttgcctcctccatgtggaagctctgcccatctgctgccacctgttccaggcggaagggccaagcgatctggatctggagcaacaaacttctcactactcaaacaagcaggtgacgtggaggagaatcccgggcctactagtatggactggatttggcgcatccttttccttgtcggcgctgctaccggcgcgcattccttcgaacaagttcagcttcaacagcctggcgctgagctggtcaaacctggcgcttctgtgaagatgagctgcaaagccagcggctacgccttcagcagctactggatcaactggatgaagcagaaacccggccagggactcgaatggatcggccaaatctatcccggcgacggcgacaccaactacaacggcaagttcaagggcagagccacactgaccgccgatacctctagcagcacagcctacatgcagctgagcagcctgaccagcgaagatagcgccgtgtacttctgtgcccggtccatcacaacagtcgtgggctgcgctatggactattggggccagggaacaagcgtgaccgtgtctagtacgcgtatccagaaccctgatcctgccgtgtaccagctgcgggatagcaagagcagcgacaagagcgtgtgtctgttcaccgacttcgacagccagaccaacgtgtcccagagcaaggactccgacgtgtacatcaccgataagaccgtgctggacatgcggagcatggacttcaagagcaactccgccgtggcctggtccaacaagtccgatttcgcctgcgccaacgccttcaacaacagcattatccccgaggacacattcttcccaagccccgagagcagctgcggtaccattggatggttgctcttgcaagccccacgctgggttttcaaagaggaagatccaatccatctgcggtgccacagctggaaaaacaccgctctccacaaagtcacatacctgcaaaatggcaaaggacgcaaatacttccatcacaattccgatttttacattccgaaggctaccctgaaagacagcggcagctatttctgccggggactcgtcggctccaagaatgtgtcctccgaaaccgtgaatatcacgattacccaaggactggctgtgcctacaatctctagcttctttccgcctggataccaagtctccttctgtcttgtgatggtcctcctgtttgctgtggacacaggactgtacttttccgtgaaaacgaacatccgcagctccacacgcgattggaaagatcacaagtttaaatggcgcaaagatccccaggacaagcgcgccaagagaagcggatctggcgtgaagcagaccctgaatttcgacctgctgaagctggctggcgacgtggaatccaacccaggcccttctagaggccatatgaccgagtacaagcccacggtgcgcctcgccacccgcgacgacgtccccagggccgtacgcaccctcgccgccgcgttcgccgactaccccgccacgcgccacaccgtcgatccggaccgccacatcgagcgggtcaccgagctgcaagaactcttcctcacgcgcgtcgggctcgacatcggcaaggtgtgggtcgcggacgacggcgccgcggtggcggtctggaccacgccggagagcgtcgaagcgggggcggtgttcgccgagatcggcccgcgcatggccgagttgagcggttcccggctggccgcgcagcaacagatggaaggcctcctggcgccgcaccggcccaaggagcccgcgtggttcctggccaccgtcggcgtctcgcccgaccaccagggcaagggtctgggcagcgccgtcgtgctccccggagtggaggcggccgagcgcgccggggtgcccgccttcctggagacctccgcgccccgcaacctccccttctacgagcggctcggcttcaccgtcaccgccgacgtcgaggtgcccgaaggaccgcgcacctggtgcatgacccgcaagcccggtgcctga

SEQ ID NO: 1648 - DNA, 3705 bp, Artificial Sequence
  Synthetic Polynucleotide
atggccttaccagtgaccgccttgctcctgccgctggccttgctgctccacgccgccaggccggaagtgcagctggttgaatctggcggaggactggttcaggctggcggatctctgagactgtcttgtgccgccagcggcagaacctttagcatgggctggtttagacaggcccctggcaaagagagagagttcgtcgccgccatcacatactctggcggcagcccttactacgccgactctgtgaagggcagattcaccatcagccgggacaacgccaagaacaccgtgtacctccagatgaacagcctgaagcctgaggacaccgccgtgtactactgcgccgccaatccaacatacggcagcgactggaacgccgagaattggggccagggaacccaagtgacagtgtctagcggtaccggcggaggcggatctggcggcggaggtagcggtggcggaggatctgaattcgacatccagatgacacagagccctagcagcctgtctgccagcgtgggagacagagtgaccatcacatgcaaggccagcgaccacatcaacaactggctggcctggtatcagcagaagcctggacaggcccctaagctgctgatctacggcgctaccacactggaaacaggcgtgcccagcagattttctggcagcggctctggcaccgactacaccctgacaatatccagcctccagcctgaggacttcgccacctactactgtcagcagagctggaacaccccttggacattcggccagggcaccaagctggaaatcaagagactcgaggacctgaagaacgtgttcccacctgaggtggccgtgttcgagcctagcgaggccgagatcagccacacccagaaagccaccctcgtgtgcctggctaccggcttctaccccgaccatgtggaactgtcttggtgggtcaacggcaaagaggtgcacagcggcgtgtctaccgacccccagccactgaaagaacagcccgccctgaacgacagccggtactgcctgagcagcagactgagagtgtccgccaccttctggcagaacccccggaaccacttcagatgccaggtgcagttctacggcctgagcgagaacgacgagtggacccaggacagagccaagcccgtgacccagatcgtgtctgccgaagcctggggcagagccgattgcggatccctgtgggtttcacagcctccagagatcagaaccctggaaggcagcagcgccttcctgccttgcagcttcaatgcctctcagggcagactggctatcggcagcgtgacctggttcagagatgaggtggtgcccggcaaagaagtgcggaacggcacccctgagtttagaggaaggctggcccctctggcctccagcagatttctgcacgatcaccaggccgagctgcacatcagagatgtgcgaggacacgacgccagcatctacgtgtgcagagtggaagtgctcggcctcggagttggcacaggcaatggaacaagactggtggtggaaaaagagcaccctcagctcggagccggaacagtgctgcttctgagagccggcttttacgccgtgtcctttctgtctgtggccgtgggcagcaccgtgtactatcagggcaagtgcctgacctggaagggacctagaaggcaactgcctgctgtggtgcctgctcctttgcctcctccatgtggaagctctgcccatctgctgccacctgttccaggcggaagggccaagcgatctggatctggagcaacaaacttctcactactcaaacaagcaggtgacgtggaggagaatcccgggcctactagtatggactggatttggcgcatccttttccttgtcggcgctgctaccggcgcgcattccttcgaacaagttcagcttcaacagcctggcgctgagctggtcaaacctggcgcttctgtgaagatgagctgcaaagccagcggctacgccttcagcagctactggatcaactggatgaagcagaaacccggccagggactcgaatggatcggccaaatctatcccggcgacggcgacaccaactacaacggcaagttcaagggcagagccacactgaccgccgatacctctagcagcacagcctacatgcagctgagcagcctgaccagcgaagatagcgccgtgtacttctgtgcccggtccatcacaacagtcgtgggctgcgctatggactattggggccagggaacaagcgtgaccgtgtctagtacgcgtatccagaaccctgatcctgccgtgtaccagctgcgggatagcaagagcagcgacaagagcgtgtgtctgttcaccgacttcgacagccagaccaacgtgtcccagagcaaggactccgacgtgtacatcaccgataagaccgtgctggacatgcggagcatggacttcaagagcaactccgccgtggcctggtccaacaagtccgatttcgcctgcgccaacgccttcaacaacagcattatccccgaggacacattcttcccaagccccgagagcagctgcggtaccattggatggttgctcttgcaagccccacgctgggttttcaaagaggaagatccaatccatctgcggtgccacagctggaaaaacaccgctctccacaaagtcacatacctgcaaaatggcaaaggacgcaaatacttccatcacaattccgatttttacattccgaaggctaccctgaaagacagcggcagctatttctgccggggactcgtcggctccaagaatgtgtcctccgaaaccgtgaatatcacgattacccaaggactggctgtgcctacaatctctagcttctttccgcctggataccaagtctccttctgtcttgtgatggtcctcctgtttgctgtggacacaggactgtacttttccgtgaaaacgaacatccgcagctccacacgcgattggaaagatcacaagtttaaatggcgcaaagatccccaggacaagcgcgccaagagaagcggatctggcgtgaagcagaccctgaatttcgacctgctgaagctggctggcgacgtggaatccaacccaggcccttctagaggccatatgaccgagtacaagcccacggtgcgcctcgccacccgcgacgacgtccccagggccgtacgcaccctcgccgccgcgttcgccgactaccccgccacgcgccacaccgtcgatccggaccgccacatcgagcgggtcaccgagctgcaagaactcttcctcacgcgcgtcgggctcgacatcggcaaggtgtgggtcgcggacgacggcgccgcggtggcggtctggaccacgccggagagcgtcgaagcgggggcggtgttcgccgagatcggcccgcgcatggccgagttgagcggttcccggctggccgcgcagcaacagatggaaggcctcctggcgccgcaccggcccaaggagcccgcgtggttcctggccaccgtcggcgtctcgcccgaccaccagggcaagggtctgggcagcgccgtcgtgctccccggagtggaggcggccgagcgcgccggggtgcccgccttcctggagacctccgcgccccgcaacctccccttctacgagcggctcggcttcaccgtcaccgccgacgtcgaggtgcccgaaggaccgcgcacctggtgcatgacccgcaagcccggtgcctga

SEQ ID NO: 1649 - DNA, 4116 bp, Artificial Sequence
  Synthetic Polynucleotide
atggccttaccagtgaccgccttgctcctgccgctggccttgctgctccacgccgccaggccggaagtgcagctggttgaatctggcggaggactggttcaggctggcggatctctgagactgtcttgtgccgccagcggcagaacctttagcatgggctggtttagacaggcccctggcaaagagagagagttcgtcgccgccatcacatactctggcggcagcccttactacgccgactctgtgaagggcagattcaccatcagccgggacaacgccaagaacaccgtgtacctccagatgaacagcctgaagcctgaggacaccgccgtgtactactgcgccgccaatccaacatacggcagcgactggaacgccgagaattggggccagggaacccaagtgacagtgtctagcggtaccggcggaggcggatctggcggcggaggtagcggtggcggaggatctgaattcgacatccagatgacacagagccctagcagcctgtctgccagcgtgggagacagagtgaccatcacatgcaaggccagcgaccacatcaacaactggctggcctggtatcagcagaagcctggacaggcccctaagctgctgatctacggcgctaccacactggaaacaggcgtgcccagcagattttctggcagcggctctggcaccgactacaccctgacaatatccagcctccagcctgaggacttcgccacctactactgtcagcagagctggaacaccccttggacattcggccagggcaccaagctggaaatcaagagactcgaggacctgaagaacgtgttcccacctgaggtggccgtgttcgagcctagcgaggccgagatcagccacacccagaaagccaccctcgtgtgcctggctaccggcttctaccccgaccatgtggaactgtcttggtgggtcaacggcaaagaggtgcacagcggcgtgtctaccgacccccagccactgaaagaacagcccgccctgaacgacagccggtactgcctgagcagcagactgagagtgtccgccaccttctggcagaacccccggaaccacttcagatgccaggtgcagttctacggcctgagcgagaacgacgagtggacccaggacagagccaagcccgtgacccagatcgtgtctgccgaagcctggggcagagccgattgcggatccctgtgggtttcacagcctccagagatcagaaccctggaaggcagcagcgccttcctgccttgcagcttcaatgcctctcagggcagactggctatcggcagcgtgacctggttcagagatgaggtggtgcccggcaaagaagtgcggaacggcacccctgagtttagaggaaggctggcccctctggcctccagcagatttctgcacgatcaccaggccgagctgcacatcagagatgtgcgaggacacgacgccagcatctacgtgtgcagagtggaagtgctcggcctcggagttggcacaggcaatggaacaagactggtggtggaaaaagagcaccctcagctcggagccggaacagtgctgcttctgagagccggcttttacgccgtgtcctttctgtctgtggccgtgggcagcaccgtgtactatcagggcaagtgcctgacctggaagggacctagaaggcaactgcctgctgtggtgcctgctcctttgcctcctccatgtggaagctctgcccatctgctgccacctgttccaggcggaagggccaagcgatctggatctggagcaacaaacttctcactactcaaacaagcaggtgacgtggaggagaatcccgggcctactagtatggactggatttggcgcatccttttccttgtcggcgctgctaccggcgcgcattccgggcccgaagtgcaactggttgaatccggtggcggcctggtgcaagcaggcggatctctcagacttagctgtgccgcctccggcagaaccttcacaatgggatggtttaggcaggctccagggaaagagagagagttcgtcgccgccatctctctgtctcccacactggcctactacgccgactctgtgaaaggccggttcaccatctccagagataatgccaagaacaccgtggtgctgcaaatgaactctctgaaacccgaggatacagccctgtactattgtgccgctgaccggaagtccgtgatgagcatcagacccgattactggggacagggcacacaagtcacagtgtcctctggatccggcggcggaggatctggcggaggcggatctgggggcggaggctctttcgaacaagttcagcttcaacagcctggcgctgagctggtcaaacctggcgcttctgtgaagatgagctgcaaagccagcggctacgccttcagcagctactggatcaactggatgaagcagaaacccggccagggactcgaatggatcggccaaatctatcccggcgacggcgacaccaactacaacggcaagttcaagggcagagccacactgaccgccgatacctctagcagcacagcctacatgcagctgagcagcctgaccagcgaagatagcgccgtgtacttctgtgcccggtccatcacaacagtcgtgggctgcgctatggactattggggccagggaacaagcgtgaccgtgtctagtacgcgtatccagaaccctgatcctgccgtgtaccagctgcgggatagcaagagcagcgacaagagcgtgtgtctgttcaccgacttcgacagccagaccaacgtgtcccagagcaaggactccgacgtgtacatcaccgataagaccgtgctggacatgcggagcatggacttcaagagcaactccgccgtggcctggtccaacaagtccgatttcgcctgcgccaacgccttcaacaacagcattatccccgaggacacattcttcccaagccccgagagcagctgcggtaccattggatggttgctcttgcaagccccacgctgggttttcaaagaggaagatccaatccatctgcggtgccacagctggaaaaacaccgctctccacaaagtcacatacctgcaaaatggcaaaggacgcaaatacttccatcacaattccgatttttacattccgaaggctaccctgaaagacagcggcagctatttctgccggggactcgtcggctccaagaatgtgtcctccgaaaccgtgaatatcacgattacccaaggactggctgtgcctacaatctctagcttctttccgcctggataccaagtctccttctgtcttgtgatggtcctcctgtttgctgtggacacaggactgtacttttccgtgaaaacgaacatccgcagctccacacgcgattggaaagatcacaagtttaaatggcgcaaagatccccaggacaagcgcgccaagagaagcggatctggcgtgaagcagaccctgaatttcgacctgctgaagctggctggcgacgtggaatccaacccaggcccttctagaggccatatgaccgagtacaagcccacggtgcgcctcgccacccgcgacgacgtccccagggccgtacgcaccctcgccgccgcgttcgccgactaccccgccacgcgccacaccgtcgatccggaccgccacatcgagcgggtcaccgagctgcaagaactcttcctcacgcgcgtcgggctcgacatcggcaaggtgtgggtcgcggacgacggcgccgcggtggcggtctggaccacgccggagagcgtcgaagcgggggcggtgttcgccgagatcggcccgcgcatggccgagttgagcggttcccggctggccgcgcagcaacagatggaaggcctcctggcgccgcaccggcccaaggagcccgcgtggttcctggccaccgtcggcgtctcgcccgaccaccagggcaagggtctgggcagcgccgtcgtgctccccggagtggaggcggccgagcgcgccggggtgcccgccttcctggagacctccgcgccccgcaacctccccttctacgagcggctcggcttcaccgtcaccgccgacgtcgaggtgcccgaaggaccgcgcacctggtgcatgacccgcaagcccggtgcctga

SEQ ID NO: 1650 - DNA, 3315 bp, Artificial Sequence
  Synthetic Polynucleotide
atggccttaccagtgaccgccttgctcctgccgctggccttgctgctccacgccgccaggccggaagtgcagctggttgaatctggcggaggactggttcaggctggcggatctctgagactgtcttgtgccgccagcggcagaacctttagcatgggctggtttagacaggcccctggcaaagagagagagttcgtcgccgccatcacatactctggcggcagcccttactacgccgactctgtgaagggcagattcaccatcagccgggacaacgccaagaacaccgtgtacctccagatgaacagcctgaagcctgaggacaccgccgtgtactactgcgccgccaatccaacatacggcagcgactggaacgccgagaattggggccagggaacccaagtgacagtgtctagcctcgaggacctgaagaacgtgttcccacctgaggtggccgtgttcgagcctagcgaggccgagatcagccacacccagaaagccaccctcgtgtgcctggctaccggcttctaccccgaccatgtggaactgtcttggtgggtcaacggcaaagaggtgcacagcggcgtgtctaccgacccccagccactgaaagaacagcccgccctgaacgacagccggtactgcctgagcagcagactgagagtgtccgccaccttctggcagaacccccggaaccacttcagatgccaggtgcagttctacggcctgagcgagaacgacgagtggacccaggacagagccaagcccgtgacccagatcgtgtctgccgaagcctggggcagagccgattgcggatccctgtgggtttcacagcctccagagatcagaaccctggaaggcagcagcgccttcctgccttgcagcttcaatgcctctcagggcagactggctatcggcagcgtgacctggttcagagatgaggtggtgcccggcaaagaagtgcggaacggcacccctgagtttagaggaaggctggcccctctggcctccagcagatttctgcacgatcaccaggccgagctgcacatcagagatgtgcgaggacacgacgccagcatctacgtgtgcagagtggaagtgctcggcctcggagttggcacaggcaatggaacaagactggtggtggaaaaagagcaccctcagctcggagccggaacagtgctgcttctgagagccggcttttacgccgtgtcctttctgtctgtggccgtgggcagcaccgtgtactatcagggcaagtgcctgacctggaagggacctagaaggcaactgcctgctgtggtgcctgctcctttgcctcctccatgtggaagctctgcccatctgctgccacctgttccaggcggaagggccaagcgatctggatctggagcaacaaacttctcactactcaaacaagcaggtgacgtggaggagaatcccgggcctactagtatggactggatttggcgcatccttttccttgtcggcgctgctaccggcgcgcattccgggcccgaagtgcaactggttgaatccggtggcggcctggtgcaagcaggcggatctctcagacttagctgtgccgcctccggcagaaccttcacaatgggatggtttaggcaggctccagggaaagagagagagttcgtcgccgccatctctctgtctcccacactggcctactacgccgactctgtgaaaggccggttcaccatctccagagataatgccaagaacaccgtggtgctgcaaatgaactctctgaaacccgaggatacagccctgtactattgtgccgctgaccggaagtccgtgatgagcatcagacccgattactggggacagggcacacaagtcacagtgtcctctacgcgtatccagaaccctgatcctgccgtgtaccagctgcgggatagcaagagcagcgacaagagcgtgtgtctgttcaccgacttcgacagccagaccaacgtgtcccagagcaaggactccgacgtgtacatcaccgataagaccgtgctggacatgcggagcatggacttcaagagcaactccgccgtggcctggtccaacaagtccgatttcgcctgcgccaacgccttcaacaacagcattatccccgaggacacattcttcccaagccccgagagcagctgcggtaccattggatggttgctcttgcaagccccacgctgggttttcaaagaggaagatccaatccatctgcggtgccacagctggaaaaacaccgctctccacaaagtcacatacctgcaaaatggcaaaggacgcaaatacttccatcacaattccgatttttacattccgaaggctaccctgaaagacagcggcagctatttctgccggggactcgtcggctccaagaatgtgtcctccgaaaccgtgaatatcacgattacccaaggactggctgtgcctacaatctctagcttctttccgcctggataccaagtctccttctgtcttgtgatggtcctcctgtttgctgtggacacaggactgtacttttccgtgaaaacgaacatccgcagctccacacgcgattggaaagatcacaagtttaaatggcgcaaagatccccaggacaagcgcgccaagagaagcggatctggcgtgaagcagaccctgaatttcgacctgctgaagctggctggcgacgtggaatccaacccaggcccttctagaggccatatgaccgagtacaagcccacggtgcgcctcgccacccgcgacgacgtccccagggccgtacgcaccctcgccgccgcgttcgccgactaccccgccacgcgccacaccgtcgatccggaccgccacatcgagcgggtcaccgagctgcaagaactcttcctcacgcgcgtcgggctcgacatcggcaaggtgtgggtcgcggacgacggcgccgcggtggcggtctggaccacgccggagagcgtcgaagcgggggcggtgttcgccgagatcggcccgcgcatggccgagttgagcggttcccggctggccgcgcagcaacagatggaaggcctcctggcgccgcaccggcccaaggagcccgcgtggttcctggccaccgtcggcgtctcgcccgaccaccagggcaagggtctgggcagcgccgtcgtgctccccggagtggaggcggccgagcgcgccggggtgcccgccttcctggagacctccgcgccccgcaacctccccttctacgagcggctcggcttcaccgtcaccgccgacgtcgaggtgcccgaaggaccgcgcacctggtgcatgacccgcaagcccggtgcctga

SEQ ID NO: 1651 - DNA, 1737 bp, Artificial Sequence; identical to SEQ ID NO: 1612
  Synthetic Polynucleotide

SEQ ID NO: 1652 - DNA, 2508 bp, Artificial Sequence
  Synthetic Polynucleotide
atggccttaccagtgaccgccttgctcctgccgctggccttgctgctccacgccgccaggccggacatccagatgacacagagccctagcagcctgtctgccagcgtgggagacagagtgaccatcacatgcaaggccagcgaccacatcaacaactggctggcctggtatcagcagaagcctggacaggcccctaagctgctgatctacggcgctaccacactggaaacaggcgtgcccagcagattttctggcagcggctctggcaccgactacaccctgacaatatccagcctccagcctgaggacttcgccacctactactgtcagcagagctggaacaccccttggacattcggccagggcaccaagctggaaatcaagagactcgagatcggctggctgttgctccaggcccctcggtgggtgttcaaggaggaagaccctattcacctgaggtgtcacagctggaagaacactgctctgcataaggtcacatatttacagaatggcaaaggcaggaagtattttcatcataattctgacttctacattccaaaagccacactcaaagacagcggctcctacttctgcagggggcttgttgggagtaaaaatgtgtcttcagagactgtgaacatcaccatcactcaaggtttggcagtgtcaaccatctcatcattctttccacctggctaccaagtgtccttctgcctggtcatggtgctgctgttcgccgtggataccggcctgtacttcagcgtcaagaccaacatccggtccagcaccagagactggaaggaccacaagttcaagtggcggaaggaccctcaggacaagagggccaagcgatctggatctggagcaacaaacttctcactactcaaacaagcaggtgacgtggaggagaatcccgggcctactagtatggactggatttggcgcatccttttccttgtcggcgctgctaccggcgcgcattccttcgaacaagttcagcttcaacagcctggcgctgagctggtcaaacctggcgcttctgtgaagatgagctgcaaagccagcggctacgccttcagcagctactggatcaactggatgaagcagaaacccggccagggactcgaatggatcggccaaatctatcccggcgacggcgacaccaactacaacggcaagttcaagggcagagccacactgaccgccgatacctctagcagcacagcctacatgcagctgagcagcctgaccagcgaagatagcgccgtgtacttctgtgcccggtccatcacaacagtcgtgggctgcgctatggactattggggccagggaacaagcgtgaccgtgtctagtacgcgtattggatggttgctcttgcaagccccacgctgggttttcaaagaggaagatccaatccatctgcggtgccacagctggaaaaacaccgctctccacaaagtcacatacctgcaaaatggcaaaggacgcaaatacttccatcacaattccgatttttacattccgaaggctaccctgaaagacagcggcagctatttctgccggggactcgtcggctccaagaatgtgtcctccgaaaccgtgaatatcacgattacccaaggactggctgtgcctacaatctctagcttctttccgcctggataccaagtctccttctgtcttgtgatggtcctcctgtttgctgtggacacaggactgtacttttccgtgaaaacgaacatccgcagctccacacgcgattggaaagatcacaagtttaaatggcgcaaagatccccaggacaagcgcgccaagagaagcggatctggcgtgaagcagaccctgaatttcgacctgctgaagctggctggcgacgtggaatccaacccaggcccttctagaggccatatgaccgagtacaagcccacggtgcgcctcgccacccgcgacgacgtccccagggccgtacgcaccctcgccgccgcgttcgccgactaccccgccacgcgccacaccgtcgatccggaccgccacatcgagcgggtcaccgagctgcaagaactcttcctcacgcgcgtcgggctcgacatcggcaaggtgtgggtcgcggacgacggcgccgcggtggcggtctggaccacgccggagagcgtcgaagcgggggcggtgttcgccgagatcggcccgcgcatggccgagttgagcggttcccggctggccgcgcagcaacagatggaaggcctcctggcgccgcaccggcccaaggagcccgcgtggttcctggccaccgtcggcgtctcgcccgaccaccagggcaagggtctgggcagcgccgtcgtgctccccggagtggaggcggccgagcgcgccggggtgcccgccttcctggagacctccgcgccccgcaacctccccttctacgagcggctcggcttcaccgtcaccgccgacgtcgaggtgcccgaaggaccgcgcacctggtgcatgacccgcaagcccggtgcctga

SEQ ID NO: 1653 - DNA, 2670 bp, Artificial Sequence
  Synthetic Polynucleotide
atggccttaccagtgaccgccttgctcctgccgctggccttgctgctccacgccgccaggccggcatgcgaagtgcagctgcttgaaagtggcggcggactgattcagcctggcggatctctgagactgagctgtgccgccagcggcttcaccttttctagccacgccatgacctgggtccgacaggcacctggaaaagggcttgaatgggtgtccgccatcagcggctctggcgattacacacactacgccgacagcgtgaagggcagattcaccatcagcagagacaacagcaagaacaccgtgtacctccagatgaacagcctgagagccgaggacagcgccgtgtattattgcgccaaggatgaggatggcggcagcctgcttggacacagaggacaaggcaccctggtcaccgtttcttccggtaccggcggaggcggatctggcggcggaggtagcggtggcggaggatctgaattcggatctctcgagatcggctggctgttgctccaggcccctcggtgggtgttcaaggaggaagaccctattcacctgaggtgtcacagctggaagaacactgctctgcataaggtcacatatttacagaatggcaaaggcaggaagtattttcatcataattctgacttctacattccaaaagccacactcaaagacagcggctcctacttctgcagggggcttgttgggagtaaaaatgtgtcttcagagactgtgaacatcaccatcactcaaggtttggcagtgtcaaccatctcatcattctttccacctggctaccaagtgtccttctgcctggtcatggtgctgctgttcgccgtggataccggcctgtacttcagcgtcaagaccaacatccggtccagcaccagagactggaaggaccacaagttcaagtggcggaaggaccctcaggacaagagggccaagcgatctggatctggagcaacaaacttctcactactcaaacaagcaggtgacgtggaggagaatcccgggcctactagtgccaccatggactggatttggcgcatccttttccttgtcggcgctgctaccggcgcccattccgggcccgaagtgcagctggttgaatctggcggaggactggttcaggctggcggatctctgagactgtcttgtgccgccagcggcagaacctttagcatgggctggtttagacaggcccctggcaaagagagagagttcgtcgccgccatcacatactctggcggcagcccttactacgccgactctgtgaagggcagattcaccatcagccgggacaacgccaagaacaccgtgtacctccagatgaacagcctgaagcctgaggacaccgccgtgtactactgcgccgccaatccaacatacggcagcgactggaacgccgagaattggggccagggaacccaagtgacagtgtctagcggatccggcggcggaggatctggcggaggcggatctgggggcggaggctctttcgaaggcagcacgcgtattggatggttgctcttgcaagccccacgctgggttttcaaagaggaagatccaatccatctgcggtgccacagctggaaaaacaccgctctccacaaagtcacatacctgcaaaatggcaaaggacgcaaatacttccatcacaattccgatttttacattccgaaggctaccctgaaagacagcggcagctatttctgccggggactcgtcggctccaagaatgtgtcctccgaaaccgtgaatatcacgattacccaaggactggctgtgcctacaatctctagcttctttccgcctggataccaagtctccttctgtcttgtgatggtcctcctgtttgctgtggacacaggactgtacttttccgtgaaaacgaacatccgcagctccacacgcgattggaaagatcacaagtttaaatggcgcaaagatccccaggacaagcgcgccaagagaagcggatctggcgtgaagcagaccctgaatttcgacctgctgaagctggctggcgacgtggaatccaacccaggcccttctagaggccatatgaccgagtacaagcccacggtgcgcctcgccacccgcgacgacgtccccagggccgtacgcaccctcgccgccgcgttcgccgactaccccgccacgcgccacaccgtcgatccggaccgccacatcgagcgggtcaccgagctgcaagaactcttcctcacgcgcgtcgggctcgacatcggcaaggtgtgggtcgcggacgacggcgccgcggtggcggtctggaccacgccggagagcgtcgaagcgggggcggtgttcgccgagatcggcccgcgcatggccgagttgagcggttcccggctggccgcgcagcaacagatggaaggcctcctggcgccgcaccggcccaaggagcccgcgtggttcctggccaccgtcggcgtctcgcccgaccaccagggcaagggtctgggcagcgccgtcgtgctccccggagtggaggcggccgagcgcgccggggtgcccgccttcctggagacctccgcgccccgcaacctccccttctacgagcggctcggcttcaccgtcaccgccgacgtcgaggtgcccgaaggaccgcgcacctggtgcatgacccgcaagcccggtgcctga

SEQ ID NO: 1654 - DNA, 3120 bp, Artificial Sequence
  Synthetic Polynucleotide
atggccttaccagtgaccgccttgctcctgccgctggccttgctgctccacgccgccaggccggacatccagatgacacagagccctagcagcctgtctgccagcgtgggagacagagtgaccatcacatgcaaggccagcgaccacatcaacaactggctggcctggtatcagcagaagcctggacaggcccctaagctgctgatctacggcgctaccacactggaaacaggcgtgcccagcagattttctggcagcggctctggcaccgactacaccctgacaatatccagcctccagcctgaggacttcgccacctactactgtcagcagagctggaacaccccttggacattcggccagggcaccaagctggaaatcaagagactcgagggacagcctaaggccaatcctaccgtgacactgttccctccaagcagcgaagaactccaggccaacaaggccacacttgtgtgcctgatctccgacttctaccctggggctgtgacagtggcttggaaggccgatggatctcctgtgaaagccggcgtggaaaccaccaagccatccaagcagagcaacaacaaatacgccgccagctcctacctgagcctgacacctgagcagtggaagtcccacagatcctacagctgccaagtgacccacgaaggcagcaccgtggaaaagacagtggcccctacagagtgcagcggatccatcggctggctgttgctccaggcccctcggtgggtgttcaaggaggaagaccctattcacctgaggtgtcacagctggaagaacactgctctgcataaggtcacatatttacagaatggcaaaggcaggaagtattttcatcataattctgacttctacattccaaaagccacactcaaagacagcggctcctacttctgcagggggcttgttgggagtaaaaatgtgtcttcagagactgtgaacatcaccatcactcaaggtttggcagtgtcaaccatctcatcattctttccacctggctaccaagtgtccttctgcctggtcatggtgctgctgttcgccgtggataccggcctgtacttcagcgtcaagaccaacatccggtccagcaccagagactggaaggaccacaagttcaagtggcggaaggaccctcaggacaagagggccaagcgatctggatctggagcaacaaacttctcactactcaaacaagcaggtgacgtggaggagaatcccgggcctactagtatggactggatttggcgcatccttttccttgtcggcgctgctaccggcgcgcattccttcgaacaagttcagcttcaacagcctggcgctgagctggtcaaacctggcgcttctgtgaagatgagctgcaaagccagcggctacgccttcagcagctactggatcaactggatgaagcagaaacccggccagggactcgaatggatcggccaaatctatcccggcgacggcgacaccaactacaacggcaagttcaagggcagagccacactgaccgccgatacctctagcagcacagcctacatgcagctgagcagcctgaccagcgaagatagcgccgtgtacttctgtgcccggtccatcacaacagtcgtgggctgcgctatggactattggggccagggaacaagcgtgaccgtgtctagtacgcgtgcctctacaaagggaccctccgtgtttcctctggctcccagcagcaagtctacaagcggaggaacagccgctctgggctgcctggtcaaggattactttcccgagcctgtgaccgtgtcctggaatagcggagcactgacaagcggcgtgcacacctttccagccgtgctgcaaagcagcggcctgtactctctgagcagcgtggtcacagtgcctagctctagcctgggcacccagacctacatctgcaatgtgaaccacaagcctagcaacaccaaggtggacaagagagtggaacccaagagctgtggtaccattggatggttgctcttgcaagccccacgctgggttttcaaagaggaagatccaatccatctgcggtgccacagctggaaaaacaccgctctccacaaagtcacatacctgcaaaatggcaaaggacgcaaatacttccatcacaattccgatttttacattccgaaggctaccctgaaagacagcggcagctatttctgccggggactcgtcggctccaagaatgtgtcctccgaaaccgtgaatatcacgattacccaaggactggctgtgcctacaatctctagcttctttccgcctggataccaagtctccttctgtcttgtgatggtcctcctgtttgctgtggacacaggactgtacttttccgtgaaaacgaacatccgcagctccacacgcgattggaaagatcacaagtttaaatggcgcaaagatccccaggacaagcgcgccaagagaagcggatctggcgtgaagcagaccctgaatttcgacctgctgaagctggctggcgacgtggaatccaacccaggcccttctagaggcgggatccacaccatggctacctacgaggtgctgtgcgaggtggcaagaaagctgggcaccgacgacagagaagtggtgctgttcctgctgaacgtgttcatccctcagcctacactggcccagctgatcggtgcactgagagccctgaaagaggaaggccggctgacctttcctctgctggccgaatgcctgttcagagccggaagaagggatctgctgcgggacctgctgcatctggaccccagatttctggaaagacacctggccggcaccatgagctacttcagcccttaccagctgaccgtgctgcacgttgacggcgaactgtgcgccagagatattcggagcctgatcttcctgagcaaggacaccatcggcagccggtctacccctcagacatttctgcactgggtgtactgcatggaaaacctggacctgctcggccccacagatgtggatgccctgatgtccatgctgagaagcctgagcagagtggacctccagagacaggtgcagacactgatgggactgcacctgagcggacctagccacagccagcactacagacacacccct

SEQ ID NO: 1655 - DNA, 3279 bp, Artificial Sequence
  Synthetic Polynucleotide
atggccttaccagtgaccgccttgctcctgccgctggccttgctgctccacgccgccaggccggacatccagatgacacagagccctagcagcctgtctgccagcgtgggagacagagtgaccatcacatgcaaggccagcgaccacatcaacaactggctggcctggtatcagcagaagcctggacaggcccctaagctgctgatctacggcgctaccacactggaaacaggcgtgcccagcagattttctggcagcggctctggcaccgactacaccctgacaatatccagcctccagcctgaggacttcgccacctactactgtcagcagagctggaacaccccttggacattcggccagggcaccaagctggaaatcaagagactcgagggacagcctaaggccaatcctaccgtgacactgttccctccaagcagcgaagaactccaggccaacaaggccacacttgtgtgcctgatctccgacttctaccctggggctgtgacagtggcttggaaggccgatggatctcctgtgaaagccggcgtggaaaccaccaagccatccaagcagagcaacaacaaatacgccgccagctcctacctgagcctgacacctgagcagtggaagtcccacagatcctacagctgccaagtgacccacgaaggcagcaccgtggaaaagacagtggcccctacagagtgcagcggatccatcggctggctgttgctccaggcccctcggtgggtgttcaaggaggaagaccctattcacctgaggtgtcacagctggaagaacactgctctgcataaggtcacatatttacagaatggcaaaggcaggaagtattttcatcataattctgacttctacattccaaaagccacactcaaagacagcggctcctacttctgcagggggcttgttgggagtaaaaatgtgtcttcagagactgtgaacatcaccatcactcaaggtttggcagtgtcaaccatctcatcattctttccacctggctaccaagtgtccttctgcctggtcatggtgctgctgttcgccgtggataccggcctgtacttcagcgtcaagaccaacatccggtccagcaccagagactggaaggaccacaagttcaagtggcggaaggaccctcaggacaagagggccaagcgatctggatctggagcaacaaacttctcactactcaaacaagcaggtgacgtggaggagaatcccgggcctactagtatggactggatttggcgcatccttttccttgtcggcgctgctaccggcgcgcattccttcgaacaagttcagcttcaacagcctggcgctgagctggtcaaacctggcgcttctgtgaagatgagctgcaaagccagcggctacgccttcagcagctactggatcaactggatgaagcagaaacccggccagggactcgaatggatcggccaaatctatcccggcgacggcgacaccaactacaacggcaagttcaagggcagagccacactgaccgccgatacctctagcagcacagcctacatgcagctgagcagcctgaccagcgaagatagcgccgtgtacttctgtgcccggtccatcacaacagtcgtgggctgcgctatggactattggggccagggaacaagcgtgaccgtgtctagtacgcgtgcctctacaaagggaccctccgtgtttcctctggctcccagcagcaagtctacaagcggaggaacagccgctctgggctgcctggtcaaggattactttcccgagcctgtgaccgtgtcctggaatagcggagcactgacaagcggcgtgcacacctttccagccgtgctgcaaagcagcggcctgtactctctgagcagcgtggtcacagtgcctagctctagcctgggcacccagacctacatctgcaatgtgaaccacaagcctagcaacaccaaggtggacaagagagtggaacccaagagctgtggtaccattggatggttgctcttgcaagccccacgctgggttttcaaagaggaagatccaatccatctgcggtgccacagctggaaaaacaccgctctccacaaagtcacatacctgcaaaatggcaaaggacgcaaatacttccatcacaattccgatttttacattccgaaggctaccctgaaagacagcggcagctatttctgccggggactcgtcggctccaagaatgtgtcctccgaaaccgtgaatatcacgattacccaaggactggctgtgcctacaatctctagcttctttccgcctggataccaagtctccttctgtcttgtgatggtcctcctgtttgctgtggacacaggactgtacttttccgtgaaaacgaacatccgcagctccacacgcgattggaaagatcacaagtttaaatggcgcaaagatccccaggacaagcgcgccaagagaagcggatctggcgtgaagcagaccctgaatttcgacctgctgaagctggctggcgacgtggaatccaacccaggcccttctagaggcgggatccacaccatgtccgactccaaggaggtccctagccttccatttttgcgacacttgctcgaagagttggacagccatgaggacagcttgctgctgtttctgtgtcacgacgcggccccgggctgcacgacggtcacgcaagctttgtgctcgcttagccaacagcgcaagctgaccctcgcggctctggtcgagatgctctacgtgctgcagcgtatggatcttctcaagagccgcttcgggctcagcaaggagggggccgagcaattgctgggcacaagctttctcacgcgctaccgcaagctcatggtttgcgtgggtgaggagctcgactcgagcgagctacgcgctctacgcttgttcgcgtgcaacctgaatccgagcctgagcacggcgctttctgagagcagccgctttgtcgagcttgtactcgcgcttgaaaacgtaggactcgtctcgccatcgagtgtttccgtgcttgcggacatgttgcgcactcttcggcgcctcgatttgtgccagcagcttgttgagtacgaacaacaagagcaagccaggtaccgttactgttacgcggcctcgccctcattgccagttcgtacgttacgtcgggggcacggcgcgagtgaacacgagcagctgtgcatgcccgtgcaagaatcctctgacagccccgagctgctgcgcacgcccgtacaagaatcctccagcgacagccccgagcaaacgact

SEQ ID NO: 1656 - DNA, 3147 bp, Artificial Sequence
  Synthetic Polynucleotide
atggccttaccagtgaccgccttgctcctgccgctggccttgctgctccacgccgccaggccggacatccagatgacacagagccctagcagcctgtctgccagcgtgggagacagagtgaccatcacatgcaaggccagcgaccacatcaacaactggctggcctggtatcagcagaagcctggacaggcccctaagctgctgatctacggcgctaccacactggaaacaggcgtgcccagcagattttctggcagcggctctggcaccgactacaccctgacaatatccagcctccagcctgaggacttcgccacctactactgtcagcagagctggaacaccccttggacattcggccagggcaccaagctggaaatcaagagactcgagggacagcctaaggccaatcctaccgtgacactgttccctccaagcagcgaagaactccaggccaacaaggccacacttgtgtgcctgatctccgacttctaccctggggctgtgacagtggcttggaaggccgatggatctcctgtgaaagccggcgtggaaaccaccaagccatccaagcagagcaacaacaaatacgccgccagctcctacctgagcctgacacctgagcagtggaagtcccacagatcctacagctgccaagtgacccacgaaggcagcaccgtggaaaagacagtggcccctacagagtgcagcggatccatcggctggctgttgctccaggcccctcggtgggtgttcaaggaggaagaccctattcacctgaggtgtcacagctggaagaacactgctctgcataaggtcacatatttacagaatggcaaaggcaggaagtattttcatcataattctgacttctacattccaaaagccacactcaaagacagcggctcctacttctgcagggggcttgttgggagtaaaaatgtgtcttcagagactgtgaacatcaccatcactcaaggtttggcagtgtcaaccatctcatcattctttccacctggctaccaagtgtccttctgcctggtcatggtgctgctgttcgccgtggataccggcctgtacttcagcgtcaagaccaacatccggtccagcaccagagactggaaggaccacaagttcaagtggcggaaggaccctcaggacaagagggccaagcgatctggatctggagcaacaaacttctcactactcaaacaagcaggtgacgtggaggagaatcccgggcctactagtatggactggatttggcgcatccttttccttgtcggcgctgctaccggcgcgcattccttcgaacaagttcagcttcaacagcctggcgctgagctggtcaaacctggcgcttctgtgaagatgagctgcaaagccagcggctacgccttcagcagctactggatcaactggatgaagcagaaacccggccagggactcgaatggatcggccaaatctatcccggcgacggcgacaccaactacaacggcaagttcaagggcagagccacactgaccgccgatacctctagcagcacagcctacatgcagctgagcagcctgaccagcgaagatagcgccgtgtacttctgtgcccggtccatcacaacagtcgtgggctgcgctatggactattggggccagggaacaagcgtgaccgtgtctagtacgcgtgcctctacaaagggaccctccgtgtttcctctggctcccagcagcaagtctacaagcggaggaacagccgctctgggctgcctggtcaaggattactttcccgagcctgtgaccgtgtcctggaatagcggagcactgacaagcggcgtgcacacctttccagccgtgctgcaaagcagcggcctgtactctctgagcagcgtggtcacagtgcctagctctagcctgggcacccagacctacatctgcaatgtgaaccacaagcctagcaacaccaaggtggacaagagagtggaacccaagagctgtggtaccattggatggttgctcttgcaagccccacgctgggttttcaaagaggaagatccaatccatctgcggtgccacagctggaaaaacaccgctctccacaaagtcacatacctgcaaaatggcaaaggacgcaaatacttccatcacaattccgatttttacattccgaaggctaccctgaaagacagcggcagctatttctgccggggactcgtcggctccaagaatgtgtcctccgaaaccgtgaatatcacgattacccaaggactggctgtgcctacaatctctagcttctttccgcctggataccaagtctccttctgtcttgtgatggtcctcctgtttgctgtggacacaggactgtacttttccgtgaaaacgaacatccgcagctccacacgcgattggaaagatcacaagtttaaatggcgcaaagatccccaggacaagcgcgccaagagaagcggatctggcgtgaagcagaccctgaatttcgacctgctgaagctggctggcgacgtggaatccaacccaggcccttctagaggccatatgaccgagtacaagcccacggtgcgcctcgccacccgcgacgacgtccccagggccgtacgcaccctcgccgccgcgttcgccgactaccccgccacgcgccacaccgtcgatccggaccgccacatcgagcgggtcaccgagctgcaagaactcttcctcacgcgcgtcgggctcgacatcggcaaggtgtgggtcgcggacgacggcgccgcggtggcggtctggaccacgccggagagcgtcgaagcgggggcggtgttcgccgagatcggcccgcgcatggccgagttgagcggttcccggctggccgcgcagcaacagatggaaggcctcctggcgccgcaccggcccaaggagcccgcgtggttcctggccaccgtcggcgtctcgcccgaccaccagggcaagggtctgggcagcgccgtcgtgctccccggagtggaggcggccgagcgcgccggggtgcccgccttcctggagacctccgcgccccgcaacctccccttctacgagcggctcggcttcaccgtcaccgccgacgtcgaggtgcccgaaggaccgcgcacctggtgcatgacccgcaagcccggtgcctga

SEQ ID NO: 1657 - DNA, 3558 bp, Artificial Sequence
  Synthetic Polynucleotide
atggccttaccagtgaccgccttgctcctgccgctggccttgctgctccacgccgccaggccggaagtgcagctggttgaatctggcggaggactggttcaggctggcggatctctgagactgtcttgtgccgccagcggcagaacctttagcatgggctggtttagacaggcccctggcaaagagagagagttcgtcgccgccatcacatactctggcggcagcccttactacgccgactctgtgaagggcagattcaccatcagccgggacaacgccaagaacaccgtgtacctccagatgaacagcctgaagcctgaggacaccgccgtgtactactgcgccgccaatccaacatacggcagcgactggaacgccgagaattggggccagggaacccaagtgacagtgtctagcggtaccggcggaggcggatctggcggcggaggtagcggtggcggaggatctgaattcgacatccagatgacacagagccctagcagcctgtctgccagcgtgggagacagagtgaccatcacatgcaaggccagcgaccacatcaacaactggctggcctggtatcagcagaagcctggacaggcccctaagctgctgatctacggcgctaccacactggaaacaggcgtgcccagcagattttctggcagcggctctggcaccgactacaccctgacaatatccagcctccagcctgaggacttcgccacctactactgtcagcagagctggaacaccccttggacattcggccagggcaccaagctggaaatcaagagactcgagggacagcctaaggccaatcctaccgtgacactgttccctccaagcagcgaagaactccaggccaacaaggccacacttgtgtgcctgatctccgacttctaccctggggctgtgacagtggcttggaaggccgatggatctcctgtgaaagccggcgtggaaaccaccaagccatccaagcagagcaacaacaaatacgccgccagctcctacctgagcctgacacctgagcagtggaagtcccacagatcctacagctgccaagtgacccacgaaggcagcaccgtggaaaagacagtggcccctacagagtgcagcggatccatcggctggctgttgctccaggcccctcggtgggtgttcaaggaggaagaccctattcacctgaggtgtcacagctggaagaacactgctctgcataaggtcacatatttacagaatggcaaaggcaggaagtattttcatcataattctgacttctacattccaaaagccacactcaaagacagcggctcctacttctgcagggggcttgttgggagtaaaaatgtgtcttcagagactgtgaacatcaccatcactcaaggtttggcagtgtcaaccatctcatcattctttccacctggctaccaagtgtccttctgcctggtcatggtgctgctgttcgccgtggataccggcctgtacttcagcgtcaagaccaacatccggtccagcaccagagactggaaggaccacaagttcaagtggcggaaggaccctcaggacaagagggccaagcgatctggatctggagcaacaaacttctcactactcaaacaagcaggtgacgtggaggagaatcccgggcctactagtatggactggatttggcgcatccttttccttgtcggcgctgctaccggcgcgcattccttcgaacaagttcagcttcaacagcctggcgctgagctggtcaaacctggcgcttctgtgaagatgagctgcaaagccagcggctacgccttcagcagctactggatcaactggatgaagcagaaacccggccagggactcgaatggatcggccaaatctatcccggcgacggcgacaccaactacaacggcaagttcaagggcagagccacactgaccgccgatacctctagcagcacagcctacatgcagctgagcagcctgaccagcgaagatagcgccgtgtacttctgtgcccggtccatcacaacagtcgtgggctgcgctatggactattggggccagggaacaagcgtgaccgtgtctagtacgcgtgcctctacaaagggaccctccgtgtttcctctggctcccagcagcaagtctacaagcggaggaacagccgctctgggctgcctggtcaaggattactttcccgagcctgtgaccgtgtcctggaatagcggagcactgacaagcggcgtgcacacctttccagccgtgctgcaaagcagcggcctgtactctctgagcagcgtggtcacagtgcctagctctagcctgggcacccagacctacatctgcaatgtgaaccacaagcctagcaacaccaaggtggacaagagagtggaacccaagagctgtggtaccattggatggttgctcttgcaagccccacgctgggttttcaaagaggaagatccaatccatctgcggtgccacagctggaaaaacaccgctctccacaaagtcacatacctgcaaaatggcaaaggacgcaaatacttccatcacaattccgatttttacattccgaaggctaccctgaaagacagcggcagctatttctgccggggactcgtcggctccaagaatgtgtcctccgaaaccgtgaatatcacgattacccaaggactggctgtgcctacaatctctagcttctttccgcctggataccaagtctccttctgtcttgtgatggtcctcctgtttgctgtggacacaggactgtacttttccgtgaaaacgaacatccgcagctccacacgcgattggaaagatcacaagtttaaatggcgcaaagatccccaggacaagcgcgccaagagaagcggatctggcgtgaagcagaccctgaatttcgacctgctgaagctggctggcgacgtggaatccaacccaggcccttctagaggccatatgaccgagtacaagcccacggtgcgcctcgccacccgcgacgacgtccccagggccgtacgcaccctcgccgccgcgttcgccgactaccccgccacgcgccacaccgtcgatccggaccgccacatcgagcgggtcaccgagctgcaagaactcttcctcacgcgcgtcgggctcgacatcggcaaggtgtgggtcgcggacgacggcgccgcggtggcggtctggaccacgccggagagcgtcgaagcgggggcggtgttcgccgagatcggcccgcgcatggccgagttgagcggttcccggctggccgcgcagcaacagatggaaggcctcctggcgccgcaccggcccaaggagcccgcgtggttcctggccaccgtcggcgtctcgcccgaccaccagggcaagggtctgggcagcgccgtcgtgctccccggagtggaggcggccgagcgcgccggggtgcccgccttcctggagacctccgcgccccgcaacctccccttctacgagcggctcggcttcaccgtcaccgccgacgtcgaggtgcccgaaggaccgcgcacctggtgcatgacccgcaagcccggtgcctga

SEQ ID NO: 1658 - DNA, 3969 bp, Artificial Sequence
  Synthetic Polynucleotide
atggccttaccagtgaccgccttgctcctgccgctggccttgctgctccacgccgccaggccggaagtgcagctggttgaatctggcggaggactggttcaggctggcggatctctgagactgtcttgtgccgccagcggcagaacctttagcatgggctggtttagacaggcccctggcaaagagagagagttcgtcgccgccatcacatactctggcggcagcccttactacgccgactctgtgaagggcagattcaccatcagccgggacaacgccaagaacaccgtgtacctccagatgaacagcctgaagcctgaggacaccgccgtgtactactgcgccgccaatccaacatacggcagcgactggaacgccgagaattggggccagggaacccaagtgacagtgtctagcggtaccggcggaggcggatctggcggcggaggtagcggtggcggaggatctgaattcgacatccagatgacacagagccctagcagcctgtctgccagcgtgggagacagagtgaccatcacatgcaaggccagcgaccacatcaacaactggctggcctggtatcagcagaagcctggacaggcccctaagctgctgatctacggcgctaccacactggaaacaggcgtgcccagcagattttctggcagcggctctggcaccgactacaccctgacaatatccagcctccagcctgaggacttcgccacctactactgtcagcagagctggaacaccccttggacattcggccagggcaccaagctggaaatcaagagactcgagggacagcctaaggccaatcctaccgtgacactgttccctccaagcagcgaagaactccaggccaacaaggccacacttgtgtgcctgatctccgacttctaccctggggctgtgacagtggcttggaaggccgatggatctcctgtgaaagccggcgtggaaaccaccaagccatccaagcagagcaacaacaaatacgccgccagctcctacctgagcctgacacctgagcagtggaagtcccacagatcctacagctgccaagtgacccacgaaggcagcaccgtggaaaagacagtggcccctacagagtgcagcggatccatcggctggctgttgctccaggcccctcggtgggtgttcaaggaggaagaccctattcacctgaggtgtcacagctggaagaacactgctctgcataaggtcacatatttacagaatggcaaaggcaggaagtattttcatcataattctgacttctacattccaaaagccacactcaaagacagcggctcctacttctgcagggggcttgttgggagtaaaaatgtgtcttcagagactgtgaacatcaccatcactcaaggtttggcagtgtcaaccatctcatcattctttccacctggctaccaagtgtccttctgcctggtcatggtgctgctgttcgccgtggataccggcctgtacttcagcgtcaagaccaacatccggtccagcaccagagactggaaggaccacaagttcaagtggcggaaggaccctcaggacaagagggccaagcgatctggatctggagcaacaaacttctcactactcaaacaagcaggtgacgtggaggagaatcccgggcctactagtatggactggatttggcgcatccttttccttgtcggcgctgctaccggcgcgcattccgggcccgaagtgcaactggttgaatccggtggcggcctggtgcaagcaggcggatctctcagacttagctgtgccgcctccggcagaaccttcacaatgggatggtttaggcaggctccagggaaagagagagagttcgtcgccgccatctctctgtctcccacactggcctactacgccgactctgtgaaaggccggttcaccatctccagagataatgccaagaacaccgtggtgctgcaaatgaactctctgaaacccgaggatacagccctgtactattgtgccgctgaccggaagtccgtgatgagcatcagacccgattactggggacagggcacacaagtcacagtgtcctctggatccggcggcggaggatctggcggaggcggatctgggggcggaggctctttcgaacaagttcagcttcaacagcctggcgctgagctggtcaaacctggcgcttctgtgaagatgagctgcaaagccagcggctacgccttcagcagctactggatcaactggatgaagcagaaacccggccagggactcgaatggatcggccaaatctatcccggcgacggcgacaccaactacaacggcaagttcaagggcagagccacactgaccgccgatacctctagcagcacagcctacatgcagctgagcagcctgaccagcgaagatagcgccgtgtacttctgtgcccggtccatcacaacagtcgtgggctgcgctatggactattggggccagggaacaagcgtgaccgtgtctagtacgcgtgcctctacaaagggaccctccgtgtttcctctggctcccagcagcaagtctacaagcggaggaacagccgctctgggctgcctggtcaaggattactttcccgagcctgtgaccgtgtcctggaatagcggagcactgacaagcggcgtgcacacctttccagccgtgctgcaaagcagcggcctgtactctctgagcagcgtggtcacagtgcctagctctagcctgggcacccagacctacatctgcaatgtgaaccacaagcctagcaacaccaaggtggacaagagagtggaacccaagagctgtggtaccattggatggttgctcttgcaagccccacgctgggttttcaaagaggaagatccaatccatctgcggtgccacagctggaaaaacaccgctctccacaaagtcacatacctgcaaaatggcaaaggacgcaaatacttccatcacaattccgatttttacattccgaaggctaccctgaaagacagcggcagctatttctgccggggactcgtcggctccaagaatgtgtcctccgaaaccgtgaatatcacgattacccaaggactggctgtgcctacaatctctagcttctttccgcctggataccaagtctccttctgtcttgtgatggtcctcctgtttgctgtggacacaggactgtacttttccgtgaaaacgaacatccgcagctccacacgcgattggaaagatcacaagtttaaatggcgcaaagatccccaggacaagcgcgccaagagaagcggatctggcgtgaagcagaccctgaatttcgacctgctgaagctggctggcgacgtggaatccaacccaggcccttctagaggccatatgaccgagtacaagcccacggtgcgcctcgccacccgcgacgacgtccccagggccgtacgcaccctcgccgccgcgttcgccgactaccccgccacgcgccacaccgtcgatccggaccgccacatcgagcgggtcaccgagctgcaagaactcttcctcacgcgcgtcgggctcgacatcggcaaggtgtgggtcgcggacgacggcgccgcggtggcggtctggaccacgccggagagcgtcgaagcgggggcggtgttcgccgagatcggcccgcgcatggccgagttgagcggttcccggctggccgcgcagcaacagatggaaggcctcctggcgccgcaccggcccaaggagcccgcgtggttcctggccaccgtcggcgtctcgcccgaccaccagggcaagggtctgggcagcgccgtcgtgctccccggagtggaggcggccgagcgcgccggggtgcccgccttcctggagacctccgcgccccgcaacctccccttctacgagcggctcggcttcaccgtcaccgccgacgtcgaggtgcccgaaggaccgcgcacctggtgcatgacccgcaagcccggtgcctga

SEQ ID NO: 1659 - DNA, 3168 bp, Artificial Sequence
  Synthetic Polynucleotide
atggccttaccagtgaccgccttgctcctgccgctggccttgctgctccacgccgccaggccggaagtgcagctggttgaatctggcggaggactggttcaggctggcggatctctgagactgtcttgtgccgccagcggcagaacctttagcatgggctggtttagacaggcccctggcaaagagagagagttcgtcgccgccatcacatactctggcggcagcccttactacgccgactctgtgaagggcagattcaccatcagccgggacaacgccaagaacaccgtgtacctccagatgaacagcctgaagcctgaggacaccgccgtgtactactgcgccgccaatccaacatacggcagcgactggaacgccgagaattggggccagggaacccaagtgacagtgtctagcctcgagggacagcctaaggccaatcctaccgtgacactgttccctccaagcagcgaagaactccaggccaacaaggccacacttgtgtgcctgatctccgacttctaccctggggctgtgacagtggcttggaaggccgatggatctcctgtgaaagccggcgtggaaaccaccaagccatccaagcagagcaacaacaaatacgccgccagctcctacctgagcctgacacctgagcagtggaagtcccacagatcctacagctgccaagtgacccacgaaggcagcaccgtggaaaagacagtggcccctacagagtgcagcggatccatcggctggctgttgctccaggcccctcggtgggtgttcaaggaggaagaccctattcacctgaggtgtcacagctggaagaacactgctctgcataaggtcacatatttacagaatggcaaaggcaggaagtattttcatcataattctgacttctacattccaaaagccacactcaaagacagcggctcctacttctgcagggggcttgttgggagtaaaaatgtgtcttcagagactgtgaacatcaccatcactcaaggtttggcagtgtcaaccatctcatcattctttccacctggctaccaagtgtccttctgcctggtcatggtgctgctgttcgccgtggataccggcctgtacttcagcgtcaagaccaacatccggtccagcaccagagactggaaggaccacaagttcaagtggcggaaggaccctcaggacaagagggccaagcgatctggatctggagcaacaaacttctcactactcaaacaagcaggtgacgtggaggagaatcccgggcctactagtatggactggatttggcgcatccttttccttgtcggcgctgctaccggcgcgcattccgggcccgaagtgcaactggttgaatccggtggcggcctggtgcaagcaggcggatctctcagacttagctgtgccgcctccggcagaaccttcacaatgggatggtttaggcaggctccagggaaagagagagagttcgtcgccgccatctctctgtctcccacactggcctactacgccgactctgtgaaaggccggttcaccatctccagagataatgccaagaacaccgtggtgctgcaaatgaactctctgaaacccgaggatacagccctgtactattgtgccgctgaccggaagtccgtgatgagcatcagacccgattactggggacagggcacacaagtcacagtgtcctctacgcgtgcctctacaaagggaccctccgtgtttcctctggctcccagcagcaagtctacaagcggaggaacagccgctctgggctgcctggtcaaggattactttcccgagcctgtgaccgtgtcctggaatagcggagcactgacaagcggcgtgcacacctttccagccgtgctgcaaagcagcggcctgtactctctgagcagcgtggtcacagtgcctagctctagcctgggcacccagacctacatctgcaatgtgaaccacaagcctagcaacaccaaggtggacaagagagtggaacccaagagctgtggtaccattggatggttgctcttgcaagccccacgctgggttttcaaagaggaagatccaatccatctgcggtgccacagctggaaaaacaccgctctccacaaagtcacatacctgcaaaatggcaaaggacgcaaatacttccatcacaattccgatttttacattccgaaggctaccctgaaagacagcggcagctatttctgccggggactcgtcggctccaagaatgtgtcctccgaaaccgtgaatatcacgattacccaaggactggctgtgcctacaatctctagcttctttccgcctggataccaagtctccttctgtcttgtgatggtcctcctgtttgctgtggacacaggactgtacttttccgtgaaaacgaacatccgcagctccacacgcgattggaaagatcacaagtttaaatggcgcaaagatccccaggacaagcgcgccaagagaagcggatctggcgtgaagcagaccctgaatttcgacctgctgaagctggctggcgacgtggaatccaacccaggcccttctagaggccatatgaccgagtacaagcccacggtgcgcctcgccacccgcgacgacgtccccagggccgtacgcaccctcgccgccgcgttcgccgactaccccgccacgcgccacaccgtcgatccggaccgccacatcgagcgggtcaccgagctgcaagaactcttcctcacgcgcgtcgggctcgacatcggcaaggtgtgggtcgcggacgacggcgccgcggtggcggtctggaccacgccggagagcgtcgaagcgggggcggtgttcgccgagatcggcccgcgcatggccgagttgagcggttcccggctggccgcgcagcaacagatggaaggcctcctggcgccgcaccggcccaaggagcccgcgtggttcctggccaccgtcggcgtctcgcccgaccaccagggcaagggtctgggcagcgccgtcgtgctccccggagtggaggcggccgagcgcgccggggtgcccgccttcctggagacctccgcgccccgcaacctccccttctacgagcggctcggcttcaccgtcaccgccgacgtcgaggtgcccgaaggaccgcgcacctggtgcatgacccgcaagcccggtgcctga

SEQ ID NO: 1660 - DNA, 3192 bp, Artificial Sequence
  Synthetic Polynucleotide
atggccttaccagtgaccgccttgctcctgccgctggccttgctgctccacgccgccaggccggacatccagatgacacagagccctagcagcctgtctgccagcgtgggagacagagtgaccatcacatgcaaggccagcgaccacatcaacaactggctggcctggtatcagcagaagcctggacaggcccctaagctgctgatctacggcgctaccacactggaaacaggcgtgcccagcagattttctggcagcggctctggcaccgactacaccctgacaatatccagcctccagcctgaggacttcgccacctactactgtcagcagagctggaacaccccttggacattcggccagggcaccaagctggaaatcaagagactcgaggacctgaagaacgtgttcccacctgaggtggccgtgttcgagcctagcgaggccgagatcagccacacccagaaagccaccctcgtgtgcctggctaccggcttctaccccgaccatgtggaactgtcttggtgggtcaacggcaaagaggtgcacagcggcgtgtctaccgacccccagccactgaaagaacagcccgccctgaacgacagccggtactgcctgagcagcagactgagagtgtccgccaccttctggcagaacccccggaaccacttcagatgccaggtgcagttctacggcctgagcgagaacgacgagtggacccaggacagagccaagcccgtgacccagatcgtgtctgccgaagcctggggcagagccgattgcggatccatcggctggctgttgctccaggcccctcggtgggtgttcaaggaggaagaccctattcacctgaggtgtcacagctggaagaacactgctctgcataaggtcacatatttacagaatggcaaaggcaggaagtattttcatcataattctgacttctacattccaaaagccacactcaaagacagcggctcctacttctgcagggggcttgttgggagtaaaaatgtgtcttcagagactgtgaacatcaccatcactcaaggtttggcagtgtcaaccatctcatcattctttccacctggctaccaagtgtccttctgcctggtcatggtgctgctgttcgccgtggataccggcctgtacttcagcgtcaagaccaacatccggtccagcaccagagactggaaggaccacaagttcaagtggcggaaggaccctcaggacaagagggccaagcgatctggatctggagcaacaaacttctcactactcaaacaagcaggtgacgtggaggagaatcccgggcctactagtatggactggatttggcgcatccttttccttgtcggcgctgctaccggcgcgcattccttcgaacaagttcagcttcaacagcctggcgctgagctggtcaaacctggcgcttctgtgaagatgagctgcaaagccagcggctacgccttcagcagctactggatcaactggatgaagcagaaacccggccagggactcgaatggatcggccaaatctatcccggcgacggcgacaccaactacaacggcaagttcaagggcagagccacactgaccgccgatacctctagcagcacagcctacatgcagctgagcagcctgaccagcgaagatagcgccgtgtacttctgtgcccggtccatcacaacagtcgtgggctgcgctatggactattggggccagggaacaagcgtgaccgtgtctagtacgcgtatccagaaccctgatcctgccgtgtaccagctgcgggatagcaagagcagcgacaagagcgtgtgtctgttcaccgacttcgacagccagaccaacgtgtcccagagcaaggactccgacgtgtacatcaccgataagaccgtgctggacatgcggagcatggacttcaagagcaactccgccgtggcctggtccaacaagtccgatttcgcctgcgccaacgccttcaacaacagcattatccccgaggacacattcttcccaagccccgagagcagctgcggtaccattggatggttgctcttgcaagccccacgctgggttttcaaagaggaagatccaatccatctgcggtgccacagctggaaaaacaccgctctccacaaagtcacatacctgcaaaatggcaaaggacgcaaatacttccatcacaattccgatttttacattccgaaggctaccctgaaagacagcggcagctatttctgccggggactcgtcggctccaagaatgtgtcctccgaaaccgtgaatatcacgattacccaaggactggctgtgcctacaatctctagcttctttccgcctggataccaagtctccttctgtcttgtgatggtcctcctgtttgctgtggacacaggactgtacttttccgtgaaaacgaacatccgcagctccacacgcgattggaaagatcacaagtttaaatggcgcaaagatccccaggacaagcgcgccaagagaagcggatctggcgtgaagcagaccctgaatttcgacctgctgaagctggctggcgacgtggaatccaacccaggcccttctagaggccatatgaccgagtacaagcccacggtgcgcctcgccacccgcgacgacgtccccagggccgtacgcaccctcgccgccgcgttcgccgactaccccgccacgcgccacaccgtcgatccggaccgccacatcgagcgggtcaccgagctgcaagaactcttcctcacgcgcgtcgggctcgacatcggcaaggtgtgggtcgcggacgacggcgccgcggtggcggtctggaccacgccggagagcgtcgaagcgggggcggtgttcgccgagatcggcccgcgcatggccgagttgagcggttcccggctggccgcgcagcaacagatggaaggcctcctggcgccgcaccggcccaaggagcccgcgtggttcctggccaccgtcggcgtctcgcccgaccaccagggcaagggtctgggcagcgccgtcgtgctccccggagtggaggcggccgagcgcgccggggtgcccgccttcctggagacctccgcgccccgcaacctccccttctacgagcggctcggcttcaccgtcaccgccgacgtcgaggtgcccgaaggaccgcgcacctggtgcatgacccgcaagcccggtgcctga

SEQ ID NO: 1661 - DNA, 3603 bp, Artificial Sequence
  Synthetic Polynucleotide
atggccttaccagtgaccgccttgctcctgccgctggccttgctgctccacgccgccaggccggaagtgcagctggttgaatctggcggaggactggttcaggctggcggatctctgagactgtcttgtgccgccagcggcagaacctttagcatgggctggtttagacaggcccctggcaaagagagagagttcgtcgccgccatcacatactctggcggcagcccttactacgccgactctgtgaagggcagattcaccatcagccgggacaacgccaagaacaccgtgtacctccagatgaacagcctgaagcctgaggacaccgccgtgtactactgcgccgccaatccaacatacggcagcgactggaacgccgagaattggggccagggaacccaagtgacagtgtctagcggtaccggcggaggcggatctggcggcggaggtagcggtggcggaggatctgaattcgacatccagatgacacagagccctagcagcctgtctgccagcgtgggagacagagtgaccatcacatgcaaggccagcgaccacatcaacaactggctggcctggtatcagcagaagcctggacaggcccctaagctgctgatctacggcgctaccacactggaaacaggcgtgcccagcagattttctggcagcggctctggcaccgactacaccctgacaatatccagcctccagcctgaggacttcgccacctactactgtcagcagagctggaacaccccttggacattcggccagggcaccaagctggaaatcaagagactcgaggacctgaagaacgtgttcccacctgaggtggccgtgttcgagcctagcgaggccgagatcagccacacccagaaagccaccctcgtgtgcctggctaccggcttctaccccgaccatgtggaactgtcttggtgggtcaacggcaaagaggtgcacagcggcgtgtctaccgacccccagccactgaaagaacagcccgccctgaacgacagccggtactgcctgagcagcagactgagagtgtccgccaccttctggcagaacccccggaaccacttcagatgccaggtgcagttctacggcctgagcgagaacgacgagtggacccaggacagagccaagcccgtgacccagatcgtgtctgccgaagcctggggcagagccgattgcggatccatcggctggctgttgctccaggcccctcggtgggtgttcaaggaggaagaccctattcacctgaggtgtcacagctggaagaacactgctctgcataaggtcacatatttacagaatggcaaaggcaggaagtattttcatcataattctgacttctacattccaaaagccacactcaaagacagcggctcctacttctgcagggggcttgttgggagtaaaaatgtgtcttcagagactgtgaacatcaccatcactcaaggtttggcagtgtcaaccatctcatcattctttccacctggctaccaagtgtccttctgcctggtcatggtgctgctgttcgccgtggataccggcctgtacttcagcgtcaagaccaacatccggtccagcaccagagactggaaggaccacaagttcaagtggcggaaggaccctcaggacaagagggccaagcgatctggatctggagcaacaaacttctcactactcaaacaagcaggtgacgtggaggagaatcccgggcctactagtatggactggatttggcgcatccttttccttgtcggcgctgctaccggcgcgcattccttcgaacaagttcagcttcaacagcctggcgctgagctggtcaaacctggcgcttctgtgaagatgagctgcaaagccagcggctacgccttcagcagctactggatcaactggatgaagcagaaacccggccagggactcgaatggatcggccaaatctatcccggcgacggcgacaccaactacaacggcaagttcaagggcagagccacactgaccgccgatacctctagcagcacagcctacatgcagctgagcagcctgaccagcgaagatagcgccgtgtacttctgtgcccggtccatcacaacagtcgtgggctgcgctatggactattggggccagggaacaagcgtgaccgtgtctagtacgcgtatccagaaccctgatcctgccgtgtaccagctgcgggatagcaagagcagcgacaagagcgtgtgtctgttcaccgacttcgacagccagaccaacgtgtcccagagcaaggactccgacgtgtacatcaccgataagaccgtgctggacatgcggagcatggacttcaagagcaactccgccgtggcctggtccaacaagtccgatttcgcctgcgccaacgccttcaacaacagcattatccccgaggacacattcttcccaagccccgagagcagctgcggtaccattggatggttgctcttgcaagccccacgctgggttttcaaagaggaagatccaatccatctgcggtgccacagctggaaaaacaccgctctccacaaagtcacatacctgcaaaatggcaaaggacgcaaatacttccatcacaattccgatttttacattccgaaggctaccctgaaagacagcggcagctatttctgccggggactcgtcggctccaagaatgtgtcctccgaaaccgtgaatatcacgattacccaaggactggctgtgcctacaatctctagcttctttccgcctggataccaagtctccttctgtcttgtgatggtcctcctgtttgctgtggacacaggactgtacttttccgtgaaaacgaacatccgcagctccacacgcgattggaaagatcacaagtttaaatggcgcaaagatccccaggacaagcgcgccaagagaagcggatctggcgtgaagcagaccctgaatttcgacctgctgaagctggctggcgacgtggaatccaacccaggcccttctagaggccatatgaccgagtacaagcccacggtgcgcctcgccacccgcgacgacgtccccagggccgtacgcaccctcgccgccgcgttcgccgactaccccgccacgcgccacaccgtcgatccggaccgccacatcgagcgggtcaccgagctgcaagaactcttcctcacgcgcgtcgggctcgacatcggcaaggtgtgggtcgcggacgacggcgccgcggtggcggtctggaccacgccggagagcgtcgaagcgggggcggtgttcgccgagatcggcccgcgcatggccgagttgagcggttcccggctggccgcgcagcaacagatggaaggcctcctggcgccgcaccggcccaaggagcccgcgtggttcctggccaccgtcggcgtctcgcccgaccaccagggcaagggtctgggcagcgccgtcgtgctccccggagtggaggcggccgagcgcgccggggtgcccgccttcctggagacctccgcgccccgcaacctccccttctacgagcggctcggcttcaccgtcaccgccgacgtcgaggtgcccgaaggaccgcgcacctggtgcatgacccgcaagcccggtgcctga

SEQ ID NO: 1662 - DNA, 4014 bp, Artificial Sequence
  Synthetic Polynucleotide
atggccttaccagtgaccgccttgctcctgccgctggccttgctgctccacgccgccaggccggaagtgcagctggttgaatctggcggaggactggttcaggctggcggatctctgagactgtcttgtgccgccagcggcagaacctttagcatgggctggtttagacaggcccctggcaaagagagagagttcgtcgccgccatcacatactctggcggcagcccttactacgccgactctgtgaagggcagattcaccatcagccgggacaacgccaagaacaccgtgtacctccagatgaacagcctgaagcctgaggacaccgccgtgtactactgcgccgccaatccaacatacggcagcgactggaacgccgagaattggggccagggaacccaagtgacagtgtctagcggtaccggcggaggcggatctggcggcggaggtagcggtggcggaggatctgaattcgacatccagatgacacagagccctagcagcctgtctgccagcgtgggagacagagtgaccatcacatgcaaggccagcgaccacatcaacaactggctggcctggtatcagcagaagcctggacaggcccctaagctgctgatctacggcgctaccacactggaaacaggcgtgcccagcagattttctggcagcggctctggcaccgactacaccctgacaatatccagcctccagcctgaggacttcgccacctactactgtcagcagagctggaacaccccttggacattcggccagggcaccaagctggaaatcaagagactcgaggacctgaagaacgtgttcccacctgaggtggccgtgttcgagcctagcgaggccgagatcagccacacccagaaagccaccctcgtgtgcctggctaccggcttctaccccgaccatgtggaactgtcttggtgggtcaacggcaaagaggtgcacagcggcgtgtctaccgacccccagccactgaaagaacagcccgccctgaacgacagccggtactgcctgagcagcagactgagagtgtccgccaccttctggcagaacccccggaaccacttcagatgccaggtgcagttctacggcctgagcgagaacgacgagtggacccaggacagagccaagcccgtgacccagatcgtgtctgccgaagcctggggcagagccgattgcggatccatcggctggctgttgctccaggcccctcggtgggtgttcaaggaggaagaccctattcacctgaggtgtcacagctggaagaacactgctctgcataaggtcacatatttacagaatggcaaaggcaggaagtattttcatcataattctgacttctacattccaaaagccacactcaaagacagcggctcctacttctgcagggggcttgttgggagtaaaaatgtgtcttcagagactgtgaacatcaccatcactcaaggtttggcagtgtcaaccatctcatcattctttccacctggctaccaagtgtccttctgcctggtcatggtgctgctgttcgccgtggataccggcctgtacttcagcgtcaagaccaacatccggtccagcaccagagactggaaggaccacaagttcaagtggcggaaggaccctcaggacaagagggccaagcgatctggatctggagcaacaaacttctcactactcaaacaagcaggtgacgtggaggagaatcccgggcctactagtatggactggatttggcgcatccttttccttgtcggcgctgctaccggcgcgcattccgggcccgaagtgcaactggttgaatccggtggcggcctggtgcaagcaggcggatctctcagacttagctgtgccgcctccggcagaaccttcacaatgggatggtttaggcaggctccagggaaagagagagagttcgtcgccgccatctctctgtctcccacactggcctactacgccgactctgtgaaaggccggttcaccatctccagagataatgccaagaacaccgtggtgctgcaaatgaactctctgaaacccgaggatacagccctgtactattgtgccgctgaccggaagtccgtgatgagcatcagacccgattactggggacagggcacacaagtcacagtgtcctctggatccggcggcggaggatctggcggaggcggatctgggggcggaggctctttcgaacaagttcagcttcaacagcctggcgctgagctggtcaaacctggcgcttctgtgaagatgagctgcaaagccagcggctacgccttcagcagctactggatcaactggatgaagcagaaacccggccagggactcgaatggatcggccaaatctatcccggcgacggcgacaccaactacaacggcaagttcaagggcagagccacactgaccgccgatacctctagcagcacagcctacatgcagctgagcagcctgaccagcgaagatagcgccgtgtacttctgtgcccggtccatcacaacagtcgtgggctgcgctatggactattggggccagggaacaagcgtgaccgtgtctagtacgcgtatccagaaccctgatcctgccgtgtaccagctgcgggatagcaagagcagcgacaagagcgtgtgtctgttcaccgacttcgacagccagaccaacgtgtcccagagcaaggactccgacgtgtacatcaccgataagaccgtgctggacatgcggagcatggacttcaagagcaactccgccgtggcctggtccaacaagtccgatttcgcctgcgccaacgccttcaacaacagcattatccccgaggacacattcttcccaagccccgagagcagctgcggtaccattggatggttgctcttgcaagccccacgctgggttttcaaagaggaagatccaatccatctgcggtgccacagctggaaaaacaccgctctccacaaagtcacatacctgcaaaatggcaaaggacgcaaatacttccatcacaattccgatttttacattccgaaggctaccctgaaagacagcggcagctatttctgccggggactcgtcggctccaagaatgtgtcctccgaaaccgtgaatatcacgattacccaaggactggctgtgcctacaatctctagcttctttccgcctggataccaagtctccttctgtcttgtgatggtcctcctgtttgctgtggacacaggactgtacttttccgtgaaaacgaacatccgcagctccacacgcgattggaaagatcacaagtttaaatggcgcaaagatccccaggacaagcgcgccaagagaagcggatctggcgtgaagcagaccctgaatttcgacctgctgaagctggctggcgacgtggaatccaacccaggcccttctagaggccatatgaccgagtacaagcccacggtgcgcctcgccacccgcgacgacgtccccagggccgtacgcaccctcgccgccgcgttcgccgactaccccgccacgcgccacaccgtcgatccggaccgccacatcgagcgggtcaccgagctgcaagaactcttcctcacgcgcgtcgggctcgacatcggcaaggtgtgggtcgcggacgacggcgccgcggtggcggtctggaccacgccggagagcgtcgaagcgggggcggtgttcgccgagatcggcccgcgcatggccgagttgagcggttcccggctggccgcgcagcaacagatggaaggcctcctggcgccgcaccggcccaaggagcccgcgtggttcctggccaccgtcggcgtctcgcccgaccaccagggcaagggtctgggcagcgccgtcgtgctccccggagtggaggcggccgagcgcgccggggtgcccgccttcctggagacctccgcgccccgcaacctccccttctacgagcggctcggcttcaccgtcaccgccgacgtcgaggtgcccgaaggaccgcgcacctggtgcatgacccgcaagcccggtgcctga

SEQ ID NO: 1663 - DNA, 3213 bp, Artificial Sequence
  Synthetic Polynucleotide
atggccttaccagtgaccgccttgctcctgccgctggccttgctgctccacgccgccaggccggaagtgcagctggttgaatctggcggaggactggttcaggctggcggatctctgagactgtcttgtgccgccagcggcagaacctttagcatgggctggtttagacaggcccctggcaaagagagagagttcgtcgccgccatcacatactctggcggcagcccttactacgccgactctgtgaagggcagattcaccatcagccgggacaacgccaagaacaccgtgtacctccagatgaacagcctgaagcctgaggacaccgccgtgtactactgcgccgccaatccaacatacggcagcgactggaacgccgagaattggggccagggaacccaagtgacagtgtctagcctcgaggacctgaagaacgtgttcccacctgaggtggccgtgttcgagcctagcgaggccgagatcagccacacccagaaagccaccctcgtgtgcctggctaccggcttctaccccgaccatgtggaactgtcttggtgggtcaacggcaaagaggtgcacagcggcgtgtctaccgacccccagccactgaaagaacagcccgccctgaacgacagccggtactgcctgagcagcagactgagagtgtccgccaccttctggcagaacccccggaaccacttcagatgccaggtgcagttctacggcctgagcgagaacgacgagtggacccaggacagagccaagcccgtgacccagatcgtgtctgccgaagcctggggcagagccgattgcggatccatcggctggctgttgctccaggcccctcggtgggtgttcaaggaggaagaccctattcacctgaggtgtcacagctggaagaacactgctctgcataaggtcacatatttacagaatggcaaaggcaggaagtattttcatcataattctgacttctacattccaaaagccacactcaaagacagcggctcctacttctgcagggggcttgttgggagtaaaaatgtgtcttcagagactgtgaacatcaccatcactcaaggtttggcagtgtcaaccatctcatcattctttccacctggctaccaagtgtccttctgcctggtcatggtgctgctgttcgccgtggataccggcctgtacttcagcgtcaagaccaacatccggtccagcaccagagactggaaggaccacaagttcaagtggcggaaggaccctcaggacaagagggccaagcgatctggatctggagcaacaaacttctcactactcaaacaagcaggtgacgtggaggagaatcccgggcctactagtatggactggatttggcgcatccttttccttgtcggcgctgctaccggcgcgcattccgggcccgaagtgcaactggttgaatccggtggcggcctggtgcaagcaggcggatctctcagacttagctgtgccgcctccggcagaaccttcacaatgggatggtttaggcaggctccagggaaagagagagagttcgtcgccgccatctctctgtctcccacactggcctactacgccgactctgtgaaaggccggttcaccatctccagagataatgccaagaacaccgtggtgctgcaaatgaactctctgaaacccgaggatacagccctgtactattgtgccgctgaccggaagtccgtgatgagcatcagacccgattactggggacagggcacacaagtcacagtgtcctctacgcgtatccagaaccctgatcctgccgtgtaccagctgcgggatagcaagagcagcgacaagagcgtgtgtctgttcaccgacttcgacagccagaccaacgtgtcccagagcaaggactccgacgtgtacatcaccgataagaccgtgctggacatgcggagcatggacttcaagagcaactccgccgtggcctggtccaacaagtccgatttcgcctgcgccaacgccttcaacaacagcattatccccgaggacacattcttcccaagccccgagagcagctgcggtaccattggatggttgctcttgcaagccccacgctgggttttcaaagaggaagatccaatccatctgcggtgccacagctggaaaaacaccgctctccacaaagtcacatacctgcaaaatggcaaaggacgcaaatacttccatcacaattccgatttttacattccgaaggctaccctgaaagacagcggcagctatttctgccggggactcgtcggctccaagaatgtgtcctccgaaaccgtgaatatcacgattacccaaggactggctgtgcctacaatctctagcttctttccgcctggataccaagtctccttctgtcttgtgatggtcctcctgtttgctgtggacacaggactgtacttttccgtgaaaacgaacatccgcagctccacacgcgattggaaagatcacaagtttaaatggcgcaaagatccccaggacaagcgcgccaagagaagcggatctggcgtgaagcagaccctgaatttcgacctgctgaagctggctggcgacgtggaatccaacccaggcccttctagaggccatatgaccgagtacaagcccacggtgcgcctcgccacccgcgacgacgtccccagggccgtacgcaccctcgccgccgcgttcgccgactaccccgccacgcgccacaccgtcgatccggaccgccacatcgagcgggtcaccgagctgcaagaactcttcctcacgcgcgtcgggctcgacatcggcaaggtgtgggtcgcggacgacggcgccgcggtggcggtctggaccacgccggagagcgtcgaagcgggggcggtgttcgccgagatcggcccgcgcatggccgagttgagcggttcccggctggccgcgcagcaacagatggaaggcctcctggcgccgcaccggcccaaggagcccgcgtggttcctggccaccgtcggcgtctcgcccgaccaccagggcaagggtctgggcagcgccgtcgtgctccccggagtggaggcggccgagcgcgccggggtgcccgccttcctggagacctccgcgccccgcaacctccccttctacgagcggctcggcttcaccgtcaccgccgacgtcgaggtgcccgaaggaccgcgcacctggtgcatgacccgcaagcccggtgcctga

SEQ ID NO: 1664 - DNA, 1635 bp, Artificial Sequence
  Synthetic Polynucleotide
atggccttaccagtgaccgccttgctcctgccgctggccttgctgctccacgccgccaggccggcatgcgaagtgcagctgcttgaaagtggcggcggactgattcagcctggcggatctctgagactgagctgtgccgccagcggcttcaccttttctagccacgccatgacctgggtccgacaggcacctggaaaagggcttgaatgggtgtccgccatcagcggctctggcgattacacacactacgccgacagcgtgaagggcagattcaccatcagcagagacaacagcaagaacaccgtgtacctccagatgaacagcctgagagccgaggacagcgccgtgtattattgcgccaaggatgaggatggcggcagcctgcttggacacagaggacaaggcaccctggtcaccgtttcttccggtaccggcggaggcggatctggcggcggaggtagcggtggcggaggatctgaattcggatctctcgagatcggctggctgttgctccaggcccctcggtgggtgttcaaggaggaagaccctattcacctgaggtgtcacagctggaagaacactgctctgcataaggtcacatatttacagaatggcaaaggcaggaagtattttcatcataattctgacttctacattccaaaagccacactcaaagacagcggctcctacttctgcagggggcttgttgggagtaaaaatgtgtcttcagagactgtgaacatcaccatcactcaaggtttggcagtgtcaaccatctcatcattctttccacctggctaccaagtgtccttctgcctggtcatggtgctgctgttcgccgtggataccggcctgtacttcagcgtcaagaccaacatccggtccagcaccagagactggaaggaccacaagttcaagtggcggaaggaccctcaggacaagagggccaagcgatctggatctggagcaacaaacttctcactactcaaacaagcaggtgacgtggaggagaatcccgggcctactagaggccatatgaccgagtacaagcccacggtgcgcctcgccacccgcgacgacgtccccagggccgtacgcaccctcgccgccgcgttcgccgactaccccgccacgcgccacaccgtcgatccggaccgccacatcgagcgggtcaccgagctgcaagaactcttcctcacgcgcgtcgggctcgacatcggcaaggtgtgggtcgcggacgacggcgccgcggtggcggtctggaccacgccggagagcgtcgaagcgggggcggtgttcgccgagatcggcccgcgcatggccgagttgagcggttcccggctggccgcgcagcaacagatggaaggcctcctggcgccgcaccggcccaaggagcccgcgtggttcctggccaccgtcggcgtctcgcccgaccaccagggcaagggtctgggcagcgccgtcgtgctccccggagtggaggcggccgagcgcgccggggtgcccgccttcctggagacctccgcgccccgcaacctccccttctacgagcggctcggcttcaccgtcaccgccgacgtcgaggtgcccgaaggaccgcgcacctggtgcatgacccgcaagcccggtgcctga

SEQ ID NO: 1665 - DNA, 2256 bp, Artificial Sequence
  Synthetic Polynucleotide
atggccttaccagtgaccgccttgctcctgccgctggccttgctgctccacgccgccaggccggacatccagatgacacagagccctagcagcctgtctgccagcgtgggagacagagtgaccatcacatgcaaggccagcgaccacatcaacaactggctggcctggtatcagcagaagcctggacaggcccctaagctgctgatctacggcgctaccacactggaaacaggcgtgcccagcagattttctggcagcggctctggcaccgactacaccctgacaatatccagcctccagcctgaggacttcgccacctactactgtcagcagagctggaacaccccttggacattcggccagggcaccaagctggaaatcaagagactcgagatcggctggctgttgctccaggcccctcggtgggtgttcaaggaggaagaccctattcacctgaggtgtcacagctggaagaacactgctctgcataaggtcacatatttacagaatggcaaaggcaggaagtattttcatcataattctgacttctacattccaaaagccacactcaaagacagcggctcctacttctgcagggggcttgttgggagtaaaaatgtgtcttcagagactgtgaacatcaccatcactcaaggtttggcagtgtcaaccatctcatcattctttccacctggctaccaagtgtccttctgcctggtcatggtgctgctgttcgccgtggataccggcctgtacttcagcgtcaagaccaacatccggtccagcaccagagactggaaggaccacaagttcaagtggcggaaggaccctcaggacaagagggccaagcgatctggatctggagcaacaaacttctcactactcaaacaagcaggtgacgtggaggagaatcccgggcctactagtatggactggatttggcgcatccttttccttgtcggcgctgctaccggcgcgcattccttcgaacaagttcagcttcaacagcctggcgctgagctggtcaaacctggcgcttctgtgaagatgagctgcaaagccagcggctacgccttcagcagctactggatcaactggatgaagcagaaacccggccagggactcgaatggatcggccaaatctatcccggcgacggcgacaccaactacaacggcaagttcaagggcagagccacactgaccgccgatacctctagcagcacagcctacatgcagctgagcagcctgaccagcgaagatagcgccgtgtacttctgtgcccggtccatcacaacagtcgtgggctgcgctatggactattggggccagggaacaagcgtgaccgtgtctagtacgcgtattacccaaggactggctgtgcctacaatctctagcttctttccgcctggataccaagtctccttctgtcttgtgatggtcctcctgtttgctgtggacacaggactgtacttttccgtgaaaacgaacatccgcagctccacacgcgattggaaagatcacaagtttaaatggcgcaaagatccccaggacaagcgcgccaagagaagcggatctggcgtgaagcagaccctgaatttcgacctgctgaagctggctggcgacgtggaatccaacccaggcccttctagaggccatatgaccgagtacaagcccacggtgcgcctcgccacccgcgacgacgtccccagggccgtacgcaccctcgccgccgcgttcgccgactaccccgccacgcgccacaccgtcgatccggaccgccacatcgagcgggtcaccgagctgcaagaactcttcctcacgcgcgtcgggctcgacatcggcaaggtgtgggtcgcggacgacggcgccgcggtggcggtctggaccacgccggagagcgtcgaagcgggggcggtgttcgccgagatcggcccgcgcatggccgagttgagcggttcccggctggccgcgcagcaacagatggaaggcctcctggcgccgcaccggcccaaggagcccgcgtggttcctggccaccgtcggcgtctcgcccgaccaccagggcaagggtctgggcagcgccgtcgtgctccccggagtggaggcggccgagcgcgccggggtgcccgccttcctggagacctccgcgccccgcaacctccccttctacgagcggctcggcttcaccgtcaccgccgacgtcgaggtgcccgaaggaccgcgcacctggtgcatgacccgcaagcccggtgcctga

SEQ ID NO: 1666 - DNA, 2418 bp, Artificial Sequence
  Synthetic Polynucleotide
atggccttaccagtgaccgccttgctcctgccgctggccttgctgctccacgccgccaggccggcatgcgaagtgcagctgcttgaaagtggcggcggactgattcagcctggcggatctctgagactgagctgtgccgccagcggcttcaccttttctagccacgccatgacctgggtccgacaggcacctggaaaagggcttgaatgggtgtccgccatcagcggctctggcgattacacacactacgccgacagcgtgaagggcagattcaccatcagcagagacaacagcaagaacaccgtgtacctccagatgaacagcctgagagccgaggacagcgccgtgtattattgcgccaaggatgaggatggcggcagcctgcttggacacagaggacaaggcaccctggtcaccgtttcttccggtaccggcggaggcggatctggcggcggaggtagcggtggcggaggatctgaattcggatctctcgagatcggctggctgttgctccaggcccctcggtgggtgttcaaggaggaagaccctattcacctgaggtgtcacagctggaagaacactgctctgcataaggtcacatatttacagaatggcaaaggcaggaagtattttcatcataattctgacttctacattccaaaagccacactcaaagacagcggctcctacttctgcagggggcttgttgggagtaaaaatgtgtcttcagagactgtgaacatcaccatcactcaaggtttggcagtgtcaaccatctcatcattctttccacctggctaccaagtgtccttctgcctggtcatggtgctgctgttcgccgtggataccggcctgtacttcagcgtcaagaccaacatccggtccagcaccagagactggaaggaccacaagttcaagtggcggaaggaccctcaggacaagagggccaagcgatctggatctggagcaacaaacttctcactactcaaacaagcaggtgacgtggaggagaatcccgggcctactagtgccaccatggactggatttggcgcatccttttccttgtcggcgctgctaccggcgcccattccgggcccgaagtgcagctggttgaatctggcggaggactggttcaggctggcggatctctgagactgtcttgtgccgccagcggcagaacctttagcatgggctggtttagacaggcccctggcaaagagagagagttcgtcgccgccatcacatactctggcggcagcccttactacgccgactctgtgaagggcagattcaccatcagccgggacaacgccaagaacaccgtgtacctccagatgaacagcctgaagcctgaggacaccgccgtgtactactgcgccgccaatccaacatacggcagcgactggaacgccgagaattggggccagggaacccaagtgacagtgtctagcggatccggcggcggaggatctggcggaggcggatctgggggcggaggctctttcgaaggcagcacgcgtattacccaaggactggctgtgcctacaatctctagcttctttccgcctggataccaagtctccttctgtcttgtgatggtcctcctgtttgctgtggacacaggactgtacttttccgtgaaaacgaacatccgcagctccacacgcgattggaaagatcacaagtttaaatggcgcaaagatccccaggacaagcgcgccaagagaagcggatctggcgtgaagcagaccctgaatttcgacctgctgaagctggctggcgacgtggaatccaacccaggcccttctagaggccatatgaccgagtacaagcccacggtgcgcctcgccacccgcgacgacgtccccagggccgtacgcaccctcgccgccgcgttcgccgactaccccgccacgcgccacaccgtcgatccggaccgccacatcgagcgggtcaccgagctgcaagaactcttcctcacgcgcgtcgggctcgacatcggcaaggtgtgggtcgcggacgacggcgccgcggtggcggtctggaccacgccggagagcgtcgaagcgggggcggtgttcgccgagatcggcccgcgcatggccgagttgagcggttcccggctggccgcgcagcaacagatggaaggcctcctggcgccgcaccggcccaaggagcccgcgtggttcctggccaccgtcggcgtctcgcccgaccaccagggcaagggtctgggcagcgccgtcgtgctccccggagtggaggcggccgagcgcgccggggtgcccgccttcctggagacctccgcgccccgcaacctccccttctacgagcggctcggcttcaccgtcaccgccgacgtcgaggtgcccgaaggaccgcgcacctggtgcatgacccgcaagcccggtgcctga

SEQ ID NO: 1667 - DNA, 2868 bp, Artificial Sequence
  Synthetic Polynucleotide
atggccttaccagtgaccgccttgctcctgccgctggccttgctgctccacgccgccaggccggacatccagatgacacagagccctagcagcctgtctgccagcgtgggagacagagtgaccatcacatgcaaggccagcgaccacatcaacaactggctggcctggtatcagcagaagcctggacaggcccctaagctgctgatctacggcgctaccacactggaaacaggcgtgcccagcagattttctggcagcggctctggcaccgactacaccctgacaatatccagcctccagcctgaggacttcgccacctactactgtcagcagagctggaacaccccttggacattcggccagggcaccaagctggaaatcaagagactcgagggacagcctaaggccaatcctaccgtgacactgttccctccaagcagcgaagaactccaggccaacaaggccacacttgtgtgcctgatctccgacttctaccctggggctgtgacagtggcttggaaggccgatggatctcctgtgaaagccggcgtggaaaccaccaagccatccaagcagagcaacaacaaatacgccgccagctcctacctgagcctgacacctgagcagtggaagtcccacagatcctacagctgccaagtgacccacgaaggcagcaccgtggaaaagacagtggcccctacagagtgcagcggatccatcggctggctgttgctccaggcccctcggtgggtgttcaaggaggaagaccctattcacctgaggtgtcacagctggaagaacactgctctgcataaggtcacatatttacagaatggcaaaggcaggaagtattttcatcataattctgacttctacattccaaaagccacactcaaagacagcggctcctacttctgcagggggcttgttgggagtaaaaatgtgtcttcagagactgtgaacatcaccatcactcaaggtttggcagtgtcaaccatctcatcattctttccacctggctaccaagtgtccttctgcctggtcatggtgctgctgttcgccgtggataccggcctgtacttcagcgtcaagaccaacatccggtccagcaccagagactggaaggaccacaagttcaagtggcggaaggaccctcaggacaagagggccaagcgatctggatctggagcaacaaacttctcactactcaaacaagcaggtgacgtggaggagaatcccgggcctactagtatggactggatttggcgcatccttttccttgtcggcgctgctaccggcgcgcattccttcgaacaagttcagcttcaacagcctggcgctgagctggtcaaacctggcgcttctgtgaagatgagctgcaaagccagcggctacgccttcagcagctactggatcaactggatgaagcagaaacccggccagggactcgaatggatcggccaaatctatcccggcgacggcgacaccaactacaacggcaagttcaagggcagagccacactgaccgccgatacctctagcagcacagcctacatgcagctgagcagcctgaccagcgaagatagcgccgtgtacttctgtgcccggtccatcacaacagtcgtgggctgcgctatggactattggggccagggaacaagcgtgaccgtgtctagtacgcgtgcctctacaaagggaccctccgtgtttcctctggctcccagcagcaagtctacaagcggaggaacagccgctctgggctgcctggtcaaggattactttcccgagcctgtgaccgtgtcctggaatagcggagcactgacaagcggcgtgcacacctttccagccgtgctgcaaagcagcggcctgtactctctgagcagcgtggtcacagtgcctagctctagcctgggcacccagacctacatctgcaatgtgaaccacaagcctagcaacaccaaggtggacaagagagtggaacccaagagctgtggtaccattacccaaggactggctgtgcctacaatctctagcttctttccgcctggataccaagtctccttctgtcttgtgatggtcctcctgtttgctgtggacacaggactgtacttttccgtgaaaacgaacatccgcagctccacacgcgattggaaagatcacaagtttaaatggcgcaaagatccccaggacaagcgcgccaagagaagcggatctggcgtgaagcagaccctgaatttcgacctgctgaagctggctggcgacgtggaatccaacccaggcccttctagaggcgggatccacaccatggctacctacgaggtgctgtgcgaggtggcaagaaagctgggcaccgacgacagagaagtggtgctgttcctgctgaacgtgttcatccctcagcctacactggcccagctgatcggtgcactgagagccctgaaagaggaaggccggctgacctttcctctgctggccgaatgcctgttcagagccggaagaagggatctgctgcgggacctgctgcatctggaccccagatttctggaaagacacctggccggcaccatgagctacttcagcccttaccagctgaccgtgctgcacgttgacggcgaactgtgcgccagagatattcggagcctgatcttcctgagcaaggacaccatcggcagccggtctacccctcagacatttctgcactgggtgtactgcatggaaaacctggacctgctcggccccacagatgtggatgccctgatgtccatgctgagaagcctgagcagagtggacctccagagacaggtgcagacactgatgggactgcacctgagcggacctagccacagccagcactacagacacacccct

SEQ ID NO: 1668 - DNA, 3027 bp, Artificial Sequence
  Synthetic Polynucleotide
atggccttaccagtgaccgccttgctcctgccgctggccttgctgctccacgccgccaggccggacatccagatgacacagagccctagcagcctgtctgccagcgtgggagacagagtgaccatcacatgcaaggccagcgaccacatcaacaactggctggcctggtatcagcagaagcctggacaggcccctaagctgctgatctacggcgctaccacactggaaacaggcgtgcccagcagattttctggcagcggctctggcaccgactacaccctgacaatatccagcctccagcctgaggacttcgccacctactactgtcagcagagctggaacaccccttggacattcggccagggcaccaagctggaaatcaagagactcgagggacagcctaaggccaatcctaccgtgacactgttccctccaagcagcgaagaactccaggccaacaaggccacacttgtgtgcctgatctccgacttctaccctggggctgtgacagtggcttggaaggccgatggatctcctgtgaaagccggcgtggaaaccaccaagccatccaagcagagcaacaacaaatacgccgccagctcctacctgagcctgacacctgagcagtggaagtcccacagatcctacagctgccaagtgacccacgaaggcagcaccgtggaaaagacagtggcccctacagagtgcagcggatccatcggctggctgttgctccaggcccctcggtgggtgttcaaggaggaagaccctattcacctgaggtgtcacagctggaagaacactgctctgcataaggtcacatatttacagaatggcaaaggcaggaagtattttcatcataattctgacttctacattccaaaagccacactcaaagacagcggctcctacttctgcagggggcttgttgggagtaaaaatgtgtcttcagagactgtgaacatcaccatcactcaaggtttggcagtgtcaaccatctcatcattctttccacctggctaccaagtgtccttctgcctggtcatggtgctgctgttcgccgtggataccggcctgtacttcagcgtcaagaccaacatccggtccagcaccagagactggaaggaccacaagttcaagtggcggaaggaccctcaggacaagagggccaagcgatctggatctggagcaacaaacttctcactactcaaacaagcaggtgacgtggaggagaatcccgggcctactagtatggactggatttggcgcatccttttccttgtcggcgctgctaccggcgcgcattccttcgaacaagttcagcttcaacagcctggcgctgagctggtcaaacctggcgcttctgtgaagatgagctgcaaagccagcggctacgccttcagcagctactggatcaactggatgaagcagaaacccggccagggactcgaatggatcggccaaatctatcccggcgacggcgacaccaactacaacggcaagttcaagggcagagccacactgaccgccgatacctctagcagcacagcctacatgcagctgagcagcctgaccagcgaagatagcgccgtgtacttctgtgcccggtccatcacaacagtcgtgggctgcgctatggactattggggccagggaacaagcgtgaccgtgtctagtacgcgtgcctctacaaagggaccctccgtgtttcctctggctcccagcagcaagtctacaagcggaggaacagccgctctgggctgcctggtcaaggattactttcccgagcctgtgaccgtgtcctggaatagcggagcactgacaagcggcgtgcacacctttccagccgtgctgcaaagcagcggcctgtactctctgagcagcgtggtcacagtgcctagctctagcctgggcacccagacctacatctgcaatgtgaaccacaagcctagcaacaccaaggtggacaagagagtggaacccaagagctgtggtaccattacccaaggactggctgtgcctacaatctctagcttctttccgcctggataccaagtctccttctgtcttgtgatggtcctcctgtttgctgtggacacaggactgtacttttccgtgaaaacgaacatccgcagctccacacgcgattggaaagatcacaagtttaaatggcgcaaagatccccaggacaagcgcgccaagagaagcggatctggcgtgaagcagaccctgaatttcgacctgctgaagctggctggcgacgtggaatccaacccaggcccttctagaggcgggatccacaccatgtccgactccaaggaggtccctagccttccatttttgcgacacttgctcgaagagttggacagccatgaggacagcttgctgctgtttctgtgtcacgacgcggccccgggctgcacgacggtcacgcaagctttgtgctcgcttagccaacagcgcaagctgaccctcgcggctctggtcgagatgctctacgtgctgcagcgtatggatcttctcaagagccgcttcgggctcagcaaggagggggccgagcaattgctgggcacaagctttctcacgcgctaccgcaagctcatggtttgcgtgggtgaggagctcgactcgagcgagctacgcgctctacgcttgttcgcgtgcaacctgaatccgagcctgagcacggcgctttctgagagcagccgctttgtcgagcttgtactcgcgcttgaaaacgtaggactcgtctcgccatcgagtgtttccgtgcttgcggacatgttgcgcactcttcggcgcctcgatttgtgccagcagcttgttgagtacgaacaacaagagcaagccaggtaccgttactgttacgcggcctcgccctcattgccagttcgtacgttacgtcgggggcacggcgcgagtgaacacgagcagctgtgcatgcccgtgcaagaatcctctgacagccccgagctgctgcgcacgcccgtacaagaatcctccagcgacagccccgagcaaacgact

SEQ ID NO: 1669 - DNA, 2895 bp, Artificial Sequence
  Synthetic Polynucleotide
atggccttaccagtgaccgccttgctcctgccgctggccttgctgctccacgccgccaggccggacatccagatgacacagagccctagcagcctgtctgccagcgtgggagacagagtgaccatcacatgcaaggccagcgaccacatcaacaactggctggcctggtatcagcagaagcctggacaggcccctaagctgctgatctacggcgctaccacactggaaacaggcgtgcccagcagattttctggcagcggctctggcaccgactacaccctgacaatatccagcctccagcctgaggacttcgccacctactactgtcagcagagctggaacaccccttggacattcggccagggcaccaagctggaaatcaagagactcgagggacagcctaaggccaatcctaccgtgacactgttccctccaagcagcgaagaactccaggccaacaaggccacacttgtgtgcctgatctccgacttctaccctggggctgtgacagtggcttggaaggccgatggatctcctgtgaaagccggcgtggaaaccaccaagccatccaagcagagcaacaacaaatacgccgccagctcctacctgagcctgacacctgagcagtggaagtcccacagatcctacagctgccaagtgacccacgaaggcagcaccgtggaaaagacagtggcccctacagagtgcagcggatccatcggctggctgttgctccaggcccctcggtgggtgttcaaggaggaagaccctattcacctgaggtgtcacagctggaagaacactgctctgcataaggtcacatatttacagaatggcaaaggcaggaagtattttcatcataattctgacttctacattccaaaagccacactcaaagacagcggctcctacttctgcagggggcttgttgggagtaaaaatgtgtcttcagagactgtgaacatcaccatcactcaaggtttggcagtgtcaaccatctcatcattctttccacctggctaccaagtgtccttctgcctggtcatggtgctgctgttcgccgtggataccggcctgtacttcagcgtcaagaccaacatccggtccagcaccagagactggaaggaccacaagttcaagtggcggaaggaccctcaggacaagagggccaagcgatctggatctggagcaacaaacttctcactactcaaacaagcaggtgacgtggaggagaatcccgggcctactagtatggactggatttggcgcatccttttccttgtcggcgctgctaccggcgcgcattccttcgaacaagttcagcttcaacagcctggcgctgagctggtcaaacctggcgcttctgtgaagatgagctgcaaagccagcggctacgccttcagcagctactggatcaactggatgaagcagaaacccggccagggactcgaatggatcggccaaatctatcccggcgacggcgacaccaactacaacggcaagttcaagggcagagccacactgaccgccgatacctctagcagcacagcctacatgcagctgagcagcctgaccagcgaagatagcgccgtgtacttctgtgcccggtccatcacaacagtcgtgggctgcgctatggactattggggccagggaacaagcgtgaccgtgtctagtacgcgtgcctctacaaagggaccctccgtgtttcctctggctcccagcagcaagtctacaagcggaggaacagccgctctgggctgcctggtcaaggattactttcccgagcctgtgaccgtgtcctggaatagcggagcactgacaagcggcgtgcacacctttccagccgtgctgcaaagcagcggcctgtactctctgagcagcgtggtcacagtgcctagctctagcctgggcacccagacctacatctgcaatgtgaaccacaagcctagcaacaccaaggtggacaagagagtggaacccaagagctgtggtaccattacccaaggactggctgtgcctacaatctctagcttctttccgcctggataccaagtctccttctgtcttgtgatggtcctcctgtttgctgtggacacaggactgtacttttccgtgaaaacgaacatccgcagctccacacgcgattggaaagatcacaagtttaaatggcgcaaagatccccaggacaagcgcgccaagagaagcggatctggcgtgaagcagaccctgaatttcgacctgctgaagctggctggcgacgtggaatccaacccaggcccttctagaggccatatgaccgagtacaagcccacggtgcgcctcgccacccgcgacgacgtccccagggccgtacgcaccctcgccgccgcgttcgccgactaccccgccacgcgccacaccgtcgatccggaccgccacatcgagcgggtcaccgagctgcaagaactcttcctcacgcgcgtcgggctcgacatcggcaaggtgtgggtcgcggacgacggcgccgcggtggcggtctggaccacgccggagagcgtcgaagcgggggcggtgttcgccgagatcggcccgcgcatggccgagttgagcggttcccggctggccgcgcagcaacagatggaaggcctcctggcgccgcaccggcccaaggagcccgcgtggttcctggccaccgtcggcgtctcgcccgaccaccagggcaagggtctgggcagcgccgtcgtgctccccggagtggaggcggccgagcgcgccggggtgcccgccttcctggagacctccgcgccccgcaacctccccttctacgagcggctcggcttcaccgtcaccgccgacgtcgaggtgcccgaaggaccgcgcacctggtgcatgacccgcaagcccggtgcctga

SEQ ID NO: 1670 - DNA, 3306 bp, Artificial Sequence
  Synthetic Polynucleotide
atggccttaccagtgaccgccttgctcctgccgctggccttgctgctccacgccgccaggccggaagtgcagctggttgaatctggcggaggactggttcaggctggcggatctctgagactgtcttgtgccgccagcggcagaacctttagcatgggctggtttagacaggcccctggcaaagagagagagttcgtcgccgccatcacatactctggcggcagcccttactacgccgactctgtgaagggcagattcaccatcagccgggacaacgccaagaacaccgtgtacctccagatgaacagcctgaagcctgaggacaccgccgtgtactactgcgccgccaatccaacatacggcagcgactggaacgccgagaattggggccagggaacccaagtgacagtgtctagcggtaccggcggaggcggatctggcggcggaggtagcggtggcggaggatctgaattcgacatccagatgacacagagccctagcagcctgtctgccagcgtgggagacagagtgaccatcacatgcaaggccagcgaccacatcaacaactggctggcctggtatcagcagaagcctggacaggcccctaagctgctgatctacggcgctaccacactggaaacaggcgtgcccagcagattttctggcagcggctctggcaccgactacaccctgacaatatccagcctccagcctgaggacttcgccacctactactgtcagcagagctggaacaccccttggacattcggccagggcaccaagctggaaatcaagagactcgagggacagcctaaggccaatcctaccgtgacactgttccctccaagcagcgaagaactccaggccaacaaggccacacttgtgtgcctgatctccgacttctaccctggggctgtgacagtggcttggaaggccgatggatctcctgtgaaagccggcgtggaaaccaccaagccatccaagcagagcaacaacaaatacgccgccagctcctacctgagcctgacacctgagcagtggaagtcccacagatcctacagctgccaagtgacccacgaaggcagcaccgtggaaaagacagtggcccctacagagtgcagcggatccatcggctggctgttgctccaggcccctcggtgggtgttcaaggaggaagaccctattcacctgaggtgtcacagctggaagaacactgctctgcataaggtcacatatttacagaatggcaaaggcaggaagtattttcatcataattctgacttctacattccaaaagccacactcaaagacagcggctcctacttctgcagggggcttgttgggagtaaaaatgtgtcttcagagactgtgaacatcaccatcactcaaggtttggcagtgtcaaccatctcatcattctttccacctggctaccaagtgtccttctgcctggtcatggtgctgctgttcgccgtggataccggcctgtacttcagcgtcaagaccaacatccggtccagcaccagagactggaaggaccacaagttcaagtggcggaaggaccctcaggacaagagggccaagcgatctggatctggagcaacaaacttctcactactcaaacaagcaggtgacgtggaggagaatcccgggcctactagtatggactggatttggcgcatccttttccttgtcggcgctgctaccggcgcgcattccttcgaacaagttcagcttcaacagcctggcgctgagctggtcaaacctggcgcttctgtgaagatgagctgcaaagccagcggctacgccttcagcagctactggatcaactggatgaagcagaaacccggccagggactcgaatggatcggccaaatctatcccggcgacggcgacaccaactacaacggcaagttcaagggcagagccacactgaccgccgatacctctagcagcacagcctacatgcagctgagcagcctgaccagcgaagatagcgccgtgtacttctgtgcccggtccatcacaacagtcgtgggctgcgctatggactattggggccagggaacaagcgtgaccgtgtctagtacgcgtgcctctacaaagggaccctccgtgtttcctctggctcccagcagcaagtctacaagcggaggaacagccgctctgggctgcctggtcaaggattactttcccgagcctgtgaccgtgtcctggaatagcggagcactgacaagcggcgtgcacacctttccagccgtgctgcaaagcagcggcctgtactctctgagcagcgtggtcacagtgcctagctctagcctgggcacccagacctacatctgcaatgtgaaccacaagcctagcaacaccaaggtggacaagagagtggaacccaagagctgtggtaccattacccaaggactggctgtgcctacaatctctagcttctttccgcctggataccaagtctccttctgtcttgtgatggtcctcctgtttgctgtggacacaggactgtacttttccgtgaaaacgaacatccgcagctccacacgcgattggaaagatcacaagtttaaatggcgcaaagatccccaggacaagcgcgccaagagaagcggatctggcgtgaagcagaccctgaatttcgacctgctgaagctggctggcgacgtggaatccaacccaggcccttctagaggccatatgaccgagtacaagcccacggtgcgcctcgccacccgcgacgacgtccccagggccgtacgcaccctcgccgccgcgttcgccgactaccccgccacgcgccacaccgtcgatccggaccgccacatcgagcgggtcaccgagctgcaagaactcttcctcacgcgcgtcgggctcgacatcggcaaggtgtgggtcgcggacgacggcgccgcggtggcggtctggaccacgccggagagcgtcgaagcgggggcggtgttcgccgagatcggcccgcgcatggccgagttgagcggttcccggctggccgcgcagcaacagatggaaggcctcctggcgccgcaccggcccaaggagcccgcgtggttcctggccaccgtcggcgtctcgcccgaccaccagggcaagggtctgggcagcgccgtcgtgctccccggagtggaggcggccgagcgcgccggggtgcccgccttcctggagacctccgcgccccgcaacctccccttctacgagcggctcggcttcaccgtcaccgccgacgtcgaggtgcccgaaggaccgcgcacctggtgcatgacccgcaagcccggtgcctga

SEQ ID NO: 1671 - DNA, 3717 bp, Artificial Sequence
  Synthetic Polynucleotide
atggccttaccagtgaccgccttgctcctgccgctggccttgctgctccacgccgccaggccggaagtgcagctggttgaatctggcggaggactggttcaggctggcggatctctgagactgtcttgtgccgccagcggcagaacctttagcatgggctggtttagacaggcccctggcaaagagagagagttcgtcgccgccatcacatactctggcggcagcccttactacgccgactctgtgaagggcagattcaccatcagccgggacaacgccaagaacaccgtgtacctccagatgaacagcctgaagcctgaggacaccgccgtgtactactgcgccgccaatccaacatacggcagcgactggaacgccgagaattggggccagggaacccaagtgacagtgtctagcggtaccggcggaggcggatctggcggcggaggtagcggtggcggaggatctgaattcgacatccagatgacacagagccctagcagcctgtctgccagcgtgggagacagagtgaccatcacatgcaaggccagcgaccacatcaacaactggctggcctggtatcagcagaagcctggacaggcccctaagctgctgatctacggcgctaccacactggaaacaggcgtgcccagcagattttctggcagcggctctggcaccgactacaccctgacaatatccagcctccagcctgaggacttcgccacctactactgtcagcagagctggaacaccccttggacattcggccagggcaccaagctggaaatcaagagactcgagggacagcctaaggccaatcctaccgtgacactgttccctccaagcagcgaagaactccaggccaacaaggccacacttgtgtgcctgatctccgacttctaccctggggctgtgacagtggcttggaaggccgatggatctcctgtgaaagccggcgtggaaaccaccaagccatccaagcagagcaacaacaaatacgccgccagctcctacctgagcctgacacctgagcagtggaagtcccacagatcctacagctgccaagtgacccacgaaggcagcaccgtggaaaagacagtggcccctacagagtgcagcggatccatcggctggctgttgctccaggcccctcggtgggtgttcaaggaggaagaccctattcacctgaggtgtcacagctggaagaacactgctctgcataaggtcacatatttacagaatggcaaaggcaggaagtattttcatcataattctgacttctacattccaaaagccacactcaaagacagcggctcctacttctgcagggggcttgttgggagtaaaaatgtgtcttcagagactgtgaacatcaccatcactcaaggtttggcagtgtcaaccatctcatcattctttccacctggctaccaagtgtccttctgcctggtcatggtgctgctgttcgccgtggataccggcctgtacttcagcgtcaagaccaacatccggtccagcaccagagactggaaggaccacaagttcaagtggcggaaggaccctcaggacaagagggccaagcgatctggatctggagcaacaaacttctcactactcaaacaagcaggtgacgtggaggagaatcccgggcctactagtatggactggatttggcgcatccttttccttgtcggcgctgctaccggcgcgcattccgggcccgaagtgcaactggttgaatccggtggcggcctggtgcaagcaggcggatctctcagacttagctgtgccgcctccggcagaaccttcacaatgggatggtttaggcaggctccagggaaagagagagagttcgtcgccgccatctctctgtctcccacactggcctactacgccgactctgtgaaaggccggttcaccatctccagagataatgccaagaacaccgtggtgctgcaaatgaactctctgaaacccgaggatacagccctgtactattgtgccgctgaccggaagtccgtgatgagcatcagacccgattactggggacagggcacacaagtcacagtgtcctctggatccggcggcggaggatctggcggaggcggatctgggggcggaggctctttcgaacaagttcagcttcaacagcctggcgctgagctggtcaaacctggcgcttctgtgaagatgagctgcaaagccagcggctacgccttcagcagctactggatcaactggatgaagcagaaacccggccagggactcgaatggatcggccaaatctatcccggcgacggcgacaccaactacaacggcaagttcaagggcagagccacactgaccgccgatacctctagcagcacagcctacatgcagctgagcagcctgaccagcgaagatagcgccgtgtacttctgtgcccggtccatcacaacagtcgtgggctgcgctatggactattggggccagggaacaagcgtgaccgtgtctagtacgcgtgcctctacaaagggaccctccgtgtttcctctggctcccagcagcaagtctacaagcggaggaacagccgctctgggctgcctggtcaaggattactttcccgagcctgtgaccgtgtcctggaatagcggagcactgacaagcggcgtgcacacctttccagccgtgctgcaaagcagcggcctgtactctctgagcagcgtggtcacagtgcctagctctagcctgggcacccagacctacatctgcaatgtgaaccacaagcctagcaacaccaaggtggacaagagagtggaacccaagagctgtggtaccattacccaaggactggctgtgcctacaatctctagcttctttccgcctggataccaagtctccttctgtcttgtgatggtcctcctgtttgctgtggacacaggactgtacttttccgtgaaaacgaacatccgcagctccacacgcgattggaaagatcacaagtttaaatggcgcaaagatccccaggacaagcgcgccaagagaagcggatctggcgtgaagcagaccctgaatttcgacctgctgaagctggctggcgacgtggaatccaacccaggcccttctagaggccatatgaccgagtacaagcccacggtgcgcctcgccacccgcgacgacgtccccagggccgtacgcaccctcgccgccgcgttcgccgactaccccgccacgcgccacaccgtcgatccggaccgccacatcgagcgggtcaccgagctgcaagaactcttcctcacgcgcgtcgggctcgacatcggcaaggtgtgggtcgcggacgacggcgccgcggtggcggtctggaccacgccggagagcgtcgaagcgggggcggtgttcgccgagatcggcccgcgcatggccgagttgagcggttcccggctggccgcgcagcaacagatggaaggcctcctggcgccgcaccggcccaaggagcccgcgtggttcctggccaccgtcggcgtctcgcccgaccaccagggcaagggtctgggcagcgccgtcgtgctccccggagtggaggcggccgagcgcgccggggtgcccgccttcctggagacctccgcgccccgcaacctccccttctacgagcggctcggcttcaccgtcaccgccgacgtcgaggtgcccgaaggaccgcgcacctggtgcatgacccgcaagcccggtgcctga

SEQ ID NO: 1672 - DNA, 2916 bp, Artificial Sequence
  Synthetic Polynucleotide
atggccttaccagtgaccgccttgctcctgccgctggccttgctgctccacgccgccaggccggaagtgcagctggttgaatctggcggaggactggttcaggctggcggatctctgagactgtcttgtgccgccagcggcagaacctttagcatgggctggtttagacaggcccctggcaaagagagagagttcgtcgccgccatcacatactctggcggcagcccttactacgccgactctgtgaagggcagattcaccatcagccgggacaacgccaagaacaccgtgtacctccagatgaacagcctgaagcctgaggacaccgccgtgtactactgcgccgccaatccaacatacggcagcgactggaacgccgagaattggggccagggaacccaagtgacagtgtctagcctcgagggacagcctaaggccaatcctaccgtgacactgttccctccaagcagcgaagaactccaggccaacaaggccacacttgtgtgcctgatctccgacttctaccctggggctgtgacagtggcttggaaggccgatggatctcctgtgaaagccggcgtggaaaccaccaagccatccaagcagagcaacaacaaatacgccgccagctcctacctgagcctgacacctgagcagtggaagtcccacagatcctacagctgccaagtgacccacgaaggcagcaccgtggaaaagacagtggcccctacagagtgcagcggatccatcggctggctgttgctccaggcccctcggtgggtgttcaaggaggaagaccctattcacctgaggtgtcacagctggaagaacactgctctgcataaggtcacatatttacagaatggcaaaggcaggaagtattttcatcataattctgacttctacattccaaaagccacactcaaagacagcggctcctacttctgcagggggcttgttgggagtaaaaatgtgtcttcagagactgtgaacatcaccatcactcaaggtttggcagtgtcaaccatctcatcattctttccacctggctaccaagtgtccttctgcctggtcatggtgctgctgttcgccgtggataccggcctgtacttcagcgtcaagaccaacatccggtccagcaccagagactggaaggaccacaagttcaagtggcggaaggaccctcaggacaagagggccaagcgatctggatctggagcaacaaacttctcactactcaaacaagcaggtgacgtggaggagaatcccgggcctactagtatggactggatttggcgcatccttttccttgtcggcgctgctaccggcgcgcattccgggcccgaagtgcaactggttgaatccggtggcggcctggtgcaagcaggcggatctctcagacttagctgtgccgcctccggcagaaccttcacaatgggatggtttaggcaggctccagggaaagagagagagttcgtcgccgccatctctctgtctcccacactggcctactacgccgactctgtgaaaggccggttcaccatctccagagataatgccaagaacaccgtggtgctgcaaatgaactctctgaaacccgaggatacagccctgtactattgtgccgctgaccggaagtccgtgatgagcatcagacccgattactggggacagggcacacaagtcacagtgtcctctacgcgtgcctctacaaagggaccctccgtgtttcctctggctcccagcagcaagtctacaagcggaggaacagccgctctgggctgcctggtcaaggattactttcccgagcctgtgaccgtgtcctggaatagcggagcactgacaagcggcgtgcacacctttccagccgtgctgcaaagcagcggcctgtactctctgagcagcgtggtcacagtgcctagctctagcctgggcacccagacctacatctgcaatgtgaaccacaagcctagcaacaccaaggtggacaagagagtggaacccaagagctgtggtaccattacccaaggactggctgtgcctacaatctctagcttctttccgcctggataccaagtctccttctgtcttgtgatggtcctcctgtttgctgtggacacaggactgtacttttccgtgaaaacgaacatccgcagctccacacgcgattggaaagatcacaagtttaaatggcgcaaagatccccaggacaagcgcgccaagagaagcggatctggcgtgaagcagaccctgaatttcgacctgctgaagctggctggcgacgtggaatccaacccaggcccttctagaggccatatgaccgagtacaagcccacggtgcgcctcgccacccgcgacgacgtccccagggccgtacgcaccctcgccgccgcgttcgccgactaccccgccacgcgccacaccgtcgatccggaccgccacatcgagcgggtcaccgagctgcaagaactcttcctcacgcgcgtcgggctcgacatcggcaaggtgtgggtcgcggacgacggcgccgcggtggcggtctggaccacgccggagagcgtcgaagcgggggcggtgttcgccgagatcggcccgcgcatggccgagttgagcggttcccggctggccgcgcagcaacagatggaaggcctcctggcgccgcaccggcccaaggagcccgcgtggttcctggccaccgtcggcgtctcgcccgaccaccagggcaagggtctgggcagcgccgtcgtgctccccggagtggaggcggccgagcgcgccggggtgcccgccttcctggagacctccgcgccccgcaacctccccttctacgagcggctcggcttcaccgtcaccgccgacgtcgaggtgcccgaaggaccgcgcacctggtgcatgacccgcaagcccggtgcctga

SEQ ID NO: 1673 - DNA, 2940 bp, Artificial Sequence
  Synthetic Polynucleotide
atggccttaccagtgaccgccttgctcctgccgctggccttgctgctccacgccgccaggccggacatccagatgacacagagccctagcagcctgtctgccagcgtgggagacagagtgaccatcacatgcaaggccagcgaccacatcaacaactggctggcctggtatcagcagaagcctggacaggcccctaagctgctgatctacggcgctaccacactggaaacaggcgtgcccagcagattttctggcagcggctctggcaccgactacaccctgacaatatccagcctccagcctgaggacttcgccacctactactgtcagcagagctggaacaccccttggacattcggccagggcaccaagctggaaatcaagagactcgaggacctgaagaacgtgttcccacctgaggtggccgtgttcgagcctagcgaggccgagatcagccacacccagaaagccaccctcgtgtgcctggctaccggcttctaccccgaccatgtggaactgtcttggtgggtcaacggcaaagaggtgcacagcggcgtgtctaccgacccccagccactgaaagaacagcccgccctgaacgacagccggtactgcctgagcagcagactgagagtgtccgccaccttctggcagaacccccggaaccacttcagatgccaggtgcagttctacggcctgagcgagaacgacgagtggacccaggacagagccaagcccgtgacccagatcgtgtctgccgaagcctggggcagagccgattgcggatccatcggctggctgttgctccaggcccctcggtgggtgttcaaggaggaagaccctattcacctgaggtgtcacagctggaagaacactgctctgcataaggtcacatatttacagaatggcaaaggcaggaagtattttcatcataattctgacttctacattccaaaagccacactcaaagacagcggctcctacttctgcagggggcttgttgggagtaaaaatgtgtcttcagagactgtgaacatcaccatcactcaaggtttggcagtgtcaaccatctcatcattctttccacctggctaccaagtgtccttctgcctggtcatggtgctgctgttcgccgtggataccggcctgtacttcagcgtcaagaccaacatccggtccagcaccagagactggaaggaccacaagttcaagtggcggaaggaccctcaggacaagagggccaagcgatctggatctggagcaacaaacttctcactactcaaacaagcaggtgacgtggaggagaatcccgggcctactagtatggactggatttggcgcatccttttccttgtcggcgctgctaccggcgcgcattccttcgaacaagttcagcttcaacagcctggcgctgagctggtcaaacctggcgcttctgtgaagatgagctgcaaagccagcggctacgccttcagcagctactggatcaactggatgaagcagaaacccggccagggactcgaatggatcggccaaatctatcccggcgacggcgacaccaactacaacggcaagttcaagggcagagccacactgaccgccgatacctctagcagcacagcctacatgcagctgagcagcctgaccagcgaagatagcgccgtgtacttctgtgcccggtccatcacaacagtcgtgggctgcgctatggactattggggccagggaacaagcgtgaccgtgtctagtacgcgtatccagaaccctgatcctgccgtgtaccagctgcgggatagcaagagcagcgacaagagcgtgtgtctgttcaccgacttcgacagccagaccaacgtgtcccagagcaaggactccgacgtgtacatcaccgataagaccgtgctggacatgcggagcatggacttcaagagcaactccgccgtggcctggtccaacaagtccgatttcgcctgcgccaacgccttcaacaacagcattatccccgaggacacattcttcccaagccccgagagcagctgcggtaccattacccaaggactggctgtgcctacaatctctagcttctttccgcctggataccaagtctccttctgtcttgtgatggtcctcctgtttgctgtggacacaggactgtacttttccgtgaaaacgaacatccgcagctccacacgcgattggaaagatcacaagtttaaatggcgcaaagatccccaggacaagcgcgccaagagaagcggatctggcgtgaagcagaccctgaatttcgacctgctgaagctggctggcgacgtggaatccaacccaggcccttctagaggccatatgaccgagtacaagcccacggtgcgcctcgccacccgcgacgacgtccccagggccgtacgcaccctcgccgccgcgttcgccgactaccccgccacgcgccacaccgtcgatccggaccgccacatcgagcgggtcaccgagctgcaagaactcttcctcacgcgcgtcgggctcgacatcggcaaggtgtgggtcgcggacgacggcgccgcggtggcggtctggaccacgccggagagcgtcgaagcgggggcggtgttcgccgagatcggcccgcgcatggccgagttgagcggttcccggctggccgcgcagcaacagatggaaggcctcctggcgccgcaccggcccaaggagcccgcgtggttcctggccaccgtcggcgtctcgcccgaccaccagggcaagggtctgggcagcgccgtcgtgctccccggagtggaggcggccgagcgcgccggggtgcccgccttcctggagacctccgcgccccgcaacctccccttctacgagcggctcggcttcaccgtcaccgccgacgtcgaggtgcccgaaggaccgcgcacctggtgcatgacccgcaagcccggtgcctga

SEQ ID NO: 1674 - DNA, 3351 bp, Artificial Sequence
  Synthetic Polynucleotide
atggccttaccagtgaccgccttgctcctgccgctggccttgctgctccacgccgccaggccggaagtgcagctggttgaatctggcggaggactggttcaggctggcggatctctgagactgtcttgtgccgccagcggcagaacctttagcatgggctggtttagacaggcccctggcaaagagagagagttcgtcgccgccatcacatactctggcggcagcccttactacgccgactctgtgaagggcagattcaccatcagccgggacaacgccaagaacaccgtgtacctccagatgaacagcctgaagcctgaggacaccgccgtgtactactgcgccgccaatccaacatacggcagcgactggaacgccgagaattggggccagggaacccaagtgacagtgtctagcggtaccggcggaggcggatctggcggcggaggtagcggtggcggaggatctgaattcgacatccagatgacacagagccctagcagcctgtctgccagcgtgggagacagagtgaccatcacatgcaaggccagcgaccacatcaacaactggctggcctggtatcagcagaagcctggacaggcccctaagctgctgatctacggcgctaccacactggaaacaggcgtgcccagcagattttctggcagcggctctggcaccgactacaccctgacaatatccagcctccagcctgaggacttcgccacctactactgtcagcagagctggaacaccccttggacattcggccagggcaccaagctggaaatcaagagactcgaggacctgaagaacgtgttcccacctgaggtggccgtgttcgagcctagcgaggccgagatcagccacacccagaaagccaccctcgtgtgcctggctaccggcttctaccccgaccatgtggaactgtcttggtgggtcaacggcaaagaggtgcacagcggcgtgtctaccgacccccagccactgaaagaacagcccgccctgaacgacagccggtactgcctgagcagcagactgagagtgtccgccaccttctggcagaacccccggaaccacttcagatgccaggtgcagttctacggcctgagcgagaacgacgagtggacccaggacagagccaagcccgtgacccagatcgtgtctgccgaagcctggggcagagccgattgcggatccatcggctggctgttgctccaggcccctcggtgggtgttcaaggaggaagaccctattcacctgaggtgtcacagctggaagaacactgctctgcataaggtcacatatttacagaatggcaaaggcaggaagtattttcatcataattctgacttctacattccaaaagccacactcaaagacagcggctcctacttctgcagggggcttgttgggagtaaaaatgtgtcttcagagactgtgaacatcaccatcactcaaggtttggcagtgtcaaccatctcatcattctttccacctggctaccaagtgtccttctgcctggtcatggtgctgctgttcgccgtggataccggcctgtacttcagcgtcaagaccaacatccggtccagcaccagagactggaaggaccacaagttcaagtggcggaaggaccctcaggacaagagggccaagcgatctggatctggagcaacaaacttctcactactcaaacaagcaggtgacgtggaggagaatcccgggcctactagtatggactggatttggcgcatccttttccttgtcggcgctgctaccggcgcgcattccttcgaacaagttcagcttcaacagcctggcgctgagctggtcaaacctggcgcttctgtgaagatgagctgcaaagccagcggctacgccttcagcagctactggatcaactggatgaagcagaaacccggccagggactcgaatggatcggccaaatctatcccggcgacggcgacaccaactacaacggcaagttcaagggcagagccacactgaccgccgatacctctagcagcacagcctacatgcagctgagcagcctgaccagcgaagatagcgccgtgtacttctgtgcccggtccatcacaacagtcgtgggctgcgctatggactattggggccagggaacaagcgtgaccgtgtctagtacgcgtatccagaaccctgatcctgccgtgtaccagctgcgggatagcaagagcagcgacaagagcgtgtgtctgttcaccgacttcgacagccagaccaacgtgtcccagagcaaggactccgacgtgtacatcaccgataagaccgtgctggacatgcggagcatggacttcaagagcaactccgccgtggcctggtccaacaagtccgatttcgcctgcgccaacgccttcaacaacagcattatccccgaggacacattcttcccaagccccgagagcagctgcggtaccattacccaaggactggctgtgcctacaatctctagcttctttccgcctggataccaagtctccttctgtcttgtgatggtcctcctgtttgctgtggacacaggactgtacttttccgtgaaaacgaacatccgcagctccacacgcgattggaaagatcacaagtttaaatggcgcaaagatccccaggacaagcgcgccaagagaagcggatctggcgtgaagcagaccctgaatttcgacctgctgaagctggctggcgacgtggaatccaacccaggcccttctagaggccatatgaccgagtacaagcccacggtgcgcctcgccacccgcgacgacgtccccagggccgtacgcaccctcgccgccgcgttcgccgactaccccgccacgcgccacaccgtcgatccggaccgccacatcgagcgggtcaccgagctgcaagaactcttcctcacgcgcgtcgggctcgacatcggcaaggtgtgggtcgcggacgacggcgccgcggtggcggtctggaccacgccggagagcgtcgaagcgggggcggtgttcgccgagatcggcccgcgcatggccgagttgagcggttcccggctggccgcgcagcaacagatggaaggcctcctggcgccgcaccggcccaaggagcccgcgtggttcctggccaccgtcggcgtctcgcccgaccaccagggcaagggtctgggcagcgccgtcgtgctccccggagtggaggcggccgagcgcgccggggtgcccgccttcctggagacctccgcgccccgcaacctccccttctacgagcggctcggcttcaccgtcaccgccgacgtcgaggtgcccgaaggaccgcgcacctggtgcatgacccgcaagcccggtgcctga

SEQ ID NO: 1675 - DNA, 3762 bp, Artificial Sequence
  Synthetic Polynucleotide
atggccttaccagtgaccgccttgctcctgccgctggccttgctgctccacgccgccaggccggaagtgcagctggttgaatctggcggaggactggttcaggctggcggatctctgagactgtcttgtgccgccagcggcagaacctttagcatgggctggtttagacaggcccctggcaaagagagagagttcgtcgccgccatcacatactctggcggcagcccttactacgccgactctgtgaagggcagattcaccatcagccgggacaacgccaagaacaccgtgtacctccagatgaacagcctgaagcctgaggacaccgccgtgtactactgcgccgccaatccaacatacggcagcgactggaacgccgagaattggggccagggaacccaagtgacagtgtctagcggtaccggcggaggcggatctggcggcggaggtagcggtggcggaggatctgaattcgacatccagatgacacagagccctagcagcctgtctgccagcgtgggagacagagtgaccatcacatgcaaggccagcgaccacatcaacaactggctggcctggtatcagcagaagcctggacaggcccctaagctgctgatctacggcgctaccacactggaaacaggcgtgcccagcagattttctggcagcggctctggcaccgactacaccctgacaatatccagcctccagcctgaggacttcgccacctactactgtcagcagagctggaacaccccttggacattcggccagggcaccaagctggaaatcaagagactcgaggacctgaagaacgtgttcccacctgaggtggccgtgttcgagcctagcgaggccgagatcagccacacccagaaagccaccctcgtgtgcctggctaccggcttctaccccgaccatgtggaactgtcttggtgggtcaacggcaaagaggtgcacagcggcgtgtctaccgacccccagccactgaaagaacagcccgccctgaacgacagccggtactgcctgagcagcagactgagagtgtccgccaccttctggcagaacccccggaaccacttcagatgccaggtgcagttctacggcctgagcgagaacgacgagtggacccaggacagagccaagcccgtgacccagatcgtgtctgccgaagcctggggcagagccgattgcggatccatcggctggctgttgctccaggcccctcggtgggtgttcaaggaggaagaccctattcacctgaggtgtcacagctggaagaacactgctctgcataaggtcacatatttacagaatggcaaaggcaggaagtattttcatcataattctgacttctacattccaaaagccacactcaaagacagcggctcctacttctgcagggggcttgttgggagtaaaaatgtgtcttcagagactgtgaacatcaccatcactcaaggtttggcagtgtcaaccatctcatcattctttccacctggctaccaagtgtccttctgcctggtcatggtgctgctgttcgccgtggataccggcctgtacttcagcgtcaagaccaacatccggtccagcaccagagactggaaggaccacaagttcaagtggcggaaggaccctcaggacaagagggccaagcgatctggatctggagcaacaaacttctcactactcaaacaagcaggtgacgtggaggagaatcccgggcctactagtatggactggatttggcgcatccttttccttgtcggcgctgctaccggcgcgcattccgggcccgaagtgcaactggttgaatccggtggcggcctggtgcaagcaggcggatctctcagacttagctgtgccgcctccggcagaaccttcacaatgggatggtttaggcaggctccagggaaagagagagagttcgtcgccgccatctctctgtctcccacactggcctactacgccgactctgtgaaaggccggttcaccatctccagagataatgccaagaacaccgtggtgctgcaaatgaactctctgaaacccgaggatacagccctgtactattgtgccgctgaccggaagtccgtgatgagcatcagacccgattactggggacagggcacacaagtcacagtgtcctctggatccggcggcggaggatctggcggaggcggatctgggggcggaggctctttcgaacaagttcagcttcaacagcctggcgctgagctggtcaaacctggcgcttctgtgaagatgagctgcaaagccagcggctacgccttcagcagctactggatcaactggatgaagcagaaacccggccagggactcgaatggatcggccaaatctatcccggcgacggcgacaccaactacaacggcaagttcaagggcagagccacactgaccgccgatacctctagcagcacagcctacatgcagctgagcagcctgaccagcgaagatagcgccgtgtacttctgtgcccggtccatcacaacagtcgtgggctgcgctatggactattggggccagggaacaagcgtgaccgtgtctagtacgcgtatccagaaccctgatcctgccgtgtaccagctgcgggatagcaagagcagcgacaagagcgtgtgtctgttcaccgacttcgacagccagaccaacgtgtcccagagcaaggactccgacgtgtacatcaccgataagaccgtgctggacatgcggagcatggacttcaagagcaactccgccgtggcctggtccaacaagtccgatttcgcctgcgccaacgccttcaacaacagcattatccccgaggacacattcttcccaagccccgagagcagctgcggtaccattacccaaggactggctgtgcctacaatctctagcttctttccgcctggataccaagtctccttctgtcttgtgatggtcctcctgtttgctgtggacacaggactgtacttttccgtgaaaacgaacatccgcagctccacacgcgattggaaagatcacaagtttaaatggcgcaaagatccccaggacaagcgcgccaagagaagcggatctggcgtgaagcagaccctgaatttcgacctgctgaagctggctggcgacgtggaatccaacccaggcccttctagaggccatatgaccgagtacaagcccacggtgcgcctcgccacccgcgacgacgtccccagggccgtacgcaccctcgccgccgcgttcgccgactaccccgccacgcgccacaccgtcgatccggaccgccacatcgagcgggtcaccgagctgcaagaactcttcctcacgcgcgtcgggctcgacatcggcaaggtgtgggtcgcggacgacggcgccgcggtggcggtctggaccacgccggagagcgtcgaagcgggggcggtgttcgccgagatcggcccgcgcatggccgagttgagcggttcccggctggccgcgcagcaacagatggaaggcctcctggcgccgcaccggcccaaggagcccgcgtggttcctggccaccgtcggcgtctcgcccgaccaccagggcaagggtctgggcagcgccgtcgtgctccccggagtggaggcggccgagcgcgccggggtgcccgccttcctggagacctccgcgccccgcaacctccccttctacgagcggctcggcttcaccgtcaccgccgacgtcgaggtgcccgaaggaccgcgcacctggtgcatgacccgcaagcccggtgcctga

SEQ ID NO: 1676 - DNA, 2961 bp, Artificial Sequence
  Synthetic Polynucleotide
atggccttaccagtgaccgccttgctcctgccgctggccttgctgctccacgccgccaggccggaagtgcagctggttgaatctggcggaggactggttcaggctggcggatctctgagactgtcttgtgccgccagcggcagaacctttagcatgggctggtttagacaggcccctggcaaagagagagagttcgtcgccgccatcacatactctggcggcagcccttactacgccgactctgtgaagggcagattcaccatcagccgggacaacgccaagaacaccgtgtacctccagatgaacagcctgaagcctgaggacaccgccgtgtactactgcgccgccaatccaacatacggcagcgactggaacgccgagaattggggccagggaacccaagtgacagtgtctagcctcgaggacctgaagaacgtgttcccacctgaggtggccgtgttcgagcctagcgaggccgagatcagccacacccagaaagccaccctcgtgtgcctggctaccggcttctaccccgaccatgtggaactgtcttggtgggtcaacggcaaagaggtgcacagcggcgtgtctaccgacccccagccactgaaagaacagcccgccctgaacgacagccggtactgcctgagcagcagactgagagtgtccgccaccttctggcagaacccccggaaccacttcagatgccaggtgcagttctacggcctgagcgagaacgacgagtggacccaggacagagccaagcccgtgacccagatcgtgtctgccgaagcctggggcagagccgattgcggatccatcggctggctgttgctccaggcccctcggtgggtgttcaaggaggaagaccctattcacctgaggtgtcacagctggaagaacactgctctgcataaggtcacatatttacagaatggcaaaggcaggaagtattttcatcataattctgacttctacattccaaaagccacactcaaagacagcggctcctacttctgcagggggcttgttgggagtaaaaatgtgtcttcagagactgtgaacatcaccatcactcaaggtttggcagtgtcaaccatctcatcattctttccacctggctaccaagtgtccttctgcctggtcatggtgctgctgttcgccgtggataccggcctgtacttcagcgtcaagaccaacatccggtccagcaccagagactggaaggaccacaagttcaagtggcggaaggaccctcaggacaagagggccaagcgatctggatctggagcaacaaacttctcactactcaaacaagcaggtgacgtggaggagaatcccgggcctactagtatggactggatttggcgcatccttttccttgtcggcgctgctaccggcgcgcattccgggcccgaagtgcaactggttgaatccggtggcggcctggtgcaagcaggcggatctctcagacttagctgtgccgcctccggcagaaccttcacaatgggatggtttaggcaggctccagggaaagagagagagttcgtcgccgccatctctctgtctcccacactggcctactacgccgactctgtgaaaggccggttcaccatctccagagataatgccaagaacaccgtggtgctgcaaatgaactctctgaaacccgaggatacagccctgtactattgtgccgctgaccggaagtccgtgatgagcatcagacccgattactggggacagggcacacaagtcacagtgtcctctacgcgtatccagaaccctgatcctgccgtgtaccagctgcgggatagcaagagcagcgacaagagcgtgtgtctgttcaccgacttcgacagccagaccaacgtgtcccagagcaaggactccgacgtgtacatcaccgataagaccgtgctggacatgcggagcatggacttcaagagcaactccgccgtggcctggtccaacaagtccgatttcgcctgcgccaacgccttcaacaacagcattatccccgaggacacattcttcccaagccccgagagcagctgcggtaccattacccaaggactggctgtgcctacaatctctagcttctttccgcctggataccaagtctccttctgtcttgtgatggtcctcctgtttgctgtggacacaggactgtacttttccgtgaaaacgaacatccgcagctccacacgcgattggaaagatcacaagtttaaatggcgcaaagatccccaggacaagcgcgccaagagaagcggatctggcgtgaagcagaccctgaatttcgacctgctgaagctggctggcgacgtggaatccaacccaggcccttctagaggccatatgaccgagtacaagcccacggtgcgcctcgccacccgcgacgacgtccccagggccgtacgcaccctcgccgccgcgttcgccgactaccccgccacgcgccacaccgtcgatccggaccgccacatcgagcgggtcaccgagctgcaagaactcttcctcacgcgcgtcgggctcgacatcggcaaggtgtgggtcgcggacgacggcgccgcggtggcggtctggaccacgccggagagcgtcgaagcgggggcggtgttcgccgagatcggcccgcgcatggccgagttgagcggttcccggctggccgcgcagcaacagatggaaggcctcctggcgccgcaccggcccaaggagcccgcgtggttcctggccaccgtcggcgtctcgcccgaccaccagggcaagggtctgggcagcgccgtcgtgctccccggagtggaggcggccgagcgcgccggggtgcccgccttcctggagacctccgcgccccgcaacctccccttctacgagcggctcggcttcaccgtcaccgccgacgtcgaggtgcccgaaggaccgcgcacctggtgcatgacccgcaagcccggtgcctga

SEQ ID NO: 1677 - DNA, 1635 bp, Artificial Sequence; identical to SEQ ID NO: 1664
  Synthetic Polynucleotide

SEQ ID NO: 1678 - DNA, 2004 bp, Artificial Sequence
  Synthetic Polynucleotide
atggccttaccagtgaccgccttgctcctgccgctggccttgctgctccacgccgccaggccggacatccagatgacacagagccctagcagcctgtctgccagcgtgggagacagagtgaccatcacatgcaaggccagcgaccacatcaacaactggctggcctggtatcagcagaagcctggacaggcccctaagctgctgatctacggcgctaccacactggaaacaggcgtgcccagcagattttctggcagcggctctggcaccgactacaccctgacaatatccagcctccagcctgaggacttcgccacctactactgtcagcagagctggaacaccccttggacattcggccagggcaccaagctggaaatcaagagactcgagatcactcaaggtttggcagtgtcaaccatctcatcattctttccacctggctaccaagtgtccttctgcctggtcatggtgctgctgttcgccgtggataccggcctgtacttcagcgtcaagaccaacatccggtccagcaccagagactggaaggaccacaagttcaagtggcggaaggaccctcaggacaagagggccaagcgatctggatctggagcaacaaacttctcactactcaaacaagcaggtgacgtggaggagaatcccgggcctactagtatggactggatttggcgcatccttttccttgtcggcgctgctaccggcgcgcattccttcgaacaagttcagcttcaacagcctggcgctgagctggtcaaacctggcgcttctgtgaagatgagctgcaaagccagcggctacgccttcagcagctactggatcaactggatgaagcagaaacccggccagggactcgaatggatcggccaaatctatcccggcgacggcgacaccaactacaacggcaagttcaagggcagagccacactgaccgccgatacctctagcagcacagcctacatgcagctgagcagcctgaccagcgaagatagcgccgtgtacttctgtgcccggtccatcacaacagtcgtgggctgcgctatggactattggggccagggaacaagcgtgaccgtgtctagtacgcgtattacccaaggactggctgtgcctacaatctctagcttctttccgcctggataccaagtctccttctgtcttgtgatggtcctcctgtttgctgtggacacaggactgtacttttccgtgaaaacgaacatccgcagctccacacgcgattggaaagatcacaagtttaaatggcgcaaagatccccaggacaagcgcgccaagagaagcggatctggcgtgaagcagaccctgaatttcgacctgctgaagctggctggcgacgtggaatccaacccaggcccttctagaggccatatgaccgagtacaagcccacggtgcgcctcgccacccgcgacgacgtccccagggccgtacgcaccctcgccgccgcgttcgccgactaccccgccacgcgccacaccgtcgatccggaccgccacatcgagcgggtcaccgagctgcaagaactcttcctcacgcgcgtcgggctcgacatcggcaaggtgtgggtcgcggacgacggcgccgcggtggcggtctggaccacgccggagagcgtcgaagcgggggcggtgttcgccgagatcggcccgcgcatggccgagttgagcggttcccggctggccgcgcagcaacagatggaaggcctcctggcgccgcaccggcccaaggagcccgcgtggttcctggccaccgtcggcgtctcgcccgaccaccagggcaagggtctgggcagcgccgtcgtgctccccggagtggaggcggccgagcgcgccggggtgcccgccttcctggagacctccgcgccccgcaacctccccttctacgagcggctcggcttcaccgtcaccgccgacgtcgaggtgcccgaaggaccgcgcacctggtgcatgacccgcaagcccggtgcctga

SEQ ID NO: 1679 - DNA, 2166 bp, Artificial Sequence
  Synthetic Polynucleotide
atggccttaccagtgaccgccttgctcctgccgctggccttgctgctccacgccgccaggccggcatgcgaagtgcagctgcttgaaagtggcggcggactgattcagcctggcggatctctgagactgagctgtgccgccagcggcttcaccttttctagccacgccatgacctgggtccgacaggcacctggaaaagggcttgaatgggtgtccgccatcagcggctctggcgattacacacactacgccgacagcgtgaagggcagattcaccatcagcagagacaacagcaagaacaccgtgtacctccagatgaacagcctgagagccgaggacagcgccgtgtattattgcgccaaggatgaggatggcggcagcctgcttggacacagaggacaaggcaccctggtcaccgtttcttccggtaccggcggaggcggatctggcggcggaggtagcggtggcggaggatctgaattcggatctctcgagatcactcaaggtttggcagtgtcaaccatctcatcattctttccacctggctaccaagtgtccttctgcctggtcatggtgctgctgttcgccgtggataccggcctgtacttcagcgtcaagaccaacatccggtccagcaccagagactggaaggaccacaagttcaagtggcggaaggaccctcaggacaagagggccaagcgatctggatctggagcaacaaacttctcactactcaaacaagcaggtgacgtggaggagaatcccgggcctactagtgccaccatggactggatttggcgcatccttttccttgtcggcgctgctaccggcgcccattccgggcccgaagtgcagctggttgaatctggcggaggactggttcaggctggcggatctctgagactgtcttgtgccgccagcggcagaacctttagcatgggctggtttagacaggcccctggcaaagagagagagttcgtcgccgccatcacatactctggcggcagcccttactacgccgactctgtgaagggcagattcaccatcagccgggacaacgccaagaacaccgtgtacctccagatgaacagcctgaagcctgaggacaccgccgtgtactactgcgccgccaatccaacatacggcagcgactggaacgccgagaattggggccagggaacccaagtgacagtgtctagcggatccggcggcggaggatctggcggaggcggatctgggggcggaggctctttcgaaggcagcacgcgtattacccaaggactggctgtgcctacaatctctagcttctttccgcctggataccaagtctccttctgtcttgtgatggtcctcctgtttgctgtggacacaggactgtacttttccgtgaaaacgaacatccgcagctccacacgcgattggaaagatcacaagtttaaatggcgcaaagatccccaggacaagcgcgccaagagaagcggatctggcgtgaagcagaccctgaatttcgacctgctgaagctggctggcgacgtggaatccaacccaggcccttctagaggccatatgaccgagtacaagcccacggtgcgcctcgccacccgcgacgacgtccccagggccgtacgcaccctcgccgccgcgttcgccgactaccccgccacgcgccacaccgtcgatccggaccgccacatcgagcgggtcaccgagctgcaagaactcttcctcacgcgcgtcgggctcgacatcggcaaggtgtgggtcgcggacgacggcgccgcggtggcggtctggaccacgccggagagcgtcgaagcgggggcggtgttcgccgagatcggcccgcgcatggccgagttgagcggttcccggctggccgcgcagcaacagatggaaggcctcctggcgccgcaccggcccaaggagcccgcgtggttcctggccaccgtcggcgtctcgcccgaccaccagggcaagggtctgggcagcgccgtcgtgctccccggagtggaggcggccgagcgcgccggggtgcccgccttcctggagacctccgcgccccgcaacctccccttctacgagcggctcggcttcaccgtcaccgccgacgtcgaggtgcccgaaggaccgcgcacctggtgcatgacccgcaagcccggtgcctga

SEQ ID NO: 1680 - DNA, 2616 bp, Artificial Sequence
  Synthetic Polynucleotide
atggccttaccagtgaccgccttgctcctgccgctggccttgctgctccacgccgccaggccggacatccagatgacacagagccctagcagcctgtctgccagcgtgggagacagagtgaccatcacatgcaaggccagcgaccacatcaacaactggctggcctggtatcagcagaagcctggacaggcccctaagctgctgatctacggcgctaccacactggaaacaggcgtgcccagcagattttctggcagcggctctggcaccgactacaccctgacaatatccagcctccagcctgaggacttcgccacctactactgtcagcagagctggaacaccccttggacattcggccagggcaccaagctggaaatcaagagactcgagggacagcctaaggccaatcctaccgtgacactgttccctccaagcagcgaagaactccaggccaacaaggccacacttgtgtgcctgatctccgacttctaccctggggctgtgacagtggcttggaaggccgatggatctcctgtgaaagccggcgtggaaaccaccaagccatccaagcagagcaacaacaaatacgccgccagctcctacctgagcctgacacctgagcagtggaagtcccacagatcctacagctgccaagtgacccacgaaggcagcaccgtggaaaagacagtggcccctacagagtgcagcggatccatcactcaaggtttggcagtgtcaaccatctcatcattctttccacctggctaccaagtgtccttctgcctggtcatggtgctgctgttcgccgtggataccggcctgtacttcagcgtcaagaccaacatccggtccagcaccagagactggaaggaccacaagttcaagtggcggaaggaccctcaggacaagagggccaagcgatctggatctggagcaacaaacttctcactactcaaacaagcaggtgacgtggaggagaatcccgggcctactagtatggactggatttggcgcatccttttccttgtcggcgctgctaccggcgcgcattccttcgaacaagttcagcttcaacagcctggcgctgagctggtcaaacctggcgcttctgtgaagatgagctgcaaagccagcggctacgccttcagcagctactggatcaactggatgaagcagaaacccggccagggactcgaatggatcggccaaatctatcccggcgacggcgacaccaactacaacggcaagttcaagggcagagccacactgaccgccgatacctctagcagcacagcctacatgcagctgagcagcctgaccagcgaagatagcgccgtgtacttctgtgcccggtccatcacaacagtcgtgggctgcgctatggactattggggccagggaacaagcgtgaccgtgtctagtacgcgtgcctctacaaagggaccctccgtgtttcctctggctcccagcagcaagtctacaagcggaggaacagccgctctgggctgcctggtcaaggattactttcccgagcctgtgaccgtgtcctggaatagcggagcactgacaagcggcgtgcacacctttccagccgtgctgcaaagcagcggcctgtactctctgagcagcgtggtcacagtgcctagctctagcctgggcacccagacctacatctgcaatgtgaaccacaagcctagcaacaccaaggtggacaagagagtggaacccaagagctgtggtaccattacccaaggactggctgtgcctacaatctctagcttctttccgcctggataccaagtctccttctgtcttgtgatggtcctcctgtttgctgtggacacaggactgtacttttccgtgaaaacgaacatccgcagctccacacgcgattggaaagatcacaagtttaaatggcgcaaagatccccaggacaagcgcgccaagagaagcggatctggcgtgaagcagaccctgaatttcgacctgctgaagctggctggcgacgtggaatccaacccaggcccttctagaggcgggatccacaccatggctacctacgaggtgctgtgcgaggtggcaagaaagctgggcaccgacgacagagaagtggtgctgttcctgctgaacgtgttcatccctcagcctacactggcccagctgatcggtgcactgagagccctgaaagaggaaggccggctgacctttcctctgctggccgaatgcctgttcagagccggaagaagggatctgctgcgggacctgctgcatctggaccccagatttctggaaagacacctggccggcaccatgagctacttcagcccttaccagctgaccgtgctgcacgttgacggcgaactgtgcgccagagatattcggagcctgatcttcctgagcaaggacaccatcggcagccggtctacccctcagacatttctgcactgggtgtactgcatggaaaacctggacctgctcggccccacagatgtggatgccctgatgtccatgctgagaagcctgagcagagtggacctccagagacaggtgcagacactgatgggactgcacctgagcggacctagccacagccagcactacagacacacccct

SEQ ID NO: 1681 - DNA, 2775 bp, Artificial Sequence
  Synthetic Polynucleotide
atggccttaccagtgaccgccttgctcctgccgctggccttgctgctccacgccgccaggccggacatccagatgacacagagccctagcagcctgtctgccagcgtgggagacagagtgaccatcacatgcaaggccagcgaccacatcaacaactggctggcctggtatcagcagaagcctggacaggcccctaagctgctgatctacggcgctaccacactggaaacaggcgtgcccagcagattttctggcagcggctctggcaccgactacaccctgacaatatccagcctccagcctgaggacttcgccacctactactgtcagcagagctggaacaccccttggacattcggccagggcaccaagctggaaatcaagagactcgagggacagcctaaggccaatcctaccgtgacactgttccctccaagcagcgaagaactccaggccaacaaggccacacttgtgtgcctgatctccgacttctaccctggggctgtgacagtggcttggaaggccgatggatctcctgtgaaagccggcgtggaaaccaccaagccatccaagcagagcaacaacaaatacgccgccagctcctacctgagcctgacacctgagcagtggaagtcccacagatcctacagctgccaagtgacccacgaaggcagcaccgtggaaaagacagtggcccctacagagtgcagcggatccatcactcaaggtttggcagtgtcaaccatctcatcattctttccacctggctaccaagtgtccttctgcctggtcatggtgctgctgttcgccgtggataccggcctgtacttcagcgtcaagaccaacatccggtccagcaccagagactggaaggaccacaagttcaagtggcggaaggaccctcaggacaagagggccaagcgatctggatctggagcaacaaacttctcactactcaaacaagcaggtgacgtggaggagaatcccgggcctactagtatggactggatttggcgcatccttttccttgtcggcgctgctaccggcgcgcattccttcgaacaagttcagcttcaacagcctggcgctgagctggtcaaacctggcgcttctgtgaagatgagctgcaaagccagcggctacgccttcagcagctactggatcaactggatgaagcagaaacccggccagggactcgaatggatcggccaaatctatcccggcgacggcgacaccaactacaacggcaagttcaagggcagagccacactgaccgccgatacctctagcagcacagcctacatgcagctgagcagcctgaccagcgaagatagcgccgtgtacttctgtgcccggtccatcacaacagtcgtgggctgcgctatggactattggggccagggaacaagcgtgaccgtgtctagtacgcgtgcctctacaaagggaccctccgtgtttcctctggctcccagcagcaagtctacaagcggaggaacagccgctctgggctgcctggtcaaggattactttcccgagcctgtgaccgtgtcctggaatagcggagcactgacaagcggcgtgcacacctttccagccgtgctgcaaagcagcggcctgtactctctgagcagcgtggtcacagtgcctagctctagcctgggcacccagacctacatctgcaatgtgaaccacaagcctagcaacaccaaggtggacaagagagtggaacccaagagctgtggtaccattacccaaggactggctgtgcctacaatctctagcttctttccgcctggataccaagtctccttctgtcttgtgatggtcctcctgtttgctgtggacacaggactgtacttttccgtgaaaacgaacatccgcagctccacacgcgattggaaagatcacaagtttaaatggcgcaaagatccccaggacaagcgcgccaagagaagcggatctggcgtgaagcagaccctgaatttcgacctgctgaagctggctggcgacgtggaatccaacccaggcccttctagaggcgggatccacaccatgtccgactccaaggaggtccctagccttccatttttgcgacacttgctcgaagagttggacagccatgaggacagcttgctgctgtttctgtgtcacgacgcggccccgggctgcacgacggtcacgcaagctttgtgctcgcttagccaacagcgcaagctgaccctcgcggctctggtcgagatgctctacgtgctgcagcgtatggatcttctcaagagccgcttcgggctcagcaaggagggggccgagcaattgctgggcacaagctttctcacgcgctaccgcaagctcatggtttgcgtgggtgaggagctcgactcgagcgagctacgcgctctacgcttgttcgcgtgcaacctgaatccgagcctgagcacggcgctttctgagagcagccgctttgtcgagcttgtactcgcgcttgaaaacgtaggactcgtctcgccatcgagtgtttccgtgcttgcggacatgttgcgcactcttcggcgcctcgatttgtgccagcagcttgttgagtacgaacaacaagagcaagccaggtaccgttactgttacgcggcctcgccctcattgccagttcgtacgttacgtcgggggcacggcgcgagtgaacacgagcagctgtgcatgcccgtgcaagaatcctctgacagccccgagctgctgcgcacgcccgtacaagaatcctccagcgacagccccgagcaaacgact

SEQ ID NO: 1682 - DNA, 2643 bp, Artificial Sequence
  Synthetic Polynucleotide
atggccttaccagtgaccgccttgctcctgccgctggccttgctgctccacgccgccaggccggacatccagatgacacagagccctagcagcctgtctgccagcgtgggagacagagtgaccatcacatgcaaggccagcgaccacatcaacaactggctggcctggtatcagcagaagcctggacaggcccctaagctgctgatctacggcgctaccacactggaaacaggcgtgcccagcagattttctggcagcggctctggcaccgactacaccctgacaatatccagcctccagcctgaggacttcgccacctactactgtcagcagagctggaacaccccttggacattcggccagggcaccaagctggaaatcaagagactcgagggacagcctaaggccaatcctaccgtgacactgttccctccaagcagcgaagaactccaggccaacaaggccacacttgtgtgcctgatctccgacttctaccctggggctgtgacagtggcttggaaggccgatggatctcctgtgaaagccggcgtggaaaccaccaagccatccaagcagagcaacaacaaatacgccgccagctcctacctgagcctgacacctgagcagtggaagtcccacagatcctacagctgccaagtgacccacgaaggcagcaccgtggaaaagacagtggcccctacagagtgcagcggatccatcactcaaggtttggcagtgtcaaccatctcatcattctttccacctggctaccaagtgtccttctgcctggtcatggtgctgctgttcgccgtggataccggcctgtacttcagcgtcaagaccaacatccggtccagcaccagagactggaaggaccacaagttcaagtggcggaaggaccctcaggacaagagggccaagcgatctggatctggagcaacaaacttctcactactcaaacaagcaggtgacgtggaggagaatcccgggcctactagtatggactggatttggcgcatccttttccttgtcggcgctgctaccggcgcgcattccttcgaacaagttcagcttcaacagcctggcgctgagctggtcaaacctggcgcttctgtgaagatgagctgcaaagccagcggctacgccttcagcagctactggatcaactggatgaagcagaaacccggccagggactcgaatggatcggccaaatctatcccggcgacggcgacaccaactacaacggcaagttcaagggcagagccacactgaccgccgatacctctagcagcacagcctacatgcagctgagcagcctgaccagcgaagatagcgccgtgtacttctgtgcccggtccatcacaacagtcgtgggctgcgctatggactattggggccagggaacaagcgtgaccgtgtctagtacgcgtgcctctacaaagggaccctccgtgtttcctctggctcccagcagcaagtctacaagcggaggaacagccgctctgggctgcctggtcaaggattactttcccgagcctgtgaccgtgtcctggaatagcggagcactgacaagcggcgtgcacacctttccagccgtgctgcaaagcagcggcctgtactctctgagcagcgtggtcacagtgcctagctctagcctgggcacccagacctacatctgcaatgtgaaccacaagcctagcaacaccaaggtggacaagagagtggaacccaagagctgtggtaccattacccaaggactggctgtgcctacaatctctagcttctttccgcctggataccaagtctccttctgtcttgtgatggtcctcctgtttgctgtggacacaggactgtacttttccgtgaaaacgaacatccgcagctccacacgcgattggaaagatcacaagtttaaatggcgcaaagatccccaggacaagcgcgccaagagaagcggatctggcgtgaagcagaccctgaatttcgacctgctgaagctggctggcgacgtggaatccaacccaggcccttctagaggccatatgaccgagtacaagcccacggtgcgcctcgccacccgcgacgacgtccccagggccgtacgcaccctcgccgccgcgttcgccgactaccccgccacgcgccacaccgtcgatccggaccgccacatcgagcgggtcaccgagctgcaagaactcttcctcacgcgcgtcgggctcgacatcggcaaggtgtgggtcgcggacgacggcgccgcggtggcggtctggaccacgccggagagcgtcgaagcgggggcggtgttcgccgagatcggcccgcgcatggccgagttgagcggttcccggctggccgcgcagcaacagatggaaggcctcctggcgccgcaccggcccaaggagcccgcgtggttcctggccaccgtcggcgtctcgcccgaccaccagggcaagggtctgggcagcgccgtcgtgctccccggagtggaggcggccgagcgcgccggggtgcccgccttcctggagacctccgcgccccgcaacctccccttctacgagcggctcggcttcaccgtcaccgccgacgtcgaggtgcccgaaggaccgcgcacctggtgcatgacccgcaagcccggtgcctga

SEQ ID NO: 1683 - DNA, 3054 bp, Artificial Sequence
  Synthetic Polynucleotide
atggccttaccagtgaccgccttgctcctgccgctggccttgctgctccacgccgccaggccggaagtgcagctggttgaatctggcggaggactggttcaggctggcggatctctgagactgtcttgtgccgccagcggcagaacctttagcatgggctggtttagacaggcccctggcaaagagagagagttcgtcgccgccatcacatactctggcggcagcccttactacgccgactctgtgaagggcagattcaccatcagccgggacaacgccaagaacaccgtgtacctccagatgaacagcctgaagcctgaggacaccgccgtgtactactgcgccgccaatccaacatacggcagcgactggaacgccgagaattggggccagggaacccaagtgacagtgtctagcggtaccggcggaggcggatctggcggcggaggtagcggtggcggaggatctgaattcgacatccagatgacacagagccctagcagcctgtctgccagcgtgggagacagagtgaccatcacatgcaaggccagcgaccacatcaacaactggctggcctggtatcagcagaagcctggacaggcccctaagctgctgatctacggcgctaccacactggaaacaggcgtgcccagcagattttctggcagcggctctggcaccgactacaccctgacaatatccagcctccagcctgaggacttcgccacctactactgtcagcagagctggaacaccccttggacattcggccagggcaccaagctggaaatcaagagactcgagggacagcctaaggccaatcctaccgtgacactgttccctccaagcagcgaagaactccaggccaacaaggccacacttgtgtgcctgatctccgacttctaccctggggctgtgacagtggcttggaaggccgatggatctcctgtgaaagccggcgtggaaaccaccaagccatccaagcagagcaacaacaaatacgccgccagctcctacctgagcctgacacctgagcagtggaagtcccacagatcctacagctgccaagtgacccacgaaggcagcaccgtggaaaagacagtggcccctacagagtgcagcggatccatcactcaaggtttggcagtgtcaaccatctcatcattctttccacctggctaccaagtgtccttctgcctggtcatggtgctgctgttcgccgtggataccggcctgtacttcagcgtcaagaccaacatccggtccagcaccagagactggaaggaccacaagttcaagtggcggaaggaccctcaggacaagagggccaagcgatctggatctggagcaacaaacttctcactactcaaacaagcaggtgacgtggaggagaatcccgggcctactagtatggactggatttggcgcatccttttccttgtcggcgctgctaccggcgcgcattccttcgaacaagttcagcttcaacagcctggcgctgagctggtcaaacctggcgcttctgtgaagatgagctgcaaagccagcggctacgccttcagcagctactggatcaactggatgaagcagaaacccggccagggactcgaatggatcggccaaatctatcccggcgacggcgacaccaactacaacggcaagttcaagggcagagccacactgaccgccgatacctctagcagcacagcctacatgcagctgagcagcctgaccagcgaagatagcgccgtgtacttctgtgcccggtccatcacaacagtcgtgggctgcgctatggactattggggccagggaacaagcgtgaccgtgtctagtacgcgtgcctctacaaagggaccctccgtgtttcctctggctcccagcagcaagtctacaagcggaggaacagccgctctgggctgcctggtcaaggattactttcccgagcctgtgaccgtgtcctggaatagcggagcactgacaagcggcgtgcacacctttccagccgtgctgcaaagcagcggcctgtactctctgagcagcgtggtcacagtgcctagctctagcctgggcacccagacctacatctgcaatgtgaaccacaagcctagcaacaccaaggtggacaagagagtggaacccaagagctgtggtaccattacccaaggactggctgtgcctacaatctctagcttctttccgcctggataccaagtctccttctgtcttgtgatggtcctcctgtttgctgtggacacaggactgtacttttccgtgaaaacgaacatccgcagctccacacgcgattggaaagatcacaagtttaaatggcgcaaagatccccaggacaagcgcgccaagagaagcggatctggcgtgaagcagaccctgaatttcgacctgctgaagctggctggcgacgtggaatccaacccaggcccttctagaggccatatgaccgagtacaagcccacggtgcgcctcgccacccgcgacgacgtccccagggccgtacgcaccctcgccgccgcgttcgccgactaccccgccacgcgccacaccgtcgatccggaccgccacatcgagcgggtcaccgagctgcaagaactcttcctcacgcgcgtcgggctcgacatcggcaaggtgtgggtcgcggacgacggcgccgcggtggcggtctggaccacgccggagagcgtcgaagcgggggcggtgttcgccgagatcggcccgcgcatggccgagttgagcggttcccggctggccgcgcagcaacagatggaaggcctcctggcgccgcaccggcccaaggagcccgcgtggttcctggccaccgtcggcgtctcgcccgaccaccagggcaagggtctgggcagcgccgtcgtgctccccggagtggaggcggccgagcgcgccggggtgcccgccttcctggagacctccgcgccccgcaacctccccttctacgagcggctcggcttcaccgtcaccgccgacgtcgaggtgcccgaaggaccgcgcacctggtgcatgacccgcaagcccggtgcctga

SEQ ID NO: 1684 - DNA, 3465 bp, Artificial Sequence
  Synthetic Polynucleotide
atggccttaccagtgaccgccttgctcctgccgctggccttgctgctccacgccgccaggccggaagtgcagctggttgaatctggcggaggactggttcaggctggcggatctctgagactgtcttgtgccgccagcggcagaacctttagcatgggctggtttagacaggcccctggcaaagagagagagttcgtcgccgccatcacatactctggcggcagcccttactacgccgactctgtgaagggcagattcaccatcagccgggacaacgccaagaacaccgtgtacctccagatgaacagcctgaagcctgaggacaccgccgtgtactactgcgccgccaatccaacatacggcagcgactggaacgccgagaattggggccagggaacccaagtgacagtgtctagcggtaccggcggaggcggatctggcggcggaggtagcggtggcggaggatctgaattcgacatccagatgacacagagccctagcagcctgtctgccagcgtgggagacagagtgaccatcacatgcaaggccagcgaccacatcaacaactggctggcctggtatcagcagaagcctggacaggcccctaagctgctgatctacggcgctaccacactggaaacaggcgtgcccagcagattttctggcagcggctctggcaccgactacaccctgacaatatccagcctccagcctgaggacttcgccacctactactgtcagcagagctggaacaccccttggacattcggccagggcaccaagctggaaatcaagagactcgagggacagcctaaggccaatcctaccgtgacactgttccctccaagcagcgaagaactccaggccaacaaggccacacttgtgtgcctgatctccgacttctaccctggggctgtgacagtggcttggaaggccgatggatctcctgtgaaagccggcgtggaaaccaccaagccatccaagcagagcaacaacaaatacgccgccagctcctacctgagcctgacacctgagcagtggaagtcccacagatcctacagctgccaagtgacccacgaaggcagcaccgtggaaaagacagtggcccctacagagtgcagcggatccatcactcaaggtttggcagtgtcaaccatctcatcattctttccacctggctaccaagtgtccttctgcctggtcatggtgctgctgttcgccgtggataccggcctgtacttcagcgtcaagaccaacatccggtccagcaccagagactggaaggaccacaagttcaagtggcggaaggaccctcaggacaagagggccaagcgatctggatctggagcaacaaacttctcactactcaaacaagcaggtgacgtggaggagaatcccgggcctactagtatggactggatttggcgcatccttttccttgtcggcgctgctaccggcgcgcattccgggcccgaagtgcaactggttgaatccggtggcggcctggtgcaagcaggcggatctctcagacttagctgtgccgcctccggcagaaccttcacaatgggatggtttaggcaggctccagggaaagagagagagttcgtcgccgccatctctctgtctcccacactggcctactacgccgactctgtgaaaggccggttcaccatctccagagataatgccaagaacaccgtggtgctgcaaatgaactctctgaaacccgaggatacagccctgtactattgtgccgctgaccggaagtccgtgatgagcatcagacccgattactggggacagggcacacaagtcacagtgtcctctggatccggcggcggaggatctggcggaggcggatctgggggcggaggctctttcgaacaagttcagcttcaacagcctggcgctgagctggtcaaacctggcgcttctgtgaagatgagctgcaaagccagcggctacgccttcagcagctactggatcaactggatgaagcagaaacccggccagggactcgaatggatcggccaaatctatcccggcgacggcgacaccaactacaacggcaagttcaagggcagagccacactgaccgccgatacctctagcagcacagcctacatgcagctgagcagcctgaccagcgaagatagcgccgtgtacttctgtgcccggtccatcacaacagtcgtgggctgcgctatggactattggggccagggaacaagcgtgaccgtgtctagtacgcgtgcctctacaaagggaccctccgtgtttcctctggctcccagcagcaagtctacaagcggaggaacagccgctctgggctgcctggtcaaggattactttcccgagcctgtgaccgtgtcctggaatagcggagcactgacaagcggcgtgcacacctttccagccgtgctgcaaagcagcggcctgtactctctgagcagcgtggtcacagtgcctagctctagcctgggcacccagacctacatctgcaatgtgaaccacaagcctagcaacaccaaggtggacaagagagtggaacccaagagctgtggtaccattacccaaggactggctgtgcctacaatctctagcttctttccgcctggataccaagtctccttctgtcttgtgatggtcctcctgtttgctgtggacacaggactgtacttttccgtgaaaacgaacatccgcagctccacacgcgattggaaagatcacaagtttaaatggcgcaaagatccccaggacaagcgcgccaagagaagcggatctggcgtgaagcagaccctgaatttcgacctgctgaagctggctggcgacgtggaatccaacccaggcccttctagaggccatatgaccgagtacaagcccacggtgcgcctcgccacccgcgacgacgtccccagggccgtacgcaccctcgccgccgcgttcgccgactaccccgccacgcgccacaccgtcgatccggaccgccacatcgagcgggtcaccgagctgcaagaactcttcctcacgcgcgtcgggctcgacatcggcaaggtgtgggtcgcggacgacggcgccgcggtggcggtctggaccacgccggagagcgtcgaagcgggggcggtgttcgccgagatcggcccgcgcatggccgagttgagcggttcccggctggccgcgcagcaacagatggaaggcctcctggcgccgcaccggcccaaggagcccgcgtggttcctggccaccgtcggcgtctcgcccgaccaccagggcaagggtctgggcagcgccgtcgtgctccccggagtggaggcggccgagcgcgccggggtgcccgccttcctggagacctccgcgccccgcaacctccccttctacgagcggctcggcttcaccgtcaccgccgacgtcgaggtgcccgaaggaccgcgcacctggtgcatgacccgcaagcccggtgcctga

SEQ ID NO: 1685 - DNA, 2664 bp, Artificial Sequence
  Synthetic Polynucleotide
atggccttaccagtgaccgccttgctcctgccgctggccttgctgctccacgccgccaggccggaagtgcagctggttgaatctggcggaggactggttcaggctggcggatctctgagactgtcttgtgccgccagcggcagaacctttagcatgggctggtttagacaggcccctggcaaagagagagagttcgtcgccgccatcacatactctggcggcagcccttactacgccgactctgtgaagggcagattcaccatcagccgggacaacgccaagaacaccgtgtacctccagatgaacagcctgaagcctgaggacaccgccgtgtactactgcgccgccaatccaacatacggcagcgactggaacgccgagaattggggccagggaacccaagtgacagtgtctagcctcgagggacagcctaaggccaatcctaccgtgacactgttccctccaagcagcgaagaactccaggccaacaaggccacacttgtgtgcctgatctccgacttctaccctggggctgtgacagtggcttggaaggccgatggatctcctgtgaaagccggcgtggaaaccaccaagccatccaagcagagcaacaacaaatacgccgccagctcctacctgagcctgacacctgagcagtggaagtcccacagatcctacagctgccaagtgacccacgaaggcagcaccgtggaaaagacagtggcccctacagagtgcagcggatccatcactcaaggtttggcagtgtcaaccatctcatcattctttccacctggctaccaagtgtccttctgcctggtcatggtgctgctgttcgccgtggataccggcctgtacttcagcgtcaagaccaacatccggtccagcaccagagactggaaggaccacaagttcaagtggcggaaggaccctcaggacaagagggccaagcgatctggatctggagcaacaaacttctcactactcaaacaagcaggtgacgtggaggagaatcccgggcctactagtatggactggatttggcgcatccttttccttgtcggcgctgctaccggcgcgcattccgggcccgaagtgcaactggttgaatccggtggcggcctggtgcaagcaggcggatctctcagacttagctgtgccgcctccggcagaaccttcacaatgggatggtttaggcaggctccagggaaagagagagagttcgtcgccgccatctctctgtctcccacactggcctactacgccgactctgtgaaaggccggttcaccatctccagagataatgccaagaacaccgtggtgctgcaaatgaactctctgaaacccgaggatacagccctgtactattgtgccgctgaccggaagtccgtgatgagcatcagacccgattactggggacagggcacacaagtcacagtgtcctctacgcgtgcctctacaaagggaccctccgtgtttcctctggctcccagcagcaagtctacaagcggaggaacagccgctctgggctgcctggtcaaggattactttcccgagcctgtgaccgtgtcctggaatagcggagcactgacaagcggcgtgcacacctttccagccgtgctgcaaagcagcggcctgtactctctgagcagcgtggtcacagtgcctagctctagcctgggcacccagacctacatctgcaatgtgaaccacaagcctagcaacaccaaggtggacaagagagtggaacccaagagctgtggtaccattacccaaggactggctgtgcctacaatctctagcttctttccgcctggataccaagtctccttctgtcttgtgatggtcctcctgtttgctgtggacacaggactgtacttttccgtgaaaacgaacatccgcagctccacacgcgattggaaagatcacaagtttaaatggcgcaaagatccccaggacaagcgcgccaagagaagcggatctggcgtgaagcagaccctgaatttcgacctgctgaagctggctggcgacgtggaatccaacccaggcccttctagaggccatatgaccgagtacaagcccacggtgcgcctcgccacccgcgacgacgtccccagggccgtacgcaccctcgccgccgcgttcgccgactaccccgccacgcgccacaccgtcgatccggaccgccacatcgagcgggtcaccgagctgcaagaactcttcctcacgcgcgtcgggctcgacatcggcaaggtgtgggtcgcggacgacggcgccgcggtggcggtctggaccacgccggagagcgtcgaagcgggggcggtgttcgccgagatcggcccgcgcatggccgagttgagcggttcccggctggccgcgcagcaacagatggaaggcctcctggcgccgcaccggcccaaggagcccgcgtggttcctggccaccgtcggcgtctcgcccgaccaccagggcaagggtctgggcagcgccgtcgtgctccccggagtggaggcggccgagcgcgccggggtgcccgccttcctggagacctccgcgccccgcaacctccccttctacgagcggctcggcttcaccgtcaccgccgacgtcgaggtgcccgaaggaccgcgcacctggtgcatgacccgcaagcccggtgcctga

SEQ ID NO: 1686 - DNA, 2688 bp, Artificial Sequence
  Synthetic Polynucleotide
atggccttaccagtgaccgccttgctcctgccgctggccttgctgctccacgccgccaggccggacatccagatgacacagagccctagcagcctgtctgccagcgtgggagacagagtgaccatcacatgcaaggccagcgaccacatcaacaactggctggcctggtatcagcagaagcctggacaggcccctaagctgctgatctacggcgctaccacactggaaacaggcgtgcccagcagattttctggcagcggctctggcaccgactacaccctgacaatatccagcctccagcctgaggacttcgccacctactactgtcagcagagctggaacaccccttggacattcggccagggcaccaagctggaaatcaagagactcgaggacctgaagaacgtgttcccacctgaggtggccgtgttcgagcctagcgaggccgagatcagccacacccagaaagccaccctcgtgtgcctggctaccggcttctaccccgaccatgtggaactgtcttggtgggtcaacggcaaagaggtgcacagcggcgtgtctaccgacccccagccactgaaagaacagcccgccctgaacgacagccggtactgcctgagcagcagactgagagtgtccgccaccttctggcagaacccccggaaccacttcagatgccaggtgcagttctacggcctgagcgagaacgacgagtggacccaggacagagccaagcccgtgacccagatcgtgtctgccgaagcctggggcagagccgattgcggatccatcactcaaggtttggcagtgtcaaccatctcatcattctttccacctggctaccaagtgtccttctgcctggtcatggtgctgctgttcgccgtggataccggcctgtacttcagcgtcaagaccaacatccggtccagcaccagagactggaaggaccacaagttcaagtggcggaaggaccctcaggacaagagggccaagcgatctggatctggagcaacaaacttctcactactcaaacaagcaggtgacgtggaggagaatcccgggcctactagtatggactggatttggcgcatccttttccttgtcggcgctgctaccggcgcgcattccttcgaacaagttcagcttcaacagcctggcgctgagctggtcaaacctggcgcttctgtgaagatgagctgcaaagccagcggctacgccttcagcagctactggatcaactggatgaagcagaaacccggccagggactcgaatggatcggccaaatctatcccggcgacggcgacaccaactacaacggcaagttcaagggcagagccacactgaccgccgatacctctagcagcacagcctacatgcagctgagcagcctgaccagcgaagatagcgccgtgtacttctgtgcccggtccatcacaacagtcgtgggctgcgctatggactattggggccagggaacaagcgtgaccgtgtctagtacgcgtatccagaaccctgatcctgccgtgtaccagctgcgggatagcaagagcagcgacaagagcgtgtgtctgttcaccgacttcgacagccagaccaacgtgtcccagagcaaggactccgacgtgtacatcaccgataagaccgtgctggacatgcggagcatggacttcaagagcaactccgccgtggcctggtccaacaagtccgatttcgcctgcgccaacgccttcaacaacagcattatccccgaggacacattcttcccaagccccgagagcagctgcggtaccattacccaaggactggctgtgcctacaatctctagcttctttccgcctggataccaagtctccttctgtcttgtgatggtcctcctgtttgctgtggacacaggactgtacttttccgtgaaaacgaacatccgcagctccacacgcgattggaaagatcacaagtttaaatggcgcaaagatccccaggacaagcgcgccaagagaagcggatctggcgtgaagcagaccctgaatttcgacctgctgaagctggctggcgacgtggaatccaacccaggcccttctagaggccatatgaccgagtacaagcccacggtgcgcctcgccacccgcgacgacgtccccagggccgtacgcaccctcgccgccgcgttcgccgactaccccgccacgcgccacaccgtcgatccggaccgccacatcgagcgggtcaccgagctgcaagaactcttcctcacgcgcgtcgggctcgacatcggcaaggtgtgggtcgcggacgacggcgccgcggtggcggtctggaccacgccggagagcgtcgaagcgggggcggtgttcgccgagatcggcccgcgcatggccgagttgagcggttcccggctggccgcgcagcaacagatggaaggcctcctggcgccgcaccggcccaaggagcccgcgtggttcctggccaccgtcggcgtctcgcccgaccaccagggcaagggtctgggcagcgccgtcgtgctccccggagtggaggcggccgagcgcgccggggtgcccgccttcctggagacctccgcgccccgcaacctccccttctacgagcggctcggcttcaccgtcaccgccgacgtcgaggtgcccgaaggaccgcgcacctggtgcatgacccgcaagcccggtgcctga

SEQ ID NO: 1687 - DNA, 3099 bp, Artificial Sequence
  Synthetic Polynucleotide
atggccttaccagtgaccgccttgctcctgccgctggccttgctgctccacgccgccaggccggaagtgcagctggttgaatctggcggaggactggttcaggctggcggatctctgagactgtcttgtgccgccagcggcagaacctttagcatgggctggtttagacaggcccctggcaaagagagagagttcgtcgccgccatcacatactctggcggcagcccttactacgccgactctgtgaagggcagattcaccatcagccgggacaacgccaagaacaccgtgtacctccagatgaacagcctgaagcctgaggacaccgccgtgtactactgcgccgccaatccaacatacggcagcgactggaacgccgagaattggggccagggaacccaagtgacagtgtctagcggtaccggcggaggcggatctggcggcggaggtagcggtggcggaggatctgaattcgacatccagatgacacagagccctagcagcctgtctgccagcgtgggagacagagtgaccatcacatgcaaggccagcgaccacatcaacaactggctggcctggtatcagcagaagcctggacaggcccctaagctgctgatctacggcgctaccacactggaaacaggcgtgcccagcagattttctggcagcggctctggcaccgactacaccctgacaatatccagcctccagcctgaggacttcgccacctactactgtcagcagagctggaacaccccttggacattcggccagggcaccaagctggaaatcaagagactcgaggacctgaagaacgtgttcccacctgaggtggccgtgttcgagcctagcgaggccgagatcagccacacccagaaagccaccctcgtgtgcctggctaccggcttctaccccgaccatgtggaactgtcttggtgggtcaacggcaaagaggtgcacagcggcgtgtctaccgacccccagccactgaaagaacagcccgccctgaacgacagccggtactgcctgagcagcagactgagagtgtccgccaccttctggcagaacccccggaaccacttcagatgccaggtgcagttctacggcctgagcgagaacgacgagtggacccaggacagagccaagcccgtgacccagatcgtgtctgccgaagcctggggcagagccgattgcggatccatcactcaaggtttggcagtgtcaaccatctcatcattctttccacctggctaccaagtgtccttctgcctggtcatggtgctgctgttcgccgtggataccggcctgtacttcagcgtcaagaccaacatccggtccagcaccagagactggaaggaccacaagttcaagtggcggaaggaccctcaggacaagagggccaagcgatctggatctggagcaacaaacttctcactactcaaacaagcaggtgacgtggaggagaatcccgggcctactagtatggactggatttggcgcatccttttccttgtcggcgctgctaccggcgcgcattccttcgaacaagttcagcttcaacagcctggcgctgagctggtcaaacctggcgcttctgtgaagatgagctgcaaagccagcggctacgccttcagcagctactggatcaactggatgaagcagaaacccggccagggactcgaatggatcggccaaatctatcccggcgacggcgacaccaactacaacggcaagttcaagggcagagccacactgaccgccgatacctctagcagcacagcctacatgcagctgagcagcctgaccagcgaagatagcgccgtgtacttctgtgcccggtccatcacaacagtcgtgggctgcgctatggactattggggccagggaacaagcgtgaccgtgtctagtacgcgtatccagaaccctgatcctgccgtgtaccagctgcgggatagcaagagcagcgacaagagcgtgtgtctgttcaccgacttcgacagccagaccaacgtgtcccagagcaaggactccgacgtgtacatcaccgataagaccgtgctggacatgcggagcatggacttcaagagcaactccgccgtggcctggtccaacaagtccgatttcgcctgcgccaacgccttcaacaacagcattatccccgaggacacattcttcccaagccccgagagcagctgcggtaccattacccaaggactggctgtgcctacaatctctagcttctttccgcctggataccaagtctccttctgtcttgtgatggtcctcctgtttgctgtggacacaggactgtacttttccgtgaaaacgaacatccgcagctccacacgcgattggaaagatcacaagtttaaatggcgcaaagatccccaggacaagcgcgccaagagaagcggatctggcgtgaagcagaccctgaatttcgacctgctgaagctggctggcgacgtggaatccaacccaggcccttctagaggccatatgaccgagtacaagcccacggtgcgcctcgccacccgcgacgacgtccccagggccgtacgcaccctcgccgccgcgttcgccgactaccccgccacgcgccacaccgtcgatccggaccgccacatcgagcgggtcaccgagctgcaagaactcttcctcacgcgcgtcgggctcgacatcggcaaggtgtgggtcgcggacgacggcgccgcggtggcggtctggaccacgccggagagcgtcgaagcgggggcggtgttcgccgagatcggcccgcgcatggccgagttgagcggttcccggctggccgcgcagcaacagatggaaggcctcctggcgccgcaccggcccaaggagcccgcgtggttcctggccaccgtcggcgtctcgcccgaccaccagggcaagggtctgggcagcgccgtcgtgctccccggagtggaggcggccgagcgcgccggggtgcccgccttcctggagacctccgcgccccgcaacctccccttctacgagcggctcggcttcaccgtcaccgccgacgtcgaggtgcccgaaggaccgcgcacctggtgcatgacccgcaagcccggtgcctga

SEQ ID NO: 1688 - DNA, 3510 bp, Artificial Sequence
  Synthetic Polynucleotide
atggccttaccagtgaccgccttgctcctgccgctggccttgctgctccacgccgccaggccggaagtgcagctggttgaatctggcggaggactggttcaggctggcggatctctgagactgtcttgtgccgccagcggcagaacctttagcatgggctggtttagacaggcccctggcaaagagagagagttcgtcgccgccatcacatactctggcggcagcccttactacgccgactctgtgaagggcagattcaccatcagccgggacaacgccaagaacaccgtgtacctccagatgaacagcctgaagcctgaggacaccgccgtgtactactgcgccgccaatccaacatacggcagcgactggaacgccgagaattggggccagggaacccaagtgacagtgtctagcggtaccggcggaggcggatctggcggcggaggtagcggtggcggaggatctgaattcgacatccagatgacacagagccctagcagcctgtctgccagcgtgggagacagagtgaccatcacatgcaaggccagcgaccacatcaacaactggctggcctggtatcagcagaagcctggacaggcccctaagctgctgatctacggcgctaccacactggaaacaggcgtgcccagcagattttctggcagcggctctggcaccgactacaccctgacaatatccagcctccagcctgaggacttcgccacctactactgtcagcagagctggaacaccccttggacattcggccagggcaccaagctggaaatcaagagactcgaggacctgaagaacgtgttcccacctgaggtggccgtgttcgagcctagcgaggccgagatcagccacacccagaaagccaccctcgtgtgcctggctaccggcttctaccccgaccatgtggaactgtcttggtgggtcaacggcaaagaggtgcacagcggcgtgtctaccgacccccagccactgaaagaacagcccgccctgaacgacagccggtactgcctgagcagcagactgagagtgtccgccaccttctggcagaacccccggaaccacttcagatgccaggtgcagttctacggcctgagcgagaacgacgagtggacccaggacagagccaagcccgtgacccagatcgtgtctgccgaagcctggggcagagccgattgcggatccatcactcaaggtttggcagtgtcaaccatctcatcattctttccacctggctaccaagtgtccttctgcctggtcatggtgctgctgttcgccgtggataccggcctgtacttcagcgtcaagaccaacatccggtccagcaccagagactggaaggaccacaagttcaagtggcggaaggaccctcaggacaagagggccaagcgatctggatctggagcaacaaacttctcactactcaaacaagcaggtgacgtggaggagaatcccgggcctactagtatggactggatttggcgcatccttttccttgtcggcgctgctaccggcgcgcattccgggcccgaagtgcaactggttgaatccggtggcggcctggtgcaagcaggcggatctctcagacttagctgtgccgcctccggcagaaccttcacaatgggatggtttaggcaggctccagggaaagagagagagttcgtcgccgccatctctctgtctcccacactggcctactacgccgactctgtgaaaggccggttcaccatctccagagataatgccaagaacaccgtggtgctgcaaatgaactctctgaaacccgaggatacagccctgtactattgtgccgctgaccggaagtccgtgatgagcatcagacccgattactggggacagggcacacaagtcacagtgtcctctggatccggcggcggaggatctggcggaggcggatctgggggcggaggctctttcgaacaagttcagcttcaacagcctggcgctgagctggtcaaacctggcgcttctgtgaagatgagctgcaaagccagcggctacgccttcagcagctactggatcaactggatgaagcagaaacccggccagggactcgaatggatcggccaaatctatcccggcgacggcgacaccaactacaacggcaagttcaagggcagagccacactgaccgccgatacctctagcagcacagcctacatgcagctgagcagcctgaccagcgaagatagcgccgtgtacttctgtgcccggtccatcacaacagtcgtgggctgcgctatggactattggggccagggaacaagcgtgaccgtgtctagtacgcgtatccagaaccctgatcctgccgtgtaccagctgcgggatagcaagagcagcgacaagagcgtgtgtctgttcaccgacttcgacagccagaccaacgtgtcccagagcaaggactccgacgtgtacatcaccgataagaccgtgctggacatgcggagcatggacttcaagagcaactccgccgtggcctggtccaacaagtccgatttcgcctgcgccaacgccttcaacaacagcattatccccgaggacacattcttcccaagccccgagagcagctgcggtaccattacccaaggactggctgtgcctacaatctctagcttctttccgcctggataccaagtctccttctgtcttgtgatggtcctcctgtttgctgtggacacaggactgtacttttccgtgaaaacgaacatccgcagctccacacgcgattggaaagatcacaagtttaaatggcgcaaagatccccaggacaagcgcgccaagagaagcggatctggcgtgaagcagaccctgaatttcgacctgctgaagctggctggcgacgtggaatccaacccaggcccttctagaggccatatgaccgagtacaagcccacggtgcgcctcgccacccgcgacgacgtccccagggccgtacgcaccctcgccgccgcgttcgccgactaccccgccacgcgccacaccgtcgatccggaccgccacatcgagcgggtcaccgagctgcaagaactcttcctcacgcgcgtcgggctcgacatcggcaaggtgtgggtcgcggacgacggcgccgcggtggcggtctggaccacgccggagagcgtcgaagcgggggcggtgttcgccgagatcggcccgcgcatggccgagttgagcggttcccggctggccgcgcagcaacagatggaaggcctcctggcgccgcaccggcccaaggagcccgcgtggttcctggccaccgtcggcgtctcgcccgaccaccagggcaagggtctgggcagcgccgtcgtgctccccggagtggaggcggccgagcgcgccggggtgcccgccttcctggagacctccgcgccccgcaacctccccttctacgagcggctcggcttcaccgtcaccgccgacgtcgaggtgcccgaaggaccgcgcacctggtgcatgacccgcaagcccggtgcctga

SEQ ID NO: 1689 - DNA, 2709 bp, Artificial Sequence
  Synthetic Polynucleotide
atggccttaccagtgaccgccttgctcctgccgctggccttgctgctccacgccgccaggccggaagtgcagctggttgaatctggcggaggactggttcaggctggcggatctctgagactgtcttgtgccgccagcggcagaacctttagcatgggctggtttagacaggcccctggcaaagagagagagttcgtcgccgccatcacatactctggcggcagcccttactacgccgactctgtgaagggcagattcaccatcagccgggacaacgccaagaacaccgtgtacctccagatgaacagcctgaagcctgaggacaccgccgtgtactactgcgccgccaatccaacatacggcagcgactggaacgccgagaattggggccagggaacccaagtgacagtgtctagcctcgaggacctgaagaacgtgttcccacctgaggtggccgtgttcgagcctagcgaggccgagatcagccacacccagaaagccaccctcgtgtgcctggctaccggcttctaccccgaccatgtggaactgtcttggtgggtcaacggcaaagaggtgcacagcggcgtgtctaccgacccccagccactgaaagaacagcccgccctgaacgacagccggtactgcctgagcagcagactgagagtgtccgccaccttctggcagaacccccggaaccacttcagatgccaggtgcagttctacggcctgagcgagaacgacgagtggacccaggacagagccaagcccgtgacccagatcgtgtctgccgaagcctggggcagagccgattgcggatccatcactcaaggtttggcagtgtcaaccatctcatcattctttccacctggctaccaagtgtccttctgcctggtcatggtgctgctgttcgccgtggataccggcctgtacttcagcgtcaagaccaacatccggtccagcaccagagactggaaggaccacaagttcaagtggcggaaggaccctcaggacaagagggccaagcgatctggatctggagcaacaaacttctcactactcaaacaagcaggtgacgtggaggagaatcccgggcctactagtatggactggatttggcgcatccttttccttgtcggcgctgctaccggcgcgcattccgggcccgaagtgcaactggttgaatccggtggcggcctggtgcaagcaggcggatctctcagacttagctgtgccgcctccggcagaaccttcacaatgggatggtttaggcaggctccagggaaagagagagagttcgtcgccgccatctctctgtctcccacactggcctactacgccgactctgtgaaaggccggttcaccatctccagagataatgccaagaacaccgtggtgctgcaaatgaactctctgaaacccgaggatacagccctgtactattgtgccgctgaccggaagtccgtgatgagcatcagacccgattactggggacagggcacacaagtcacagtgtcctctacgcgtatccagaaccctgatcctgccgtgtaccagctgcgggatagcaagagcagcgacaagagcgtgtgtctgttcaccgacttcgacagccagaccaacgtgtcccagagcaaggactccgacgtgtacatcaccgataagaccgtgctggacatgcggagcatggacttcaagagcaactccgccgtggcctggtccaacaagtccgatttcgcctgcgccaacgccttcaacaacagcattatccccgaggacacattcttcccaagccccgagagcagctgcggtaccattacccaaggactggctgtgcctacaatctctagcttctttccgcctggataccaagtctccttctgtcttgtgatggtcctcctgtttgctgtggacacaggactgtacttttccgtgaaaacgaacatccgcagctccacacgcgattggaaagatcacaagtttaaatggcgcaaagatccccaggacaagcgcgccaagagaagcggatctggcgtgaagcagaccctgaatttcgacctgctgaagctggctggcgacgtggaatccaacccaggcccttctagaggccatatgaccgagtacaagcccacggtgcgcctcgccacccgcgacgacgtccccagggccgtacgcaccctcgccgccgcgttcgccgactaccccgccacgcgccacaccgtcgatccggaccgccacatcgagcgggtcaccgagctgcaagaactcttcctcacgcgcgtcgggctcgacatcggcaaggtgtgggtcgcggacgacggcgccgcggtggcggtctggaccacgccggagagcgtcgaagcgggggcggtgttcgccgagatcggcccgcgcatggccgagttgagcggttcccggctggccgcgcagcaacagatggaaggcctcctggcgccgcaccggcccaaggagcccgcgtggttcctggccaccgtcggcgtctcgcccgaccaccagggcaagggtctgggcagcgccgtcgtgctccccggagtggaggcggccgagcgcgccggggtgcccgccttcctggagacctccgcgccccgcaacctccccttctacgagcggctcggcttcaccgtcaccgccgacgtcgaggtgcccgaaggaccgcgcacctggtgcatgacccgcaagcccggtgcctga

SEQ ID NO: 1690 - DNA, 1383 bp, Artificial Sequence
  Synthetic Polynucleotide
atggccttaccagtgaccgccttgctcctgccgctggccttgctgctccacgccgccaggccggcatgcgaagtgcagctgcttgaaagtggcggcggactgattcagcctggcggatctctgagactgagctgtgccgccagcggcttcaccttttctagccacgccatgacctgggtccgacaggcacctggaaaagggcttgaatgggtgtccgccatcagcggctctggcgattacacacactacgccgacagcgtgaagggcagattcaccatcagcagagacaacagcaagaacaccgtgtacctccagatgaacagcctgagagccgaggacagcgccgtgtattattgcgccaaggatgaggatggcggcagcctgcttggacacagaggacaaggcaccctggtcaccgtttcttccggtaccggcggaggcggatctggcggcggaggtagcggtggcggaggatctgaattcggatctctcgagatcactcaaggtttggcagtgtcaaccatctcatcattctttccacctggctaccaagtgtccttctgcctggtcatggtgctgctgttcgccgtggataccggcctgtacttcagcgtcaagaccaacatccggtccagcaccagagactggaaggaccacaagttcaagtggcggaaggaccctcaggacaagagggccaagcgatctggatctggagcaacaaacttctcactactcaaacaagcaggtgacgtggaggagaatcccgggcctactagaggccatatgaccgagtacaagcccacggtgcgcctcgccacccgcgacgacgtccccagggccgtacgcaccctcgccgccgcgttcgccgactaccccgccacgcgccacaccgtcgatccggaccgccacatcgagcgggtcaccgagctgcaagaactcttcctcacgcgcgtcgggctcgacatcggcaaggtgtgggtcgcggacgacggcgccgcggtggcggtctggaccacgccggagagcgtcgaagcgggggcggtgttcgccgagatcggcccgcgcatggccgagttgagcggttcccggctggccgcgcagcaacagatggaaggcctcctggcgccgcaccggcccaaggagcccgcgtggttcctggccaccgtcggcgtctcgcccgaccaccagggcaagggtctgggcagcgccgtcgtgctccccggagtggaggcggccgagcgcgccggggtgcccgccttcctggagacctccgcgccccgcaacctccccttctacgagcggctcggcttcaccgtcaccgccgacgtcgaggtgcccgaaggaccgcgcacctggtgcatgacccgcaagcccggtgcctga

SEQ ID NO: 1691 - DNA, 2286 bp, Artificial Sequence
  Synthetic Polynucleotide
atggccttaccagtgaccgccttgctcctgccgctggccttgctgctccacgccgccaggccggacatccagatgacacagagccctagcagcctgtctgccagcgtgggagacagagtgaccatcacatgcaaggccagcgaccacatcaacaactggctggcctggtatcagcagaagcctggacaggcccctaagctgctgatctacggcgctaccacactggaaacaggcgtgcccagcagattttctggcagcggctctggcaccgactacaccctgacaatatccagcctccagcctgaggacttcgccacctactactgtcagcagagctggaacaccccttggacattcggccagggcaccaagctggaaatcaagagactcgagatcggctggctgttgctccaggcccctcggtgggtgttcaaggaggaagaccctattcacctgaggtgtcacagctggaagaacactgctctgcataaggtcacatatttacagaatggcaaaggcaggaagtattttcatcataattctgacttctacattccaaaagccacactcaaagacagcggctcctacttctgcagggggcttgttgggagtaaaaatgtgtcttcagagactgtgaacatcaccatcactcaaggtttggcagtgtcaaccatctcatcattctttccacctggctaccaagtgtccttctgcctggtcatggtgctgctgttcgccgtggataccggcctgtacttcagcgtcaagaccaacatccggtccagcaccagagactggaaggaccacaagttcaagtggcggaaggaccctcaggacaagagggccaagcgatctggatctggagcaacaaacttctcactactcaaacaagcaggtgacgtggaggagaatcccgggcctactagtatggactggatttggcgcatccttttccttgtcggcgctgctaccggcgcgcattccttcgaacaagttcagcttcaacagcctggcgctgagctggtcaaacctggcgcttctgtgaagatgagctgcaaagccagcggctacgccttcagcagctactggatcaactggatgaagcagaaacccggccagggactcgaatggatcggccaaatctatcccggcgacggcgacaccaactacaacggcaagttcaagggcagagccacactgaccgccgatacctctagcagcacagcctacatgcagctgagcagcctgaccagcgaagatagcgccgtgtacttctgtgcccggtccatcacaacagtcgtgggctgcgctatggactattggggccagggaacaagcgtgaccgtgtctagtacgcgtgtcgagaaagaacatccacagcttggcgctggcaccgtcctgttgcttagagccggattctatgccgtcagcttcctgtccgtggctgtggggtctacagtgtattaccagggaaaatgtctcacctggaaaggccccagacgccagcttccagctgttgttcctgctccactgccaccaccttgtggctcctctgctcacttgcttccaccagtgcctggcggacgcgccaagagaagcggatctggcgtgaagcagaccctgaatttcgacctgctgaagctggctggcgacgtggaatccaacccaggcccttctagaggccatatgaccgagtacaagcccacggtgcgcctcgccacccgcgacgacgtccccagggccgtacgcaccctcgccgccgcgttcgccgactaccccgccacgcgccacaccgtcgatccggaccgccacatcgagcgggtcaccgagctgcaagaactcttcctcacgcgcgtcgggctcgacatcggcaaggtgtgggtcgcggacgacggcgccgcggtggcggtctggaccacgccggagagcgtcgaagcgggggcggtgttcgccgagatcggcccgcgcatggccgagttgagcggttcccggctggccgcgcagcaacagatggaaggcctcctggcgccgcaccggcccaaggagcccgcgtggttcctggccaccgtcggcgtctcgcccgaccaccagggcaagggtctgggcagcgccgtcgtgctccccggagtggaggcggccgagcgcgccggggtgcccgccttcctggagacctccgcgccccgcaacctccccttctacgagcggctcggcttcaccgtcaccgccgacgtcgaggtgcccgaaggaccgcgcacctggtgcatgacccgcaagcccggtgcctga

SEQ ID NO: 1692 - DNA, 2448 bp, Artificial Sequence
  Synthetic Polynucleotide
atggccttaccagtgaccgccttgctcctgccgctggccttgctgctccacgccgccaggccggcatgcgaagtgcagctgcttgaaagtggcggcggactgattcagcctggcggatctctgagactgagctgtgccgccagcggcttcaccttttctagccacgccatgacctgggtccgacaggcacctggaaaagggcttgaatgggtgtccgccatcagcggctctggcgattacacacactacgccgacagcgtgaagggcagattcaccatcagcagagacaacagcaagaacaccgtgtacctccagatgaacagcctgagagccgaggacagcgccgtgtattattgcgccaaggatgaggatggcggcagcctgcttggacacagaggacaaggcaccctggtcaccgtttcttccggtaccggcggaggcggatctggcggcggaggtagcggtggcggaggatctgaattcggatctctcgagatcggctggctgttgctccaggcccctcggtgggtgttcaaggaggaagaccctattcacctgaggtgtcacagctggaagaacactgctctgcataaggtcacatatttacagaatggcaaaggcaggaagtattttcatcataattctgacttctacattccaaaagccacactcaaagacagcggctcctacttctgcagggggcttgttgggagtaaaaatgtgtcttcagagactgtgaacatcaccatcactcaaggtttggcagtgtcaaccatctcatcattctttccacctggctaccaagtgtccttctgcctggtcatggtgctgctgttcgccgtggataccggcctgtacttcagcgtcaagaccaacatccggtccagcaccagagactggaaggaccacaagttcaagtggcggaaggaccctcaggacaagagggccaagcgatctggatctggagcaacaaacttctcactactcaaacaagcaggtgacgtggaggagaatcccgggcctactagtgccaccatggactggatttggcgcatccttttccttgtcggcgctgctaccggcgcccattccgggcccgaagtgcagctggttgaatctggcggaggactggttcaggctggcggatctctgagactgtcttgtgccgccagcggcagaacctttagcatgggctggtttagacaggcccctggcaaagagagagagttcgtcgccgccatcacatactctggcggcagcccttactacgccgactctgtgaagggcagattcaccatcagccgggacaacgccaagaacaccgtgtacctccagatgaacagcctgaagcctgaggacaccgccgtgtactactgcgccgccaatccaacatacggcagcgactggaacgccgagaattggggccagggaacccaagtgacagtgtctagcggatccggcggcggaggatctggcggaggcggatctgggggcggaggctctttcgaaggcagcacgcgtgtcgagaaagaacatccacagcttggcgctggcaccgtcctgttgcttagagccggattctatgccgtcagcttcctgtccgtggctgtggggtctacagtgtattaccagggaaaatgtctcacctggaaaggccccagacgccagcttccagctgttgttcctgctccactgccaccaccttgtggctcctctgctcacttgcttccaccagtgcctggcggacgcgccaagagaagcggatctggcgtgaagcagaccctgaatttcgacctgctgaagctggctggcgacgtggaatccaacccaggcccttctagaggccatatgaccgagtacaagcccacggtgcgcctcgccacccgcgacgacgtccccagggccgtacgcaccctcgccgccgcgttcgccgactaccccgccacgcgccacaccgtcgatccggaccgccacatcgagcgggtcaccgagctgcaagaactcttcctcacgcgcgtcgggctcgacatcggcaaggtgtgggtcgcggacgacggcgccgcggtggcggtctggaccacgccggagagcgtcgaagcgggggcggtgttcgccgagatcggcccgcgcatggccgagttgagcggttcccggctggccgcgcagcaacagatggaaggcctcctggcgccgcaccggcccaaggagcccgcgtggttcctggccaccgtcggcgtctcgcccgaccaccagggcaagggtctgggcagcgccgtcgtgctccccggagtggaggcggccgagcgcgccggggtgcccgccttcctggagacctccgcgccccgcaacctccccttctacgagcggctcggcttcaccgtcaccgccgacgtcgaggtgcccgaaggaccgcgcacctggtgcatgacccgcaagcccggtgcctga

SEQ ID NO: 1693 - DNA, 2898 bp, Artificial Sequence
  Synthetic Polynucleotide
atggccttaccagtgaccgccttgctcctgccgctggccttgctgctccacgccgccaggccggacatccagatgacacagagccctagcagcctgtctgccagcgtgggagacagagtgaccatcacatgcaaggccagcgaccacatcaacaactggctggcctggtatcagcagaagcctggacaggcccctaagctgctgatctacggcgctaccacactggaaacaggcgtgcccagcagattttctggcagcggctctggcaccgactacaccctgacaatatccagcctccagcctgaggacttcgccacctactactgtcagcagagctggaacaccccttggacattcggccagggcaccaagctggaaatcaagagactcgagggacagcctaaggccaatcctaccgtgacactgttccctccaagcagcgaagaactccaggccaacaaggccacacttgtgtgcctgatctccgacttctaccctggggctgtgacagtggcttggaaggccgatggatctcctgtgaaagccggcgtggaaaccaccaagccatccaagcagagcaacaacaaatacgccgccagctcctacctgagcctgacacctgagcagtggaagtcccacagatcctacagctgccaagtgacccacgaaggcagcaccgtggaaaagacagtggcccctacagagtgcagcggatccatcggctggctgttgctccaggcccctcggtgggtgttcaaggaggaagaccctattcacctgaggtgtcacagctggaagaacactgctctgcataaggtcacatatttacagaatggcaaaggcaggaagtattttcatcataattctgacttctacattccaaaagccacactcaaagacagcggctcctacttctgcagggggcttgttgggagtaaaaatgtgtcttcagagactgtgaacatcaccatcactcaaggtttggcagtgtcaaccatctcatcattctttccacctggctaccaagtgtccttctgcctggtcatggtgctgctgttcgccgtggataccggcctgtacttcagcgtcaagaccaacatccggtccagcaccagagactggaaggaccacaagttcaagtggcggaaggaccctcaggacaagagggccaagcgatctggatctggagcaacaaacttctcactactcaaacaagcaggtgacgtggaggagaatcccgggcctactagtatggactggatttggcgcatccttttccttgtcggcgctgctaccggcgcgcattccttcgaacaagttcagcttcaacagcctggcgctgagctggtcaaacctggcgcttctgtgaagatgagctgcaaagccagcggctacgccttcagcagctactggatcaactggatgaagcagaaacccggccagggactcgaatggatcggccaaatctatcccggcgacggcgacaccaactacaacggcaagttcaagggcagagccacactgaccgccgatacctctagcagcacagcctacatgcagctgagcagcctgaccagcgaagatagcgccgtgtacttctgtgcccggtccatcacaacagtcgtgggctgcgctatggactattggggccagggaacaagcgtgaccgtgtctagtacgcgtgcctctacaaagggaccctccgtgtttcctctggctcccagcagcaagtctacaagcggaggaacagccgctctgggctgcctggtcaaggattactttcccgagcctgtgaccgtgtcctggaatagcggagcactgacaagcggcgtgcacacctttccagccgtgctgcaaagcagcggcctgtactctctgagcagcgtggtcacagtgcctagctctagcctgggcacccagacctacatctgcaatgtgaaccacaagcctagcaacaccaaggtggacaagagagtggaacccaagagctgtggtaccgtcgagaaagaacatccacagcttggcgctggcaccgtcctgttgcttagagccggattctatgccgtcagcttcctgtccgtggctgtggggtctacagtgtattaccagggaaaatgtctcacctggaaaggccccagacgccagcttccagctgttgttcctgctccactgccaccaccttgtggctcctctgctcacttgcttccaccagtgcctggcggacgcgccaagagaagcggatctggcgtgaagcagaccctgaatttcgacctgctgaagctggctggcgacgtggaatccaacccaggcccttctagaggcgggatccacaccatggctacctacgaggtgctgtgcgaggtggcaagaaagctgggcaccgacgacagagaagtggtgctgttcctgctgaacgtgttcatccctcagcctacactggcccagctgatcggtgcactgagagccctgaaagaggaaggccggctgacctttcctctgctggccgaatgcctgttcagagccggaagaagggatctgctgcgggacctgctgcatctggaccccagatttctggaaagacacctggccggcaccatgagctacttcagcccttaccagctgaccgtgctgcacgttgacggcgaactgtgcgccagagatattcggagcctgatcttcctgagcaaggacaccatcggcagccggtctacccctcagacatttctgcactgggtgtactgcatggaaaacctggacctgctcggccccacagatgtggatgccctgatgtccatgctgagaagcctgagcagagtggacctccagagacaggtgcagacactgatgggactgcacctgagcggacctagccacagccagcactacagacacacccct

SEQ ID NO: 1694 - DNA, 3057 bp, Artificial Sequence
  Synthetic Polynucleotide
atggccttaccagtgaccgccttgctcctgccgctggccttgctgctccacgccgccaggccggacatccagatgacacagagccctagcagcctgtctgccagcgtgggagacagagtgaccatcacatgcaaggccagcgaccacatcaacaactggctggcctggtatcagcagaagcctggacaggcccctaagctgctgatctacggcgctaccacactggaaacaggcgtgcccagcagattttctggcagcggctctggcaccgactacaccctgacaatatccagcctccagcctgaggacttcgccacctactactgtcagcagagctggaacaccccttggacattcggccagggcaccaagctggaaatcaagagactcgagggacagcctaaggccaatcctaccgtgacactgttccctccaagcagcgaagaactccaggccaacaaggccacacttgtgtgcctgatctccgacttctaccctggggctgtgacagtggcttggaaggccgatggatctcctgtgaaagccggcgtggaaaccaccaagccatccaagcagagcaacaacaaatacgccgccagctcctacctgagcctgacacctgagcagtggaagtcccacagatcctacagctgccaagtgacccacgaaggcagcaccgtggaaaagacagtggcccctacagagtgcagcggatccatcggctggctgttgctccaggcccctcggtgggtgttcaaggaggaagaccctattcacctgaggtgtcacagctggaagaacactgctctgcataaggtcacatatttacagaatggcaaaggcaggaagtattttcatcataattctgacttctacattccaaaagccacactcaaagacagcggctcctacttctgcagggggcttgttgggagtaaaaatgtgtcttcagagactgtgaacatcaccatcactcaaggtttggcagtgtcaaccatctcatcattctttccacctggctaccaagtgtccttctgcctggtcatggtgctgctgttcgccgtggataccggcctgtacttcagcgtcaagaccaacatccggtccagcaccagagactggaaggaccacaagttcaagtggcggaaggaccctcaggacaagagggccaagcgatctggatctggagcaacaaacttctcactactcaaacaagcaggtgacgtggaggagaatcccgggcctactagtatggactggatttggcgcatccttttccttgtcggcgctgctaccggcgcgcattccttcgaacaagttcagcttcaacagcctggcgctgagctggtcaaacctggcgcttctgtgaagatgagctgcaaagccagcggctacgccttcagcagctactggatcaactggatgaagcagaaacccggccagggactcgaatggatcggccaaatctatcccggcgacggcgacaccaactacaacggcaagttcaagggcagagccacactgaccgccgatacctctagcagcacagcctacatgcagctgagcagcctgaccagcgaagatagcgccgtgtacttctgtgcccggtccatcacaacagtcgtgggctgcgctatggactattggggccagggaacaagcgtgaccgtgtctagtacgcgtgcctctacaaagggaccctccgtgtttcctctggctcccagcagcaagtctacaagcggaggaacagccgctctgggctgcctggtcaaggattactttcccgagcctgtgaccgtgtcctggaatagcggagcactgacaagcggcgtgcacacctttccagccgtgctgcaaagcagcggcctgtactctctgagcagcgtggtcacagtgcctagctctagcctgggcacccagacctacatctgcaatgtgaaccacaagcctagcaacaccaaggtggacaagagagtggaacccaagagctgtggtaccgtcgagaaagaacatccacagcttggcgctggcaccgtcctgttgcttagagccggattctatgccgtcagcttcctgtccgtggctgtggggtctacagtgtattaccagggaaaatgtctcacctggaaaggccccagacgccagcttccagctgttgttcctgctccactgccaccaccttgtggctcctctgctcacttgcttccaccagtgcctggcggacgcgccaagagaagcggatctggcgtgaagcagaccctgaatttcgacctgctgaagctggctggcgacgtggaatccaacccaggcccttctagaggcgggatccacaccatgtccgactccaaggaggtccctagccttccatttttgcgacacttgctcgaagagttggacagccatgaggacagcttgctgctgtttctgtgtcacgacgcggccccgggctgcacgacggtcacgcaagctttgtgctcgcttagccaacagcgcaagctgaccctcgcggctctggtcgagatgctctacgtgctgcagcgtatggatcttctcaagagccgcttcgggctcagcaaggagggggccgagcaattgctgggcacaagctttctcacgcgctaccgcaagctcatggtttgcgtgggtgaggagctcgactcgagcgagctacgcgctctacgcttgttcgcgtgcaacctgaatccgagcctgagcacggcgctttctgagagcagccgctttgtcgagcttgtactcgcgcttgaaaacgtaggactcgtctcgccatcgagtgtttccgtgcttgcggacatgttgcgcactcttcggcgcctcgatttgtgccagcagcttgttgagtacgaacaacaagagcaagccaggtaccgttactgttacgcggcctcgccctcattgccagttcgtacgttacgtcgggggcacggcgcgagtgaacacgagcagctgtgcatgcccgtgcaagaatcctctgacagccccgagctgctgcgcacgcccgtacaagaatcctccagcgacagccccgagcaaacgact

SEQ ID NO: 1695 - DNA, 2925 bp, Artificial Sequence
  Synthetic Polynucleotide
atggccttaccagtgaccgccttgctcctgccgctggccttgctgctccacgccgccaggccggacatccagatgacacagagccctagcagcctgtctgccagcgtgggagacagagtgaccatcacatgcaaggccagcgaccacatcaacaactggctggcctggtatcagcagaagcctggacaggcccctaagctgctgatctacggcgctaccacactggaaacaggcgtgcccagcagattttctggcagcggctctggcaccgactacaccctgacaatatccagcctccagcctgaggacttcgccacctactactgtcagcagagctggaacaccccttggacattcggccagggcaccaagctggaaatcaagagactcgagggacagcctaaggccaatcctaccgtgacactgttccctccaagcagcgaagaactccaggccaacaaggccacacttgtgtgcctgatctccgacttctaccctggggctgtgacagtggcttggaaggccgatggatctcctgtgaaagccggcgtggaaaccaccaagccatccaagcagagcaacaacaaatacgccgccagctcctacctgagcctgacacctgagcagtggaagtcccacagatcctacagctgccaagtgacccacgaaggcagcaccgtggaaaagacagtggcccctacagagtgcagcggatccatcggctggctgttgctccaggcccctcggtgggtgttcaaggaggaagaccctattcacctgaggtgtcacagctggaagaacactgctctgcataaggtcacatatttacagaatggcaaaggcaggaagtattttcatcataattctgacttctacattccaaaagccacactcaaagacagcggctcctacttctgcagggggcttgttgggagtaaaaatgtgtcttcagagactgtgaacatcaccatcactcaaggtttggcagtgtcaaccatctcatcattctttccacctggctaccaagtgtccttctgcctggtcatggtgctgctgttcgccgtggataccggcctgtacttcagcgtcaagaccaacatccggtccagcaccagagactggaaggaccacaagttcaagtggcggaaggaccctcaggacaagagggccaagcgatctggatctggagcaacaaacttctcactactcaaacaagcaggtgacgtggaggagaatcccgggcctactagtatggactggatttggcgcatccttttccttgtcggcgctgctaccggcgcgcattccttcgaacaagttcagcttcaacagcctggcgctgagctggtcaaacctggcgcttctgtgaagatgagctgcaaagccagcggctacgccttcagcagctactggatcaactggatgaagcagaaacccggccagggactcgaatggatcggccaaatctatcccggcgacggcgacaccaactacaacggcaagttcaagggcagagccacactgaccgccgatacctctagcagcacagcctacatgcagctgagcagcctgaccagcgaagatagcgccgtgtacttctgtgcccggtccatcacaacagtcgtgggctgcgctatggactattggggccagggaacaagcgtgaccgtgtctagtacgcgtgcctctacaaagggaccctccgtgtttcctctggctcccagcagcaagtctacaagcggaggaacagccgctctgggctgcctggtcaaggattactttcccgagcctgtgaccgtgtcctggaatagcggagcactgacaagcggcgtgcacacctttccagccgtgctgcaaagcagcggcctgtactctctgagcagcgtggtcacagtgcctagctctagcctgggcacccagacctacatctgcaatgtgaaccacaagcctagcaacaccaaggtggacaagagagtggaacccaagagctgtggtaccgtcgagaaagaacatccacagcttggcgctggcaccgtcctgttgcttagagccggattctatgccgtcagcttcctgtccgtggctgtggggtctacagtgtattaccagggaaaatgtctcacctggaaaggccccagacgccagcttccagctgttgttcctgctccactgccaccaccttgtggctcctctgctcacttgcttccaccagtgcctggcggacgcgccaagagaagcggatctggcgtgaagcagaccctgaatttcgacctgctgaagctggctggcgacgtggaatccaacccaggcccttctagaggccatatgaccgagtacaagcccacggtgcgcctcgccacccgcgacgacgtccccagggccgtacgcaccctcgccgccgcgttcgccgactaccccgccacgcgccacaccgtcgatccggaccgccacatcgagcgggtcaccgagctgcaagaactcttcctcacgcgcgtcgggctcgacatcggcaaggtgtgggtcgcggacgacggcgccgcggtggcggtctggaccacgccggagagcgtcgaagcgggggcggtgttcgccgagatcggcccgcgcatggccgagttgagcggttcccggctggccgcgcagcaacagatggaaggcctcctggcgccgcaccggcccaaggagcccgcgtggttcctggccaccgtcggcgtctcgcccgaccaccagggcaagggtctgggcagcgccgtcgtgctccccggagtggaggcggccgagcgcgccggggtgcccgccttcctggagacctccgcgccccgcaacctccccttctacgagcggctcggcttcaccgtcaccgccgacgtcgaggtgcccgaaggaccgcgcacctggtgcatgacccgcaagcccggtgcctga

SEQ ID NO: 1696 - DNA, 3336 bp, Artificial Sequence
  Synthetic Polynucleotide
atggccttaccagtgaccgccttgctcctgccgctggccttgctgctccacgccgccaggccggaagtgcagctggttgaatctggcggaggactggttcaggctggcggatctctgagactgtcttgtgccgccagcggcagaacctttagcatgggctggtttagacaggcccctggcaaagagagagagttcgtcgccgccatcacatactctggcggcagcccttactacgccgactctgtgaagggcagattcaccatcagccgggacaacgccaagaacaccgtgtacctccagatgaacagcctgaagcctgaggacaccgccgtgtactactgcgccgccaatccaacatacggcagcgactggaacgccgagaattggggccagggaacccaagtgacagtgtctagcggtaccggcggaggcggatctggcggcggaggtagcggtggcggaggatctgaattcgacatccagatgacacagagccctagcagcctgtctgccagcgtgggagacagagtgaccatcacatgcaaggccagcgaccacatcaacaactggctggcctggtatcagcagaagcctggacaggcccctaagctgctgatctacggcgctaccacactggaaacaggcgtgcccagcagattttctggcagcggctctggcaccgactacaccctgacaatatccagcctccagcctgaggacttcgccacctactactgtcagcagagctggaacaccccttggacattcggccagggcaccaagctggaaatcaagagactcgagggacagcctaaggccaatcctaccgtgacactgttccctccaagcagcgaagaactccaggccaacaaggccacacttgtgtgcctgatctccgacttctaccctggggctgtgacagtggcttggaaggccgatggatctcctgtgaaagccggcgtggaaaccaccaagccatccaagcagagcaacaacaaatacgccgccagctcctacctgagcctgacacctgagcagtggaagtcccacagatcctacagctgccaagtgacccacgaaggcagcaccgtggaaaagacagtggcccctacagagtgcagcggatccatcggctggctgttgctccaggcccctcggtgggtgttcaaggaggaagaccctattcacctgaggtgtcacagctggaagaacactgctctgcataaggtcacatatttacagaatggcaaaggcaggaagtattttcatcataattctgacttctacattccaaaagccacactcaaagacagcggctcctacttctgcagggggcttgttgggagtaaaaatgtgtcttcagagactgtgaacatcaccatcactcaaggtttggcagtgtcaaccatctcatcattctttccacctggctaccaagtgtccttctgcctggtcatggtgctgctgttcgccgtggataccggcctgtacttcagcgtcaagaccaacatccggtccagcaccagagactggaaggaccacaagttcaagtggcggaaggaccctcaggacaagagggccaagcgatctggatctggagcaacaaacttctcactactcaaacaagcaggtgacgtggaggagaatcccgggcctactagtatggactggatttggcgcatccttttccttgtcggcgctgctaccggcgcgcattccttcgaacaagttcagcttcaacagcctggcgctgagctggtcaaacctggcgcttctgtgaagatgagctgcaaagccagcggctacgccttcagcagctactggatcaactggatgaagcagaaacccggccagggactcgaatggatcggccaaatctatcccggcgacggcgacaccaactacaacggcaagttcaagggcagagccacactgaccgccgatacctctagcagcacagcctacatgcagctgagcagcctgaccagcgaagatagcgccgtgtacttctgtgcccggtccatcacaacagtcgtgggctgcgctatggactattggggccagggaacaagcgtgaccgtgtctagtacgcgtgcctctacaaagggaccctccgtgtttcctctggctcccagcagcaagtctacaagcggaggaacagccgctctgggctgcctggtcaaggattactttcccgagcctgtgaccgtgtcctggaatagcggagcactgacaagcggcgtgcacacctttccagccgtgctgcaaagcagcggcctgtactctctgagcagcgtggtcacagtgcctagctctagcctgggcacccagacctacatctgcaatgtgaaccacaagcctagcaacaccaaggtggacaagagagtggaacccaagagctgtggtaccgtcgagaaagaacatccacagcttggcgctggcaccgtcctgttgcttagagccggattctatgccgtcagcttcctgtccgtggctgtggggtctacagtgtattaccagggaaaatgtctcacctggaaaggccccagacgccagcttccagctgttgttcctgctccactgccaccaccttgtggctcctctgctcacttgcttccaccagtgcctggcggacgcgccaagagaagcggatctggcgtgaagcagaccctgaatttcgacctgctgaagctggctggcgacgtggaatccaacccaggcccttctagaggccatatgaccgagtacaagcccacggtgcgcctcgccacccgcgacgacgtccccagggccgtacgcaccctcgccgccgcgttcgccgactaccccgccacgcgccacaccgtcgatccggaccgccacatcgagcgggtcaccgagctgcaagaactcttcctcacgcgcgtcgggctcgacatcggcaaggtgtgggtcgcggacgacggcgccgcggtggcggtctggaccacgccggagagcgtcgaagcgggggcggtgttcgccgagatcggcccgcgcatggccgagttgagcggttcccggctggccgcgcagcaacagatggaaggcctcctggcgccgcaccggcccaaggagcccgcgtggttcctggccaccgtcggcgtctcgcccgaccaccagggcaagggtctgggcagcgccgtcgtgctccccggagtggaggcggccgagcgcgccggggtgcccgccttcctggagacctccgcgccccgcaacctccccttctacgagcggctcggcttcaccgtcaccgccgacgtcgaggtgcccgaaggaccgcgcacctggtgcatgacccgcaagcccggtgcctga

SEQ ID NO: 1697 - DNA, 3747 bp, Artificial Sequence
  Synthetic Polynucleotide
atggccttaccagtgaccgccttgctcctgccgctggccttgctgctccacgccgccaggccggaagtgcagctggttgaatctggcggaggactggttcaggctggcggatctctgagactgtcttgtgccgccagcggcagaacctttagcatgggctggtttagacaggcccctggcaaagagagagagttcgtcgccgccatcacatactctggcggcagcccttactacgccgactctgtgaagggcagattcaccatcagccgggacaacgccaagaacaccgtgtacctccagatgaacagcctgaagcctgaggacaccgccgtgtactactgcgccgccaatccaacatacggcagcgactggaacgccgagaattggggccagggaacccaagtgacagtgtctagcggtaccggcggaggcggatctggcggcggaggtagcggtggcggaggatctgaattcgacatccagatgacacagagccctagcagcctgtctgccagcgtgggagacagagtgaccatcacatgcaaggccagcgaccacatcaacaactggctggcctggtatcagcagaagcctggacaggcccctaagctgctgatctacggcgctaccacactggaaacaggcgtgcccagcagattttctggcagcggctctggcaccgactacaccctgacaatatccagcctccagcctgaggacttcgccacctactactgtcagcagagctggaacaccccttggacattcggccagggcaccaagctggaaatcaagagactcgagggacagcctaaggccaatcctaccgtgacactgttccctccaagcagcgaagaactccaggccaacaaggccacacttgtgtgcctgatctccgacttctaccctggggctgtgacagtggcttggaaggccgatggatctcctgtgaaagccggcgtggaaaccaccaagccatccaagcagagcaacaacaaatacgccgccagctcctacctgagcctgacacctgagcagtggaagtcccacagatcctacagctgccaagtgacccacgaaggcagcaccgtggaaaagacagtggcccctacagagtgcagcggatccatcggctggctgttgctccaggcccctcggtgggtgttcaaggaggaagaccctattcacctgaggtgtcacagctggaagaacactgctctgcataaggtcacatatttacagaatggcaaaggcaggaagtattttcatcataattctgacttctacattccaaaagccacactcaaagacagcggctcctacttctgcagggggcttgttgggagtaaaaatgtgtcttcagagactgtgaacatcaccatcactcaaggtttggcagtgtcaaccatctcatcattctttccacctggctaccaagtgtccttctgcctggtcatggtgctgctgttcgccgtggataccggcctgtacttcagcgtcaagaccaacatccggtccagcaccagagactggaaggaccacaagttcaagtggcggaaggaccctcaggacaagagggccaagcgatctggatctggagcaacaaacttctcactactcaaacaagcaggtgacgtggaggagaatcccgggcctactagtatggactggatttggcgcatccttttccttgtcggcgctgctaccggcgcgcattccgggcccgaagtgcaactggttgaatccggtggcggcctggtgcaagcaggcggatctctcagacttagctgtgccgcctccggcagaaccttcacaatgggatggtttaggcaggctccagggaaagagagagagttcgtcgccgccatctctctgtctcccacactggcctactacgccgactctgtgaaaggccggttcaccatctccagagataatgccaagaacaccgtggtgctgcaaatgaactctctgaaacccgaggatacagccctgtactattgtgccgctgaccggaagtccgtgatgagcatcagacccgattactggggacagggcacacaagtcacagtgtcctctggatccggcggcggaggatctggcggaggcggatctgggggcggaggctctttcgaacaagttcagcttcaacagcctggcgctgagctggtcaaacctggcgcttctgtgaagatgagctgcaaagccagcggctacgccttcagcagctactggatcaactggatgaagcagaaacccggccagggactcgaatggatcggccaaatctatcccggcgacggcgacaccaactacaacggcaagttcaagggcagagccacactgaccgccgatacctctagcagcacagcctacatgcagctgagcagcctgaccagcgaagatagcgccgtgtacttctgtgcccggtccatcacaacagtcgtgggctgcgctatggactattggggccagggaacaagcgtgaccgtgtctagtacgcgtgcctctacaaagggaccctccgtgtttcctctggctcccagcagcaagtctacaagcggaggaacagccgctctgggctgcctggtcaaggattactttcccgagcctgtgaccgtgtcctggaatagcggagcactgacaagcggcgtgcacacctttccagccgtgctgcaaagcagcggcctgtactctctgagcagcgtggtcacagtgcctagctctagcctgggcacccagacctacatctgcaatgtgaaccacaagcctagcaacaccaaggtggacaagagagtggaacccaagagctgtggtaccgtcgagaaagaacatccacagcttggcgctggcaccgtcctgttgcttagagccggattctatgccgtcagcttcctgtccgtggctgtggggtctacagtgtattaccagggaaaatgtctcacctggaaaggccccagacgccagcttccagctgttgttcctgctccactgccaccaccttgtggctcctctgctcacttgcttccaccagtgcctggcggacgcgccaagagaagcggatctggcgtgaagcagaccctgaatttcgacctgctgaagctggctggcgacgtggaatccaacccaggcccttctagaggccatatgaccgagtacaagcccacggtgcgcctcgccacccgcgacgacgtccccagggccgtacgcaccctcgccgccgcgttcgccgactaccccgccacgcgccacaccgtcgatccggaccgccacatcgagcgggtcaccgagctgcaagaactcttcctcacgcgcgtcgggctcgacatcggcaaggtgtgggtcgcggacgacggcgccgcggtggcggtctggaccacgccggagagcgtcgaagcgggggcggtgttcgccgagatcggcccgcgcatggccgagttgagcggttcccggctggccgcgcagcaacagatggaaggcctcctggcgccgcaccggcccaaggagcccgcgtggttcctggccaccgtcggcgtctcgcccgaccaccagggcaagggtctgggcagcgccgtcgtgctccccggagtggaggcggccgagcgcgccggggtgcccgccttcctggagacctccgcgccccgcaacctccccttctacgagcggctcggcttcaccgtcaccgccgacgtcgaggtgcccgaaggaccgcgcacctggtgcatgacccgcaagcccggtgcctga

SEQ ID NO: 1698 - DNA, 2946 bp, Artificial Sequence
  Synthetic Polynucleotide
atggccttaccagtgaccgccttgctcctgccgctggccttgctgctccacgccgccaggccggaagtgcagctggttgaatctggcggaggactggttcaggctggcggatctctgagactgtcttgtgccgccagcggcagaacctttagcatgggctggtttagacaggcccctggcaaagagagagagttcgtcgccgccatcacatactctggcggcagcccttactacgccgactctgtgaagggcagattcaccatcagccgggacaacgccaagaacaccgtgtacctccagatgaacagcctgaagcctgaggacaccgccgtgtactactgcgccgccaatccaacatacggcagcgactggaacgccgagaattggggccagggaacccaagtgacagtgtctagcctcgagggacagcctaaggccaatcctaccgtgacactgttccctccaagcagcgaagaactccaggccaacaaggccacacttgtgtgcctgatctccgacttctaccctggggctgtgacagtggcttggaaggccgatggatctcctgtgaaagccggcgtggaaaccaccaagccatccaagcagagcaacaacaaatacgccgccagctcctacctgagcctgacacctgagcagtggaagtcccacagatcctacagctgccaagtgacccacgaaggcagcaccgtggaaaagacagtggcccctacagagtgcagcggatccatcggctggctgttgctccaggcccctcggtgggtgttcaaggaggaagaccctattcacctgaggtgtcacagctggaagaacactgctctgcataaggtcacatatttacagaatggcaaaggcaggaagtattttcatcataattctgacttctacattccaaaagccacactcaaagacagcggctcctacttctgcagggggcttgttgggagtaaaaatgtgtcttcagagactgtgaacatcaccatcactcaaggtttggcagtgtcaaccatctcatcattctttccacctggctaccaagtgtccttctgcctggtcatggtgctgctgttcgccgtggataccggcctgtacttcagcgtcaagaccaacatccggtccagcaccagagactggaaggaccacaagttcaagtggcggaaggaccctcaggacaagagggccaagcgatctggatctggagcaacaaacttctcactactcaaacaagcaggtgacgtggaggagaatcccgggcctactagtatggactggatttggcgcatccttttccttgtcggcgctgctaccggcgcgcattccgggcccgaagtgcaactggttgaatccggtggcggcctggtgcaagcaggcggatctctcagacttagctgtgccgcctccggcagaaccttcacaatgggatggtttaggcaggctccagggaaagagagagagttcgtcgccgccatctctctgtctcccacactggcctactacgccgactctgtgaaaggccggttcaccatctccagagataatgccaagaacaccgtggtgctgcaaatgaactctctgaaacccgaggatacagccctgtactattgtgccgctgaccggaagtccgtgatgagcatcagacccgattactggggacagggcacacaagtcacagtgtcctctacgcgtgcctctacaaagggaccctccgtgtttcctctggctcccagcagcaagtctacaagcggaggaacagccgctctgggctgcctggtcaaggattactttcccgagcctgtgaccgtgtcctggaatagcggagcactgacaagcggcgtgcacacctttccagccgtgctgcaaagcagcggcctgtactctctgagcagcgtggtcacagtgcctagctctagcctgggcacccagacctacatctgcaatgtgaaccacaagcctagcaacaccaaggtggacaagagagtggaacccaagagctgtggtaccgtcgagaaagaacatccacagcttggcgctggcaccgtcctgttgcttagagccggattctatgccgtcagcttcctgtccgtggctgtggggtctacagtgtattaccagggaaaatgtctcacctggaaaggccccagacgccagcttccagctgttgttcctgctccactgccaccaccttgtggctcctctgctcacttgcttccaccagtgcctggcggacgcgccaagagaagcggatctggcgtgaagcagaccctgaatttcgacctgctgaagctggctggcgacgtggaatccaacccaggcccttctagaggccatatgaccgagtacaagcccacggtgcgcctcgccacccgcgacgacgtccccagggccgtacgcaccctcgccgccgcgttcgccgactaccccgccacgcgccacaccgtcgatccggaccgccacatcgagcgggtcaccgagctgcaagaactcttcctcacgcgcgtcgggctcgacatcggcaaggtgtgggtcgcggacgacggcgccgcggtggcggtctggaccacgccggagagcgtcgaagcgggggcggtgttcgccgagatcggcccgcgcatggccgagttgagcggttcccggctggccgcgcagcaacagatggaaggcctcctggcgccgcaccggcccaaggagcccgcgtggttcctggccaccgtcggcgtctcgcccgaccaccagggcaagggtctgggcagcgccgtcgtgctccccggagtggaggcggccgagcgcgccggggtgcccgccttcctggagacctccgcgccccgcaacctccccttctacgagcggctcggcttcaccgtcaccgccgacgtcgaggtgcccgaaggaccgcgcacctggtgcatgacccgcaagcccggtgcctga

SEQ ID NO: 1699 - DNA, 2970 bp, Artificial Sequence
  Synthetic Polynucleotide
atggccttaccagtgaccgccttgctcctgccgctggccttgctgctccacgccgccaggccggacatccagatgacacagagccctagcagcctgtctgccagcgtgggagacagagtgaccatcacatgcaaggccagcgaccacatcaacaactggctggcctggtatcagcagaagcctggacaggcccctaagctgctgatctacggcgctaccacactggaaacaggcgtgcccagcagattttctggcagcggctctggcaccgactacaccctgacaatatccagcctccagcctgaggacttcgccacctactactgtcagcagagctggaacaccccttggacattcggccagggcaccaagctggaaatcaagagactcgaggacctgaagaacgtgttcccacctgaggtggccgtgttcgagcctagcgaggccgagatcagccacacccagaaagccaccctcgtgtgcctggctaccggcttctaccccgaccatgtggaactgtcttggtgggtcaacggcaaagaggtgcacagcggcgtgtctaccgacccccagccactgaaagaacagcccgccctgaacgacagccggtactgcctgagcagcagactgagagtgtccgccaccttctggcagaacccccggaaccacttcagatgccaggtgcagttctacggcctgagcgagaacgacgagtggacccaggacagagccaagcccgtgacccagatcgtgtctgccgaagcctggggcagagccgattgcggatccatcggctggctgttgctccaggcccctcggtgggtgttcaaggaggaagaccctattcacctgaggtgtcacagctggaagaacactgctctgcataaggtcacatatttacagaatggcaaaggcaggaagtattttcatcataattctgacttctacattccaaaagccacactcaaagacagcggctcctacttctgcagggggcttgttgggagtaaaaatgtgtcttcagagactgtgaacatcaccatcactcaaggtttggcagtgtcaaccatctcatcattctttccacctggctaccaagtgtccttctgcctggtcatggtgctgctgttcgccgtggataccggcctgtacttcagcgtcaagaccaacatccggtccagcaccagagactggaaggaccacaagttcaagtggcggaaggaccctcaggacaagagggccaagcgatctggatctggagcaacaaacttctcactactcaaacaagcaggtgacgtggaggagaatcccgggcctactagtatggactggatttggcgcatccttttccttgtcggcgctgctaccggcgcgcattccttcgaacaagttcagcttcaacagcctggcgctgagctggtcaaacctggcgcttctgtgaagatgagctgcaaagccagcggctacgccttcagcagctactggatcaactggatgaagcagaaacccggccagggactcgaatggatcggccaaatctatcccggcgacggcgacaccaactacaacggcaagttcaagggcagagccacactgaccgccgatacctctagcagcacagcctacatgcagctgagcagcctgaccagcgaagatagcgccgtgtacttctgtgcccggtccatcacaacagtcgtgggctgcgctatggactattggggccagggaacaagcgtgaccgtgtctagtacgcgtatccagaaccctgatcctgccgtgtaccagctgcgggatagcaagagcagcgacaagagcgtgtgtctgttcaccgacttcgacagccagaccaacgtgtcccagagcaaggactccgacgtgtacatcaccgataagaccgtgctggacatgcggagcatggacttcaagagcaactccgccgtggcctggtccaacaagtccgatttcgcctgcgccaacgccttcaacaacagcattatccccgaggacacattcttcccaagccccgagagcagctgcggtaccgtcgagaaagaacatccacagcttggcgctggcaccgtcctgttgcttagagccggattctatgccgtcagcttcctgtccgtggctgtggggtctacagtgtattaccagggaaaatgtctcacctggaaaggccccagacgccagcttccagctgttgttcctgctccactgccaccaccttgtggctcctctgctcacttgcttccaccagtgcctggcggacgcgccaagagaagcggatctggcgtgaagcagaccctgaatttcgacctgctgaagctggctggcgacgtggaatccaacccaggcccttctagaggccatatgaccgagtacaagcccacggtgcgcctcgccacccgcgacgacgtccccagggccgtacgcaccctcgccgccgcgttcgccgactaccccgccacgcgccacaccgtcgatccggaccgccacatcgagcgggtcaccgagctgcaagaactcttcctcacgcgcgtcgggctcgacatcggcaaggtgtgggtcgcggacgacggcgccgcggtggcggtctggaccacgccggagagcgtcgaagcgggggcggtgttcgccgagatcggcccgcgcatggccgagttgagcggttcccggctggccgcgcagcaacagatggaaggcctcctggcgccgcaccggcccaaggagcccgcgtggttcctggccaccgtcggcgtctcgcccgaccaccagggcaagggtctgggcagcgccgtcgtgctccccggagtggaggcggccgagcgcgccggggtgcccgccttcctggagacctccgcgccccgcaacctccccttctacgagcggctcggcttcaccgtcaccgccgacgtcgaggtgcccgaaggaccgcgcacctggtgcatgacccgcaagcccggtgcctga

SEQ ID NO: 1700 - DNA, 3381 bp, Artificial Sequence
  Synthetic Polynucleotide
atggccttaccagtgaccgccttgctcctgccgctggccttgctgctccacgccgccaggccggaagtgcagctggttgaatctggcggaggactggttcaggctggcggatctctgagactgtcttgtgccgccagcggcagaacctttagcatgggctggtttagacaggcccctggcaaagagagagagttcgtcgccgccatcacatactctggcggcagcccttactacgccgactctgtgaagggcagattcaccatcagccgggacaacgccaagaacaccgtgtacctccagatgaacagcctgaagcctgaggacaccgccgtgtactactgcgccgccaatccaacatacggcagcgactggaacgccgagaattggggccagggaacccaagtgacagtgtctagcggtaccggcggaggcggatctggcggcggaggtagcggtggcggaggatctgaattcgacatccagatgacacagagccctagcagcctgtctgccagcgtgggagacagagtgaccatcacatgcaaggccagcgaccacatcaacaactggctggcctggtatcagcagaagcctggacaggcccctaagctgctgatctacggcgctaccacactggaaacaggcgtgcccagcagattttctggcagcggctctggcaccgactacaccctgacaatatccagcctccagcctgaggacttcgccacctactactgtcagcagagctggaacaccccttggacattcggccagggcaccaagctggaaatcaagagactcgaggacctgaagaacgtgttcccacctgaggtggccgtgttcgagcctagcgaggccgagatcagccacacccagaaagccaccctcgtgtgcctggctaccggcttctaccccgaccatgtggaactgtcttggtgggtcaacggcaaagaggtgcacagcggcgtgtctaccgacccccagccactgaaagaacagcccgccctgaacgacagccggtactgcctgagcagcagactgagagtgtccgccaccttctggcagaacccccggaaccacttcagatgccaggtgcagttctacggcctgagcgagaacgacgagtggacccaggacagagccaagcccgtgacccagatcgtgtctgccgaagcctggggcagagccgattgcggatccatcggctggctgttgctccaggcccctcggtgggtgttcaaggaggaagaccctattcacctgaggtgtcacagctggaagaacactgctctgcataaggtcacatatttacagaatggcaaaggcaggaagtattttcatcataattctgacttctacattccaaaagccacactcaaagacagcggctcctacttctgcagggggcttgttgggagtaaaaatgtgtcttcagagactgtgaacatcaccatcactcaaggtttggcagtgtcaaccatctcatcattctttccacctggctaccaagtgtccttctgcctggtcatggtgctgctgttcgccgtggataccggcctgtacttcagcgtcaagaccaacatccggtccagcaccagagactggaaggaccacaagttcaagtggcggaaggaccctcaggacaagagggccaagcgatctggatctggagcaacaaacttctcactactcaaacaagcaggtgacgtggaggagaatcccgggcctactagtatggactggatttggcgcatccttttccttgtcggcgctgctaccggcgcgcattccttcgaacaagttcagcttcaacagcctggcgctgagctggtcaaacctggcgcttctgtgaagatgagctgcaaagccagcggctacgccttcagcagctactggatcaactggatgaagcagaaacccggccagggactcgaatggatcggccaaatctatcccggcgacggcgacaccaactacaacggcaagttcaagggcagagccacactgaccgccgatacctctagcagcacagcctacatgcagctgagcagcctgaccagcgaagatagcgccgtgtacttctgtgcccggtccatcacaacagtcgtgggctgcgctatggactattggggccagggaacaagcgtgaccgtgtctagtacgcgtatccagaaccctgatcctgccgtgtaccagctgcgggatagcaagagcagcgacaagagcgtgtgtctgttcaccgacttcgacagccagaccaacgtgtcccagagcaaggactccgacgtgtacatcaccgataagaccgtgctggacatgcggagcatggacttcaagagcaactccgccgtggcctggtccaacaagtccgatttcgcctgcgccaacgccttcaacaacagcattatccccgaggacacattcttcccaagccccgagagcagctgcggtaccgtcgagaaagaacatccacagcttggcgctggcaccgtcctgttgcttagagccggattctatgccgtcagcttcctgtccgtggctgtggggtctacagtgtattaccagggaaaatgtctcacctggaaaggccccagacgccagcttccagctgttgttcctgctccactgccaccaccttgtggctcctctgctcacttgcttccaccagtgcctggcggacgcgccaagagaagcggatctggcgtgaagcagaccctgaatttcgacctgctgaagctggctggcgacgtggaatccaacccaggcccttctagaggccatatgaccgagtacaagcccacggtgcgcctcgccacccgcgacgacgtccccagggccgtacgcaccctcgccgccgcgttcgccgactaccccgccacgcgccacaccgtcgatccggaccgccacatcgagcgggtcaccgagctgcaagaactcttcctcacgcgcgtcgggctcgacatcggcaaggtgtgggtcgcggacgacggcgccgcggtggcggtctggaccacgccggagagcgtcgaagcgggggcggtgttcgccgagatcggcccgcgcatggccgagttgagcggttcccggctggccgcgcagcaacagatggaaggcctcctggcgccgcaccggcccaaggagcccgcgtggttcctggccaccgtcggcgtctcgcccgaccaccagggcaagggtctgggcagcgccgtcgtgctccccggagtggaggcggccgagcgcgccggggtgcccgccttcctggagacctccgcgccccgcaacctccccttctacgagcggctcggcttcaccgtcaccgccgacgtcgaggtgcccgaaggaccgcgcacctggtgcatgacccgcaagcccggtgcctga

SEQ ID NO: 1701 - DNA, 3792 bp, Artificial Sequence
  Synthetic Polynucleotide
atggccttaccagtgaccgccttgctcctgccgctggccttgctgctccacgccgccaggccggaagtgcagctggttgaatctggcggaggactggttcaggctggcggatctctgagactgtcttgtgccgccagcggcagaacctttagcatgggctggtttagacaggcccctggcaaagagagagagttcgtcgccgccatcacatactctggcggcagcccttactacgccgactctgtgaagggcagattcaccatcagccgggacaacgccaagaacaccgtgtacctccagatgaacagcctgaagcctgaggacaccgccgtgtactactgcgccgccaatccaacatacggcagcgactggaacgccgagaattggggccagggaacccaagtgacagtgtctagcggtaccggcggaggcggatctggcggcggaggtagcggtggcggaggatctgaattcgacatccagatgacacagagccctagcagcctgtctgccagcgtgggagacagagtgaccatcacatgcaaggccagcgaccacatcaacaactggctggcctggtatcagcagaagcctggacaggcccctaagctgctgatctacggcgctaccacactggaaacaggcgtgcccagcagattttctggcagcggctctggcaccgactacaccctgacaatatccagcctccagcctgaggacttcgccacctactactgtcagcagagctggaacaccccttggacattcggccagggcaccaagctggaaatcaagagactcgaggacctgaagaacgtgttcccacctgaggtggccgtgttcgagcctagcgaggccgagatcagccacacccagaaagccaccctcgtgtgcctggctaccggcttctaccccgaccatgtggaactgtcttggtgggtcaacggcaaagaggtgcacagcggcgtgtctaccgacccccagccactgaaagaacagcccgccctgaacgacagccggtactgcctgagcagcagactgagagtgtccgccaccttctggcagaacccccggaaccacttcagatgccaggtgcagttctacggcctgagcgagaacgacgagtggacccaggacagagccaagcccgtgacccagatcgtgtctgccgaagcctggggcagagccgattgcggatccatcggctggctgttgctccaggcccctcggtgggtgttcaaggaggaagaccctattcacctgaggtgtcacagctggaagaacactgctctgcataaggtcacatatttacagaatggcaaaggcaggaagtattttcatcataattctgacttctacattccaaaagccacactcaaagacagcggctcctacttctgcagggggcttgttgggagtaaaaatgtgtcttcagagactgtgaacatcaccatcactcaaggtttggcagtgtcaaccatctcatcattctttccacctggctaccaagtgtccttctgcctggtcatggtgctgctgttcgccgtggataccggcctgtacttcagcgtcaagaccaacatccggtccagcaccagagactggaaggaccacaagttcaagtggcggaaggaccctcaggacaagagggccaagcgatctggatctggagcaacaaacttctcactactcaaacaagcaggtgacgtggaggagaatcccgggcctactagtatggactggatttggcgcatccttttccttgtcggcgctgctaccggcgcgcattccgggcccgaagtgcaactggttgaatccggtggcggcctggtgcaagcaggcggatctctcagacttagctgtgccgcctccggcagaaccttcacaatgggatggtttaggcaggctccagggaaagagagagagttcgtcgccgccatctctctgtctcccacactggcctactacgccgactctgtgaaaggccggttcaccatctccagagataatgccaagaacaccgtggtgctgcaaatgaactctctgaaacccgaggatacagccctgtactattgtgccgctgaccggaagtccgtgatgagcatcagacccgattactggggacagggcacacaagtcacagtgtcctctggatccggcggcggaggatctggcggaggcggatctgggggcggaggctctttcgaacaagttcagcttcaacagcctggcgctgagctggtcaaacctggcgcttctgtgaagatgagctgcaaagccagcggctacgccttcagcagctactggatcaactggatgaagcagaaacccggccagggactcgaatggatcggccaaatctatcccggcgacggcgacaccaactacaacggcaagttcaagggcagagccacactgaccgccgatacctctagcagcacagcctacatgcagctgagcagcctgaccagcgaagatagcgccgtgtacttctgtgcccggtccatcacaacagtcgtgggctgcgctatggactattggggccagggaacaagcgtgaccgtgtctagtacgcgtatccagaaccctgatcctgccgtgtaccagctgcgggatagcaagagcagcgacaagagcgtgtgtctgttcaccgacttcgacagccagaccaacgtgtcccagagcaaggactccgacgtgtacatcaccgataagaccgtgctggacatgcggagcatggacttcaagagcaactccgccgtggcctggtccaacaagtccgatttcgcctgcgccaacgccttcaacaacagcattatccccgaggacacattcttcccaagccccgagagcagctgcggtaccgtcgagaaagaacatccacagcttggcgctggcaccgtcctgttgcttagagccggattctatgccgtcagcttcctgtccgtggctgtggggtctacagtgtattaccagggaaaatgtctcacctggaaaggccccagacgccagcttccagctgttgttcctgctccactgccaccaccttgtggctcctctgctcacttgcttccaccagtgcctggcggacgcgccaagagaagcggatctggcgtgaagcagaccctgaatttcgacctgctgaagctggctggcgacgtggaatccaacccaggcccttctagaggccatatgaccgagtacaagcccacggtgcgcctcgccacccgcgacgacgtccccagggccgtacgcaccctcgccgccgcgttcgccgactaccccgccacgcgccacaccgtcgatccggaccgccacatcgagcgggtcaccgagctgcaagaactcttcctcacgcgcgtcgggctcgacatcggcaaggtgtgggtcgcggacgacggcgccgcggtggcggtctggaccacgccggagagcgtcgaagcgggggcggtgttcgccgagatcggcccgcgcatggccgagttgagcggttcccggctggccgcgcagcaacagatggaaggcctcctggcgccgcaccggcccaaggagcccgcgtggttcctggccaccgtcggcgtctcgcccgaccaccagggcaagggtctgggcagcgccgtcgtgctccccggagtggaggcggccgagcgcgccggggtgcccgccttcctggagacctccgcgccccgcaacctccccttctacgagcggctcggcttcaccgtcaccgccgacgtcgaggtgcccgaaggaccgcgcacctggtgcatgacccgcaagcccggtgcctga

SEQ ID NO: 1702 - DNA, 2991 bp, Artificial Sequence
  Synthetic Polynucleotide
atggccttaccagtgaccgccttgctcctgccgctggccttgctgctccacgccgccaggccggaagtgcagctggttgaatctggcggaggactggttcaggctggcggatctctgagactgtcttgtgccgccagcggcagaacctttagcatgggctggtttagacaggcccctggcaaagagagagagttcgtcgccgccatcacatactctggcggcagcccttactacgccgactctgtgaagggcagattcaccatcagccgggacaacgccaagaacaccgtgtacctccagatgaacagcctgaagcctgaggacaccgccgtgtactactgcgccgccaatccaacatacggcagcgactggaacgccgagaattggggccagggaacccaagtgacagtgtctagcctcgaggacctgaagaacgtgttcccacctgaggtggccgtgttcgagcctagcgaggccgagatcagccacacccagaaagccaccctcgtgtgcctggctaccggcttctaccccgaccatgtggaactgtcttggtgggtcaacggcaaagaggtgcacagcggcgtgtctaccgacccccagccactgaaagaacagcccgccctgaacgacagccggtactgcctgagcagcagactgagagtgtccgccaccttctggcagaacccccggaaccacttcagatgccaggtgcagttctacggcctgagcgagaacgacgagtggacccaggacagagccaagcccgtgacccagatcgtgtctgccgaagcctggggcagagccgattgcggatccatcggctggctgttgctccaggcccctcggtgggtgttcaaggaggaagaccctattcacctgaggtgtcacagctggaagaacactgctctgcataaggtcacatatttacagaatggcaaaggcaggaagtattttcatcataattctgacttctacattccaaaagccacactcaaagacagcggctcctacttctgcagggggcttgttgggagtaaaaatgtgtcttcagagactgtgaacatcaccatcactcaaggtttggcagtgtcaaccatctcatcattctttccacctggctaccaagtgtccttctgcctggtcatggtgctgctgttcgccgtggataccggcctgtacttcagcgtcaagaccaacatccggtccagcaccagagactggaaggaccacaagttcaagtggcggaaggaccctcaggacaagagggccaagcgatctggatctggagcaacaaacttctcactactcaaacaagcaggtgacgtggaggagaatcccgggcctactagtatggactggatttggcgcatccttttccttgtcggcgctgctaccggcgcgcattccgggcccgaagtgcaactggttgaatccggtggcggcctggtgcaagcaggcggatctctcagacttagctgtgccgcctccggcagaaccttcacaatgggatggtttaggcaggctccagggaaagagagagagttcgtcgccgccatctctctgtctcccacactggcctactacgccgactctgtgaaaggccggttcaccatctccagagataatgccaagaacaccgtggtgctgcaaatgaactctctgaaacccgaggatacagccctgtactattgtgccgctgaccggaagtccgtgatgagcatcagacccgattactggggacagggcacacaagtcacagtgtcctctacgcgtatccagaaccctgatcctgccgtgtaccagctgcgggatagcaagagcagcgacaagagcgtgtgtctgttcaccgacttcgacagccagaccaacgtgtcccagagcaaggactccgacgtgtacatcaccgataagaccgtgctggacatgcggagcatggacttcaagagcaactccgccgtggcctggtccaacaagtccgatttcgcctgcgccaacgccttcaacaacagcattatccccgaggacacattcttcccaagccccgagagcagctgcggtaccgtcgagaaagaacatccacagcttggcgctggcaccgtcctgttgcttagagccggattctatgccgtcagcttcctgtccgtggctgtggggtctacagtgtattaccagggaaaatgtctcacctggaaaggccccagacgccagcttccagctgttgttcctgctccactgccaccaccttgtggctcctctgctcacttgcttccaccagtgcctggcggacgcgccaagagaagcggatctggcgtgaagcagaccctgaatttcgacctgctgaagctggctggcgacgtggaatccaacccaggcccttctagaggccatatgaccgagtacaagcccacggtgcgcctcgccacccgcgacgacgtccccagggccgtacgcaccctcgccgccgcgttcgccgactaccccgccacgcgccacaccgtcgatccggaccgccacatcgagcgggtcaccgagctgcaagaactcttcctcacgcgcgtcgggctcgacatcggcaaggtgtgggtcgcggacgacggcgccgcggtggcggtctggaccacgccggagagcgtcgaagcgggggcggtgttcgccgagatcggcccgcgcatggccgagttgagcggttcccggctggccgcgcagcaacagatggaaggcctcctggcgccgcaccggcccaaggagcccgcgtggttcctggccaccgtcggcgtctcgcccgaccaccagggcaagggtctgggcagcgccgtcgtgctccccggagtggaggcggccgagcgcgccggggtgcccgccttcctggagacctccgcgccccgcaacctccccttctacgagcggctcggcttcaccgtcaccgccgacgtcgaggtgcccgaaggaccgcgcacctggtgcatgacccgcaagcccggtgcctga

SEQ ID NO: 1703 - DNA, 1635 bp, Artificial Sequence; identical to SEQ ID NO: 1664
  Synthetic Polynucleotide

SEQ ID NO: 1704 - DNA, 2067 bp, Artificial Sequence
  Synthetic Polynucleotide
atggccttaccagtgaccgccttgctcctgccgctggccttgctgctccacgccgccaggccggacatccagatgacacagagccctagcagcctgtctgccagcgtgggagacagagtgaccatcacatgcaaggccagcgaccacatcaacaactggctggcctggtatcagcagaagcctggacaggcccctaagctgctgatctacggcgctaccacactggaaacaggcgtgcccagcagattttctggcagcggctctggcaccgactacaccctgacaatatccagcctccagcctgaggacttcgccacctactactgtcagcagagctggaacaccccttggacattcggccagggcaccaagctggaaatcaagagactcgaggtggtggaaaaagagcaccctcagctcggagccggaacagtgctgcttctgagagccggcttttacgccgtgtcctttctgtctgtggccgtgggcagcaccgtgtactatcagggcaagtgcctgacctggaagggacctagaaggcaactgcctgctgtggtgcctgctcctttgcctcctccatgtggaagctctgcccatctgctgccacctgttccaggcggaagggccaagcgatctggatctggagcaacaaacttctcactactcaaacaagcaggtgacgtggaggagaatcccgggcctactagtatggactggatttggcgcatccttttccttgtcggcgctgctaccggcgcgcattccttcgaacaagttcagcttcaacagcctggcgctgagctggtcaaacctggcgcttctgtgaagatgagctgcaaagccagcggctacgccttcagcagctactggatcaactggatgaagcagaaacccggccagggactcgaatggatcggccaaatctatcccggcgacggcgacaccaactacaacggcaagttcaagggcagagccacactgaccgccgatacctctagcagcacagcctacatgcagctgagcagcctgaccagcgaagatagcgccgtgtacttctgtgcccggtccatcacaacagtcgtgggctgcgctatggactattggggccagggaacaagcgtgaccgtgtctagtacgcgtgtcgagaaagaacatccacagcttggcgctggcaccgtcctgttgcttagagccggattctatgccgtcagcttcctgtccgtggctgtggggtctacagtgtattaccagggaaaatgtctcacctggaaaggccccagacgccagcttccagctgttgttcctgctccactgccaccaccttgtggctcctctgctcacttgcttccaccagtgcctggcggacgcgccaagagaagcggatctggcgtgaagcagaccctgaatttcgacctgctgaagctggctggcgacgtggaatccaacccaggcccttctagaggccatatgaccgagtacaagcccacggtgcgcctcgccacccgcgacgacgtccccagggccgtacgcaccctcgccgccgcgttcgccgactaccccgccacgcgccacaccgtcgatccggaccgccacatcgagcgggtcaccgagctgcaagaactcttcctcacgcgcgtcgggctcgacatcggcaaggtgtgggtcgcggacgacggcgccgcggtggcggtctggaccacgccggagagcgtcgaagcgggggcggtgttcgccgagatcggcccgcgcatggccgagttgagcggttcccggctggccgcgcagcaacagatggaaggcctcctggcgccgcaccggcccaaggagcccgcgtggttcctggccaccgtcggcgtctcgcccgaccaccagggcaagggtctgggcagcgccgtcgtgctccccggagtggaggcggccgagcgcgccggggtgcccgccttcctggagacctccgcgccccgcaacctccccttctacgagcggctcggcttcaccgtcaccgccgacgtcgaggtgcccgaaggaccgcgcacctggtgcatgacccgcaagcccggtgcctga

SEQ ID NO: 1705 - DNA, 2229 bp, Artificial Sequence
  Synthetic Polynucleotide
atggccttaccagtgaccgccttgctcctgccgctggccttgctgctccacgccgccaggccggcatgcgaagtgcagctgcttgaaagtggcggcggactgattcagcctggcggatctctgagactgagctgtgccgccagcggcttcaccttttctagccacgccatgacctgggtccgacaggcacctggaaaagggcttgaatgggtgtccgccatcagcggctctggcgattacacacactacgccgacagcgtgaagggcagattcaccatcagcagagacaacagcaagaacaccgtgtacctccagatgaacagcctgagagccgaggacagcgccgtgtattattgcgccaaggatgaggatggcggcagcctgcttggacacagaggacaaggcaccctggtcaccgtttcttccggtaccggcggaggcggatctggcggcggaggtagcggtggcggaggatctgaattcggatctctcgaggtggtggaaaaagagcaccctcagctcggagccggaacagtgctgcttctgagagccggcttttacgccgtgtcctttctgtctgtggccgtgggcagcaccgtgtactatcagggcaagtgcctgacctggaagggacctagaaggcaactgcctgctgtggtgcctgctcctttgcctcctccatgtggaagctctgcccatctgctgccacctgttccaggcggaagggccaagcgatctggatctggagcaacaaacttctcactactcaaacaagcaggtgacgtggaggagaatcccgggcctactagtgccaccatggactggatttggcgcatccttttccttgtcggcgctgctaccggcgcccattccgggcccgaagtgcagctggttgaatctggcggaggactggttcaggctggcggatctctgagactgtcttgtgccgccagcggcagaacctttagcatgggctggtttagacaggcccctggcaaagagagagagttcgtcgccgccatcacatactctggcggcagcccttactacgccgactctgtgaagggcagattcaccatcagccgggacaacgccaagaacaccgtgtacctccagatgaacagcctgaagcctgaggacaccgccgtgtactactgcgccgccaatccaacatacggcagcgactggaacgccgagaattggggccagggaacccaagtgacagtgtctagcggatccggcggcggaggatctggcggaggcggatctgggggcggaggctctttcgaaggcagcacgcgtgtcgagaaagaacatccacagcttggcgctggcaccgtcctgttgcttagagccggattctatgccgtcagcttcctgtccgtggctgtggggtctacagtgtattaccagggaaaatgtctcacctggaaaggccccagacgccagcttccagctgttgttcctgctccactgccaccaccttgtggctcctctgctcacttgcttccaccagtgcctggcggacgcgccaagagaagcggatctggcgtgaagcagaccctgaatttcgacctgctgaagctggctggcgacgtggaatccaacccaggcccttctagaggccatatgaccgagtacaagcccacggtgcgcctcgccacccgcgacgacgtccccagggccgtacgcaccctcgccgccgcgttcgccgactaccccgccacgcgccacaccgtcgatccggaccgccacatcgagcgggtcaccgagctgcaagaactcttcctcacgcgcgtcgggctcgacatcggcaaggtgtgggtcgcggacgacggcgccgcggtggcggtctggaccacgccggagagcgtcgaagcgggggcggtgttcgccgagatcggcccgcgcatggccgagttgagcggttcccggctggccgcgcagcaacagatggaaggcctcctggcgccgcaccggcccaaggagcccgcgtggttcctggccaccgtcggcgtctcgcccgaccaccagggcaagggtctgggcagcgccgtcgtgctccccggagtggaggcggccgagcgcgccggggtgcccgccttcctggagacctccgcgccccgcaacctccccttctacgagcggctcggcttcaccgtcaccgccgacgtcgaggtgcccgaaggaccgcgcacctggtgcatgacccgcaagcccggtgcctga

SEQ ID NO: 1706 - DNA, 2679 bp, Artificial Sequence
  Synthetic Polynucleotide
atggccttaccagtgaccgccttgctcctgccgctggccttgctgctccacgccgccaggccggacatccagatgacacagagccctagcagcctgtctgccagcgtgggagacagagtgaccatcacatgcaaggccagcgaccacatcaacaactggctggcctggtatcagcagaagcctggacaggcccctaagctgctgatctacggcgctaccacactggaaacaggcgtgcccagcagattttctggcagcggctctggcaccgactacaccctgacaatatccagcctccagcctgaggacttcgccacctactactgtcagcagagctggaacaccccttggacattcggccagggcaccaagctggaaatcaagagactcgagggacagcctaaggccaatcctaccgtgacactgttccctccaagcagcgaagaactccaggccaacaaggccacacttgtgtgcctgatctccgacttctaccctggggctgtgacagtggcttggaaggccgatggatctcctgtgaaagccggcgtggaaaccaccaagccatccaagcagagcaacaacaaatacgccgccagctcctacctgagcctgacacctgagcagtggaagtcccacagatcctacagctgccaagtgacccacgaaggcagcaccgtggaaaagacagtggcccctacagagtgcagcggatccgtggtggaaaaagagcaccctcagctcggagccggaacagtgctgcttctgagagccggcttttacgccgtgtcctttctgtctgtggccgtgggcagcaccgtgtactatcagggcaagtgcctgacctggaagggacctagaaggcaactgcctgctgtggtgcctgctcctttgcctcctccatgtggaagctctgcccatctgctgccacctgttccaggcggaagggccaagcgatctggatctggagcaacaaacttctcactactcaaacaagcaggtgacgtggaggagaatcccgggcctactagtatggactggatttggcgcatccttttccttgtcggcgctgctaccggcgcgcattccttcgaacaagttcagcttcaacagcctggcgctgagctggtcaaacctggcgcttctgtgaagatgagctgcaaagccagcggctacgccttcagcagctactggatcaactggatgaagcagaaacccggccagggactcgaatggatcggccaaatctatcccggcgacggcgacaccaactacaacggcaagttcaagggcagagccacactgaccgccgatacctctagcagcacagcctacatgcagctgagcagcctgaccagcgaagatagcgccgtgtacttctgtgcccggtccatcacaacagtcgtgggctgcgctatggactattggggccagggaacaagcgtgaccgtgtctagtacgcgtgcctctacaaagggaccctccgtgtttcctctggctcccagcagcaagtctacaagcggaggaacagccgctctgggctgcctggtcaaggattactttcccgagcctgtgaccgtgtcctggaatagcggagcactgacaagcggcgtgcacacctttccagccgtgctgcaaagcagcggcctgtactctctgagcagcgtggtcacagtgcctagctctagcctgggcacccagacctacatctgcaatgtgaaccacaagcctagcaacaccaaggtggacaagagagtggaacccaagagctgtggtaccgtcgagaaagaacatccacagcttggcgctggcaccgtcctgttgcttagagccggattctatgccgtcagcttcctgtccgtggctgtggggtctacagtgtattaccagggaaaatgtctcacctggaaaggccccagacgccagcttccagctgttgttcctgctccactgccaccaccttgtggctcctctgctcacttgcttccaccagtgcctggcggacgcgccaagagaagcggatctggcgtgaagcagaccctgaatttcgacctgctgaagctggctggcgacgtggaatccaacccaggcccttctagaggcgggatccacaccatggctacctacgaggtgctgtgcgaggtggcaagaaagctgggcaccgacgacagagaagtggtgctgttcctgctgaacgtgttcatccctcagcctacactggcccagctgatcggtgcactgagagccctgaaagaggaaggccggctgacctttcctctgctggccgaatgcctgttcagagccggaagaagggatctgctgcgggacctgctgcatctggaccccagatttctggaaagacacctggccggcaccatgagctacttcagcccttaccagctgaccgtgctgcacgttgacggcgaactgtgcgccagagatattcggagcctgatcttcctgagcaaggacaccatcggcagccggtctacccctcagacatttctgcactgggtgtactgcatggaaaacctggacctgctcggccccacagatgtggatgccctgatgtccatgctgagaagcctgagcagagtggacctccagagacaggtgcagacactgatgggactgcacctgagcggacctagccacagccagcactacagacacacccct

SEQ ID NO: 1707 - DNA, 2838 bp, Artificial Sequence
  Synthetic Polynucleotide
atggccttaccagtgaccgccttgctcctgccgctggccttgctgctccacgccgccaggccggacatccagatgacacagagccctagcagcctgtctgccagcgtgggagacagagtgaccatcacatgcaaggccagcgaccacatcaacaactggctggcctggtatcagcagaagcctggacaggcccctaagctgctgatctacggcgctaccacactggaaacaggcgtgcccagcagattttctggcagcggctctggcaccgactacaccctgacaatatccagcctccagcctgaggacttcgccacctactactgtcagcagagctggaacaccccttggacattcggccagggcaccaagctggaaatcaagagactcgagggacagcctaaggccaatcctaccgtgacactgttccctccaagcagcgaagaactccaggccaacaaggccacacttgtgtgcctgatctccgacttctaccctggggctgtgacagtggcttggaaggccgatggatctcctgtgaaagccggcgtggaaaccaccaagccatccaagcagagcaacaacaaatacgccgccagctcctacctgagcctgacacctgagcagtggaagtcccacagatcctacagctgccaagtgacccacgaaggcagcaccgtggaaaagacagtggcccctacagagtgcagcggatccgtggtggaaaaagagcaccctcagctcggagccggaacagtgctgcttctgagagccggcttttacgccgtgtcctttctgtctgtggccgtgggcagcaccgtgtactatcagggcaagtgcctgacctggaagggacctagaaggcaactgcctgctgtggtgcctgctcctttgcctcctccatgtggaagctctgcccatctgctgccacctgttccaggcggaagggccaagcgatctggatctggagcaacaaacttctcactactcaaacaagcaggtgacgtggaggagaatcccgggcctactagtatggactggatttggcgcatccttttccttgtcggcgctgctaccggcgcgcattccttcgaacaagttcagcttcaacagcctggcgctgagctggtcaaacctggcgcttctgtgaagatgagctgcaaagccagcggctacgccttcagcagctactggatcaactggatgaagcagaaacccggccagggactcgaatggatcggccaaatctatcccggcgacggcgacaccaactacaacggcaagttcaagggcagagccacactgaccgccgatacctctagcagcacagcctacatgcagctgagcagcctgaccagcgaagatagcgccgtgtacttctgtgcccggtccatcacaacagtcgtgggctgcgctatggactattggggccagggaacaagcgtgaccgtgtctagtacgcgtgcctctacaaagggaccctccgtgtttcctctggctcccagcagcaagtctacaagcggaggaacagccgctctgggctgcctggtcaaggattactttcccgagcctgtgaccgtgtcctggaatagcggagcactgacaagcggcgtgcacacctttccagccgtgctgcaaagcagcggcctgtactctctgagcagcgtggtcacagtgcctagctctagcctgggcacccagacctacatctgcaatgtgaaccacaagcctagcaacaccaaggtggacaagagagtggaacccaagagctgtggtaccgtcgagaaagaacatccacagcttggcgctggcaccgtcctgttgcttagagccggattctatgccgtcagcttcctgtccgtggctgtggggtctacagtgtattaccagggaaaatgtctcacctggaaaggccccagacgccagcttccagctgttgttcctgctccactgccaccaccttgtggctcctctgctcacttgcttccaccagtgcctggcggacgcgccaagagaagcggatctggcgtgaagcagaccctgaatttcgacctgctgaagctggctggcgacgtggaatccaacccaggcccttctagaggcgggatccacaccatgtccgactccaaggaggtccctagccttccatttttgcgacacttgctcgaagagttggacagccatgaggacagcttgctgctgtttctgtgtcacgacgcggccccgggctgcacgacggtcacgcaagctttgtgctcgcttagccaacagcgcaagctgaccctcgcggctctggtcgagatgctctacgtgctgcagcgtatggatcttctcaagagccgcttcgggctcagcaaggagggggccgagcaattgctgggcacaagctttctcacgcgctaccgcaagctcatggtttgcgtgggtgaggagctcgactcgagcgagctacgcgctctacgcttgttcgcgtgcaacctgaatccgagcctgagcacggcgctttctgagagcagccgctttgtcgagcttgtactcgcgcttgaaaacgtaggactcgtctcgccatcgagtgtttccgtgcttgcggacatgttgcgcactcttcggcgcctcgatttgtgccagcagcttgttgagtacgaacaacaagagcaagccaggtaccgttactgttacgcggcctcgccctcattgccagttcgtacgttacgtcgggggcacggcgcgagtgaacacgagcagctgtgcatgcccgtgcaagaatcctctgacagccccgagctgctgcgcacgcccgtacaagaatcctccagcgacagccccgagcaaacgact

SEQ ID NO: 1708 - DNA, 2706 bp, Artificial Sequence
  Synthetic Polynucleotide
atggccttaccagtgaccgccttgctcctgccgctggccttgctgctccacgccgccaggccggacatccagatgacacagagccctagcagcctgtctgccagcgtgggagacagagtgaccatcacatgcaaggccagcgaccacatcaacaactggctggcctggtatcagcagaagcctggacaggcccctaagctgctgatctacggcgctaccacactggaaacaggcgtgcccagcagattttctggcagcggctctggcaccgactacaccctgacaatatccagcctccagcctgaggacttcgccacctactactgtcagcagagctggaacaccccttggacattcggccagggcaccaagctggaaatcaagagactcgagggacagcctaaggccaatcctaccgtgacactgttccctccaagcagcgaagaactccaggccaacaaggccacacttgtgtgcctgatctccgacttctaccctggggctgtgacagtggcttggaaggccgatggatctcctgtgaaagccggcgtggaaaccaccaagccatccaagcagagcaacaacaaatacgccgccagctcctacctgagcctgacacctgagcagtggaagtcccacagatcctacagctgccaagtgacccacgaaggcagcaccgtggaaaagacagtggcccctacagagtgcagcggatccgtggtggaaaaagagcaccctcagctcggagccggaacagtgctgcttctgagagccggcttttacgccgtgtcctttctgtctgtggccgtgggcagcaccgtgtactatcagggcaagtgcctgacctggaagggacctagaaggcaactgcctgctgtggtgcctgctcctttgcctcctccatgtggaagctctgcccatctgctgccacctgttccaggcggaagggccaagcgatctggatctggagcaacaaacttctcactactcaaacaagcaggtgacgtggaggagaatcccgggcctactagtatggactggatttggcgcatccttttccttgtcggcgctgctaccggcgcgcattccttcgaacaagttcagcttcaacagcctggcgctgagctggtcaaacctggcgcttctgtgaagatgagctgcaaagccagcggctacgccttcagcagctactggatcaactggatgaagcagaaacccggccagggactcgaatggatcggccaaatctatcccggcgacggcgacaccaactacaacggcaagttcaagggcagagccacactgaccgccgatacctctagcagcacagcctacatgcagctgagcagcctgaccagcgaagatagcgccgtgtacttctgtgcccggtccatcacaacagtcgtgggctgcgctatggactattggggccagggaacaagcgtgaccgtgtctagtacgcgtgcctctacaaagggaccctccgtgtttcctctggctcccagcagcaagtctacaagcggaggaacagccgctctgggctgcctggtcaaggattactttcccgagcctgtgaccgtgtcctggaatagcggagcactgacaagcggcgtgcacacctttccagccgtgctgcaaagcagcggcctgtactctctgagcagcgtggtcacagtgcctagctctagcctgggcacccagacctacatctgcaatgtgaaccacaagcctagcaacaccaaggtggacaagagagtggaacccaagagctgtggtaccgtcgagaaagaacatccacagcttggcgctggcaccgtcctgttgcttagagccggattctatgccgtcagcttcctgtccgtggctgtggggtctacagtgtattaccagggaaaatgtctcacctggaaaggccccagacgccagcttccagctgttgttcctgctccactgccaccaccttgtggctcctctgctcacttgcttccaccagtgcctggcggacgcgccaagagaagcggatctggcgtgaagcagaccctgaatttcgacctgctgaagctggctggcgacgtggaatccaacccaggcccttctagaggccatatgaccgagtacaagcccacggtgcgcctcgccacccgcgacgacgtccccagggccgtacgcaccctcgccgccgcgttcgccgactaccccgccacgcgccacaccgtcgatccggaccgccacatcgagcgggtcaccgagctgcaagaactcttcctcacgcgcgtcgggctcgacatcggcaaggtgtgggtcgcggacgacggcgccgcggtggcggtctggaccacgccggagagcgtcgaagcgggggcggtgttcgccgagatcggcccgcgcatggccgagttgagcggttcccggctggccgcgcagcaacagatggaaggcctcctggcgccgcaccggcccaaggagcccgcgtggttcctggccaccgtcggcgtctcgcccgaccaccagggcaagggtctgggcagcgccgtcgtgctccccggagtggaggcggccgagcgcgccggggtgcccgccttcctggagacctccgcgccccgcaacctccccttctacgagcggctcggcttcaccgtcaccgccgacgtcgaggtgcccgaaggaccgcgcacctggtgcatgacccgcaagcccggtgcctga

SEQ ID NO: 1709 - DNA, 3117 bp, Artificial Sequence
  Synthetic Polynucleotide
atggccttaccagtgaccgccttgctcctgccgctggccttgctgctccacgccgccaggccggaagtgcagctggttgaatctggcggaggactggttcaggctggcggatctctgagactgtcttgtgccgccagcggcagaacctttagcatgggctggtttagacaggcccctggcaaagagagagagttcgtcgccgccatcacatactctggcggcagcccttactacgccgactctgtgaagggcagattcaccatcagccgggacaacgccaagaacaccgtgtacctccagatgaacagcctgaagcctgaggacaccgccgtgtactactgcgccgccaatccaacatacggcagcgactggaacgccgagaattggggccagggaacccaagtgacagtgtctagcggtaccggcggaggcggatctggcggcggaggtagcggtggcggaggatctgaattcgacatccagatgacacagagccctagcagcctgtctgccagcgtgggagacagagtgaccatcacatgcaaggccagcgaccacatcaacaactggctggcctggtatcagcagaagcctggacaggcccctaagctgctgatctacggcgctaccacactggaaacaggcgtgcccagcagattttctggcagcggctctggcaccgactacaccctgacaatatccagcctccagcctgaggacttcgccacctactactgtcagcagagctggaacaccccttggacattcggccagggcaccaagctggaaatcaagagactcgagggacagcctaaggccaatcctaccgtgacactgttccctccaagcagcgaagaactccaggccaacaaggccacacttgtgtgcctgatctccgacttctaccctggggctgtgacagtggcttggaaggccgatggatctcctgtgaaagccggcgtggaaaccaccaagccatccaagcagagcaacaacaaatacgccgccagctcctacctgagcctgacacctgagcagtggaagtcccacagatcctacagctgccaagtgacccacgaaggcagcaccgtggaaaagacagtggcccctacagagtgcagcggatccgtggtggaaaaagagcaccctcagctcggagccggaacagtgctgcttctgagagccggcttttacgccgtgtcctttctgtctgtggccgtgggcagcaccgtgtactatcagggcaagtgcctgacctggaagggacctagaaggcaactgcctgctgtggtgcctgctcctttgcctcctccatgtggaagctctgcccatctgctgccacctgttccaggcggaagggccaagcgatctggatctggagcaacaaacttctcactactcaaacaagcaggtgacgtggaggagaatcccgggcctactagtatggactggatttggcgcatccttttccttgtcggcgctgctaccggcgcgcattccttcgaacaagttcagcttcaacagcctggcgctgagctggtcaaacctggcgcttctgtgaagatgagctgcaaagccagcggctacgccttcagcagctactggatcaactggatgaagcagaaacccggccagggactcgaatggatcggccaaatctatcccggcgacggcgacaccaactacaacggcaagttcaagggcagagccacactgaccgccgatacctctagcagcacagcctacatgcagctgagcagcctgaccagcgaagatagcgccgtgtacttctgtgcccggtccatcacaacagtcgtgggctgcgctatggactattggggccagggaacaagcgtgaccgtgtctagtacgcgtgcctctacaaagggaccctccgtgtttcctctggctcccagcagcaagtctacaagcggaggaacagccgctctgggctgcctggtcaaggattactttcccgagcctgtgaccgtgtcctggaatagcggagcactgacaagcggcgtgcacacctttccagccgtgctgcaaagcagcggcctgtactctctgagcagcgtggtcacagtgcctagctctagcctgggcacccagacctacatctgcaatgtgaaccacaagcctagcaacaccaaggtggacaagagagtggaacccaagagctgtggtaccgtcgagaaagaacatccacagcttggcgctggcaccgtcctgttgcttagagccggattctatgccgtcagcttcctgtccgtggctgtggggtctacagtgtattaccagggaaaatgtctcacctggaaaggccccagacgccagcttccagctgttgttcctgctccactgccaccaccttgtggctcctctgctcacttgcttccaccagtgcctggcggacgcgccaagagaagcggatctggcgtgaagcagaccctgaatttcgacctgctgaagctggctggcgacgtggaatccaacccaggcccttctagaggccatatgaccgagtacaagcccacggtgcgcctcgccacccgcgacgacgtccccagggccgtacgcaccctcgccgccgcgttcgccgactaccccgccacgcgccacaccgtcgatccggaccgccacatcgagcgggtcaccgagctgcaagaactcttcctcacgcgcgtcgggctcgacatcggcaaggtgtgggtcgcggacgacggcgccgcggtggcggtctggaccacgccggagagcgtcgaagcgggggcggtgttcgccgagatcggcccgcgcatggccgagttgagcggttcccggctggccgcgcagcaacagatggaaggcctcctggcgccgcaccggcccaaggagcccgcgtggttcctggccaccgtcggcgtctcgcccgaccaccagggcaagggtctgggcagcgccgtcgtgctccccggagtggaggcggccgagcgcgccggggtgcccgccttcctggagacctccgcgccccgcaacctccccttctacgagcggctcggcttcaccgtcaccgccgacgtcgaggtgcccgaaggaccgcgcacctggtgcatgacccgcaagcccggtgcctga

SEQ ID NO: 1710 - DNA, 3528 bp, Artificial Sequence
  Synthetic Polynucleotide
atggccttaccagtgaccgccttgctcctgccgctggccttgctgctccacgccgccaggccggaagtgcagctggttgaatctggcggaggactggttcaggctggcggatctctgagactgtcttgtgccgccagcggcagaacctttagcatgggctggtttagacaggcccctggcaaagagagagagttcgtcgccgccatcacatactctggcggcagcccttactacgccgactctgtgaagggcagattcaccatcagccgggacaacgccaagaacaccgtgtacctccagatgaacagcctgaagcctgaggacaccgccgtgtactactgcgccgccaatccaacatacggcagcgactggaacgccgagaattggggccagggaacccaagtgacagtgtctagcggtaccggcggaggcggatctggcggcggaggtagcggtggcggaggatctgaattcgacatccagatgacacagagccctagcagcctgtctgccagcgtgggagacagagtgaccatcacatgcaaggccagcgaccacatcaacaactggctggcctggtatcagcagaagcctggacaggcccctaagctgctgatctacggcgctaccacactggaaacaggcgtgcccagcagattttctggcagcggctctggcaccgactacaccctgacaatatccagcctccagcctgaggacttcgccacctactactgtcagcagagctggaacaccccttggacattcggccagggcaccaagctggaaatcaagagactcgagggacagcctaaggccaatcctaccgtgacactgttccctccaagcagcgaagaactccaggccaacaaggccacacttgtgtgcctgatctccgacttctaccctggggctgtgacagtggcttggaaggccgatggatctcctgtgaaagccggcgtggaaaccaccaagccatccaagcagagcaacaacaaatacgccgccagctcctacctgagcctgacacctgagcagtggaagtcccacagatcctacagctgccaagtgacccacgaaggcagcaccgtggaaaagacagtggcccctacagagtgcagcggatccgtggtggaaaaagagcaccctcagctcggagccggaacagtgctgcttctgagagccggcttttacgccgtgtcctttctgtctgtggccgtgggcagcaccgtgtactatcagggcaagtgcctgacctggaagggacctagaaggcaactgcctgctgtggtgcctgctcctttgcctcctccatgtggaagctctgcccatctgctgccacctgttccaggcggaagggccaagcgatctggatctggagcaacaaacttctcactactcaaacaagcaggtgacgtggaggagaatcccgggcctactagtatggactggatttggcgcatccttttccttgtcggcgctgctaccggcgcgcattccgggcccgaagtgcaactggttgaatccggtggcggcctggtgcaagcaggcggatctctcagacttagctgtgccgcctccggcagaaccttcacaatgggatggtttaggcaggctccagggaaagagagagagttcgtcgccgccatctctctgtctcccacactggcctactacgccgactctgtgaaaggccggttcaccatctccagagataatgccaagaacaccgtggtgctgcaaatgaactctctgaaacccgaggatacagccctgtactattgtgccgctgaccggaagtccgtgatgagcatcagacccgattactggggacagggcacacaagtcacagtgtcctctggatccggcggcggaggatctggcggaggcggatctgggggcggaggctctttcgaacaagttcagcttcaacagcctggcgctgagctggtcaaacctggcgcttctgtgaagatgagctgcaaagccagcggctacgccttcagcagctactggatcaactggatgaagcagaaacccggccagggactcgaatggatcggccaaatctatcccggcgacggcgacaccaactacaacggcaagttcaagggcagagccacactgaccgccgatacctctagcagcacagcctacatgcagctgagcagcctgaccagcgaagatagcgccgtgtacttctgtgcccggtccatcacaacagtcgtgggctgcgctatggactattggggccagggaacaagcgtgaccgtgtctagtacgcgtgcctctacaaagggaccctccgtgtttcctctggctcccagcagcaagtctacaagcggaggaacagccgctctgggctgcctggtcaaggattactttcccgagcctgtgaccgtgtcctggaatagcggagcactgacaagcggcgtgcacacctttccagccgtgctgcaaagcagcggcctgtactctctgagcagcgtggtcacagtgcctagctctagcctgggcacccagacctacatctgcaatgtgaaccacaagcctagcaacaccaaggtggacaagagagtggaacccaagagctgtggtaccgtcgagaaagaacatccacagcttggcgctggcaccgtcctgttgcttagagccggattctatgccgtcagcttcctgtccgtggctgtggggtctacagtgtattaccagggaaaatgtctcacctggaaaggccccagacgccagcttccagctgttgttcctgctccactgccaccaccttgtggctcctctgctcacttgcttccaccagtgcctggcggacgcgccaagagaagcggatctggcgtgaagcagaccctgaatttcgacctgctgaagctggctggcgacgtggaatccaacccaggcccttctagaggccatatgaccgagtacaagcccacggtgcgcctcgccacccgcgacgacgtccccagggccgtacgcaccctcgccgccgcgttcgccgactaccccgccacgcgccacaccgtcgatccggaccgccacatcgagcgggtcaccgagctgcaagaactcttcctcacgcgcgtcgggctcgacatcggcaaggtgtgggtcgcggacgacggcgccgcggtggcggtctggaccacgccggagagcgtcgaagcgggggcggtgttcgccgagatcggcccgcgcatggccgagttgagcggttcccggctggccgcgcagcaacagatggaaggcctcctggcgccgcaccggcccaaggagcccgcgtggttcctggccaccgtcggcgtctcgcccgaccaccagggcaagggtctgggcagcgccgtcgtgctccccggagtggaggcggccgagcgcgccggggtgcccgccttcctggagacctccgcgccccgcaacctccccttctacgagcggctcggcttcaccgtcaccgccgacgtcgaggtgcccgaaggaccgcgcacctggtgcatgacccgcaagcccggtgcctga

SEQ ID NO: 1711 - DNA, 2727 bp, Artificial Sequence
  Synthetic Polynucleotide
atggccttaccagtgaccgccttgctcctgccgctggccttgctgctccacgccgccaggccggaagtgcagctggttgaatctggcggaggactggttcaggctggcggatctctgagactgtcttgtgccgccagcggcagaacctttagcatgggctggtttagacaggcccctggcaaagagagagagttcgtcgccgccatcacatactctggcggcagcccttactacgccgactctgtgaagggcagattcaccatcagccgggacaacgccaagaacaccgtgtacctccagatgaacagcctgaagcctgaggacaccgccgtgtactactgcgccgccaatccaacatacggcagcgactggaacgccgagaattggggccagggaacccaagtgacagtgtctagcctcgagggacagcctaaggccaatcctaccgtgacactgttccctccaagcagcgaagaactccaggccaacaaggccacacttgtgtgcctgatctccgacttctaccctggggctgtgacagtggcttggaaggccgatggatctcctgtgaaagccggcgtggaaaccaccaagccatccaagcagagcaacaacaaatacgccgccagctcctacctgagcctgacacctgagcagtggaagtcccacagatcctacagctgccaagtgacccacgaaggcagcaccgtggaaaagacagtggcccctacagagtgcagcggatccgtggtggaaaaagagcaccctcagctcggagccggaacagtgctgcttctgagagccggcttttacgccgtgtcctttctgtctgtggccgtgggcagcaccgtgtactatcagggcaagtgcctgacctggaagggacctagaaggcaactgcctgctgtggtgcctgctcctttgcctcctccatgtggaagctctgcccatctgctgccacctgttccaggcggaagggccaagcgatctggatctggagcaacaaacttctcactactcaaacaagcaggtgacgtggaggagaatcccgggcctactagtatggactggatttggcgcatccttttccttgtcggcgctgctaccggcgcgcattccgggcccgaagtgcaactggttgaatccggtggcggcctggtgcaagcaggcggatctctcagacttagctgtgccgcctccggcagaaccttcacaatgggatggtttaggcaggctccagggaaagagagagagttcgtcgccgccatctctctgtctcccacactggcctactacgccgactctgtgaaaggccggttcaccatctccagagataatgccaagaacaccgtggtgctgcaaatgaactctctgaaacccgaggatacagccctgtactattgtgccgctgaccggaagtccgtgatgagcatcagacccgattactggggacagggcacacaagtcacagtgtcctctacgcgtgcctctacaaagggaccctccgtgtttcctctggctcccagcagcaagtctacaagcggaggaacagccgctctgggctgcctggtcaaggattactttcccgagcctgtgaccgtgtcctggaatagcggagcactgacaagcggcgtgcacacctttccagccgtgctgcaaagcagcggcctgtactctctgagcagcgtggtcacagtgcctagctctagcctgggcacccagacctacatctgcaatgtgaaccacaagcctagcaacaccaaggtggacaagagagtggaacccaagagctgtggtaccgtcgagaaagaacatccacagcttggcgctggcaccgtcctgttgcttagagccggattctatgccgtcagcttcctgtccgtggctgtggggtctacagtgtattaccagggaaaatgtctcacctggaaaggccccagacgccagcttccagctgttgttcctgctccactgccaccaccttgtggctcctctgctcacttgcttccaccagtgcctggcggacgcgccaagagaagcggatctggcgtgaagcagaccctgaatttcgacctgctgaagctggctggcgacgtggaatccaacccaggcccttctagaggccatatgaccgagtacaagcccacggtgcgcctcgccacccgcgacgacgtccccagggccgtacgcaccctcgccgccgcgttcgccgactaccccgccacgcgccacaccgtcgatccggaccgccacatcgagcgggtcaccgagctgcaagaactcttcctcacgcgcgtcgggctcgacatcggcaaggtgtgggtcgcggacgacggcgccgcggtggcggtctggaccacgccggagagcgtcgaagcgggggcggtgttcgccgagatcggcccgcgcatggccgagttgagcggttcccggctggccgcgcagcaacagatggaaggcctcctggcgccgcaccggcccaaggagcccgcgtggttcctggccaccgtcggcgtctcgcccgaccaccagggcaagggtctgggcagcgccgtcgtgctccccggagtggaggcggccgagcgcgccggggtgcccgccttcctggagacctccgcgccccgcaacctccccttctacgagcggctcggcttcaccgtcaccgccgacgtcgaggtgcccgaaggaccgcgcacctggtgcatgacccgcaagcccggtgcctga

SEQ ID NO: 1712 - DNA, 2751 bp, Artificial Sequence
  Synthetic Polynucleotide
atggccttaccagtgaccgccttgctcctgccgctggccttgctgctccacgccgccaggccggacatccagatgacacagagccctagcagcctgtctgccagcgtgggagacagagtgaccatcacatgcaaggccagcgaccacatcaacaactggctggcctggtatcagcagaagcctggacaggcccctaagctgctgatctacggcgctaccacactggaaacaggcgtgcccagcagattttctggcagcggctctggcaccgactacaccctgacaatatccagcctccagcctgaggacttcgccacctactactgtcagcagagctggaacaccccttggacattcggccagggcaccaagctggaaatcaagagactcgaggacctgaagaacgtgttcccacctgaggtggccgtgttcgagcctagcgaggccgagatcagccacacccagaaagccaccctcgtgtgcctggctaccggcttctaccccgaccatgtggaactgtcttggtgggtcaacggcaaagaggtgcacagcggcgtgtctaccgacccccagccactgaaagaacagcccgccctgaacgacagccggtactgcctgagcagcagactgagagtgtccgccaccttctggcagaacccccggaaccacttcagatgccaggtgcagttctacggcctgagcgagaacgacgagtggacccaggacagagccaagcccgtgacccagatcgtgtctgccgaagcctggggcagagccgattgcggatccgtggtggaaaaagagcaccctcagctcggagccggaacagtgctgcttctgagagccggcttttacgccgtgtcctttctgtctgtggccgtgggcagcaccgtgtactatcagggcaagtgcctgacctggaagggacctagaaggcaactgcctgctgtggtgcctgctcctttgcctcctccatgtggaagctctgcccatctgctgccacctgttccaggcggaagggccaagcgatctggatctggagcaacaaacttctcactactcaaacaagcaggtgacgtggaggagaatcccgggcctactagtatggactggatttggcgcatccttttccttgtcggcgctgctaccggcgcgcattccttcgaacaagttcagcttcaacagcctggcgctgagctggtcaaacctggcgcttctgtgaagatgagctgcaaagccagcggctacgccttcagcagctactggatcaactggatgaagcagaaacccggccagggactcgaatggatcggccaaatctatcccggcgacggcgacaccaactacaacggcaagttcaagggcagagccacactgaccgccgatacctctagcagcacagcctacatgcagctgagcagcctgaccagcgaagatagcgccgtgtacttctgtgcccggtccatcacaacagtcgtgggctgcgctatggactattggggccagggaacaagcgtgaccgtgtctagtacgcgtatccagaaccctgatcctgccgtgtaccagctgcgggatagcaagagcagcgacaagagcgtgtgtctgttcaccgacttcgacagccagaccaacgtgtcccagagcaaggactccgacgtgtacatcaccgataagaccgtgctggacatgcggagcatggacttcaagagcaactccgccgtggcctggtccaacaagtccgatttcgcctgcgccaacgccttcaacaacagcattatccccgaggacacattcttcccaagccccgagagcagctgcggtaccgtcgagaaagaacatccacagcttggcgctggcaccgtcctgttgcttagagccggattctatgccgtcagcttcctgtccgtggctgtggggtctacagtgtattaccagggaaaatgtctcacctggaaaggccccagacgccagcttccagctgttgttcctgctccactgccaccaccttgtggctcctctgctcacttgcttccaccagtgcctggcggacgcgccaagagaagcggatctggcgtgaagcagaccctgaatttcgacctgctgaagctggctggcgacgtggaatccaacccaggcccttctagaggccatatgaccgagtacaagcccacggtgcgcctcgccacccgcgacgacgtccccagggccgtacgcaccctcgccgccgcgttcgccgactaccccgccacgcgccacaccgtcgatccggaccgccacatcgagcgggtcaccgagctgcaagaactcttcctcacgcgcgtcgggctcgacatcggcaaggtgtgggtcgcggacgacggcgccgcggtggcggtctggaccacgccggagagcgtcgaagcgggggcggtgttcgccgagatcggcccgcgcatggccgagttgagcggttcccggctggccgcgcagcaacagatggaaggcctcctggcgccgcaccggcccaaggagcccgcgtggttcctggccaccgtcggcgtctcgcccgaccaccagggcaagggtctgggcagcgccgtcgtgctccccggagtggaggcggccgagcgcgccggggtgcccgccttcctggagacctccgcgccccgcaacctccccttctacgagcggctcggcttcaccgtcaccgccgacgtcgaggtgcccgaaggaccgcgcacctggtgcatgacccgcaagcccggtgcctga

SEQ ID NO: 1713 - DNA, 3162 bp, Artificial Sequence
  Synthetic Polynucleotide
atggccttaccagtgaccgccttgctcctgccgctggccttgctgctccacgccgccaggccggaagtgcagctggttgaatctggcggaggactggttcaggctggcggatctctgagactgtcttgtgccgccagcggcagaacctttagcatgggctggtttagacaggcccctggcaaagagagagagttcgtcgccgccatcacatactctggcggcagcccttactacgccgactctgtgaagggcagattcaccatcagccgggacaacgccaagaacaccgtgtacctccagatgaacagcctgaagcctgaggacaccgccgtgtactactgcgccgccaatccaacatacggcagcgactggaacgccgagaattggggccagggaacccaagtgacagtgtctagcggtaccggcggaggcggatctggcggcggaggtagcggtggcggaggatctgaattcgacatccagatgacacagagccctagcagcctgtctgccagcgtgggagacagagtgaccatcacatgcaaggccagcgaccacatcaacaactggctggcctggtatcagcagaagcctggacaggcccctaagctgctgatctacggcgctaccacactggaaacaggcgtgcccagcagattttctggcagcggctctggcaccgactacaccctgacaatatccagcctccagcctgaggacttcgccacctactactgtcagcagagctggaacaccccttggacattcggccagggcaccaagctggaaatcaagagactcgaggacctgaagaacgtgttcccacctgaggtggccgtgttcgagcctagcgaggccgagatcagccacacccagaaagccaccctcgtgtgcctggctaccggcttctaccccgaccatgtggaactgtcttggtgggtcaacggcaaagaggtgcacagcggcgtgtctaccgacccccagccactgaaagaacagcccgccctgaacgacagccggtactgcctgagcagcagactgagagtgtccgccaccttctggcagaacccccggaaccacttcagatgccaggtgcagttctacggcctgagcgagaacgacgagtggacccaggacagagccaagcccgtgacccagatcgtgtctgccgaagcctggggcagagccgattgcggatccgtggtggaaaaagagcaccctcagctcggagccggaacagtgctgcttctgagagccggcttttacgccgtgtcctttctgtctgtggccgtgggcagcaccgtgtactatcagggcaagtgcctgacctggaagggacctagaaggcaactgcctgctgtggtgcctgctcctttgcctcctccatgtggaagctctgcccatctgctgccacctgttccaggcggaagggccaagcgatctggatctggagcaacaaacttctcactactcaaacaagcaggtgacgtggaggagaatcccgggcctactagtatggactggatttggcgcatccttttccttgtcggcgctgctaccggcgcgcattccttcgaacaagttcagcttcaacagcctggcgctgagctggtcaaacctggcgcttctgtgaagatgagctgcaaagccagcggctacgccttcagcagctactggatcaactggatgaagcagaaacccggccagggactcgaatggatcggccaaatctatcccggcgacggcgacaccaactacaacggcaagttcaagggcagagccacactgaccgccgatacctctagcagcacagcctacatgcagctgagcagcctgaccagcgaagatagcgccgtgtacttctgtgcccggtccatcacaacagtcgtgggctgcgctatggactattggggccagggaacaagcgtgaccgtgtctagtacgcgtatccagaaccctgatcctgccgtgtaccagctgcgggatagcaagagcagcgacaagagcgtgtgtctgttcaccgacttcgacagccagaccaacgtgtcccagagcaaggactccgacgtgtacatcaccgataagaccgtgctggacatgcggagcatggacttcaagagcaactccgccgtggcctggtccaacaagtccgatttcgcctgcgccaacgccttcaacaacagcattatccccgaggacacattcttcccaagccccgagagcagctgcggtaccgtcgagaaagaacatccacagcttggcgctggcaccgtcctgttgcttagagccggattctatgccgtcagcttcctgtccgtggctgtggggtctacagtgtattaccagggaaaatgtctcacctggaaaggccccagacgccagcttccagctgttgttcctgctccactgccaccaccttgtggctcctctgctcacttgcttccaccagtgcctggcggacgcgccaagagaagcggatctggcgtgaagcagaccctgaatttcgacctgctgaagctggctggcgacgtggaatccaacccaggcccttctagaggccatatgaccgagtacaagcccacggtgcgcctcgccacccgcgacgacgtccccagggccgtacgcaccctcgccgccgcgttcgccgactaccccgccacgcgccacaccgtcgatccggaccgccacatcgagcgggtcaccgagctgcaagaactcttcctcacgcgcgtcgggctcgacatcggcaaggtgtgggtcgcggacgacggcgccgcggtggcggtctggaccacgccggagagcgtcgaagcgggggcggtgttcgccgagatcggcccgcgcatggccgagttgagcggttcccggctggccgcgcagcaacagatggaaggcctcctggcgccgcaccggcccaaggagcccgcgtggttcctggccaccgtcggcgtctcgcccgaccaccagggcaagggtctgggcagcgccgtcgtgctccccggagtggaggcggccgagcgcgccggggtgcccgccttcctggagacctccgcgccccgcaacctccccttctacgagcggctcggcttcaccgtcaccgccgacgtcgaggtgcccgaaggaccgcgcacctggtgcatgacccgcaagcccggtgcctga

SEQ ID NO: 1714 - DNA, 3573 bp, Artificial Sequence
  Synthetic Polynucleotide
atggccttaccagtgaccgccttgctcctgccgctggccttgctgctccacgccgccaggccggaagtgcagctggttgaatctggcggaggactggttcaggctggcggatctctgagactgtcttgtgccgccagcggcagaacctttagcatgggctggtttagacaggcccctggcaaagagagagagttcgtcgccgccatcacatactctggcggcagcccttactacgccgactctgtgaagggcagattcaccatcagccgggacaacgccaagaacaccgtgtacctccagatgaacagcctgaagcctgaggacaccgccgtgtactactgcgccgccaatccaacatacggcagcgactggaacgccgagaattggggccagggaacccaagtgacagtgtctagcggtaccggcggaggcggatctggcggcggaggtagcggtggcggaggatctgaattcgacatccagatgacacagagccctagcagcctgtctgccagcgtgggagacagagtgaccatcacatgcaaggccagcgaccacatcaacaactggctggcctggtatcagcagaagcctggacaggcccctaagctgctgatctacggcgctaccacactggaaacaggcgtgcccagcagattttctggcagcggctctggcaccgactacaccctgacaatatccagcctccagcctgaggacttcgccacctactactgtcagcagagctggaacaccccttggacattcggccagggcaccaagctggaaatcaagagactcgaggacctgaagaacgtgttcccacctgaggtggccgtgttcgagcctagcgaggccgagatcagccacacccagaaagccaccctcgtgtgcctggctaccggcttctaccccgaccatgtggaactgtcttggtgggtcaacggcaaagaggtgcacagcggcgtgtctaccgacccccagccactgaaagaacagcccgccctgaacgacagccggtactgcctgagcagcagactgagagtgtccgccaccttctggcagaacccccggaaccacttcagatgccaggtgcagttctacggcctgagcgagaacgacgagtggacccaggacagagccaagcccgtgacccagatcgtgtctgccgaagcctggggcagagccgattgcggatccgtggtggaaaaagagcaccctcagctcggagccggaacagtgctgcttctgagagccggcttttacgccgtgtcctttctgtctgtggccgtgggcagcaccgtgtactatcagggcaagtgcctgacctggaagggacctagaaggcaactgcctgctgtggtgcctgctcctttgcctcctccatgtggaagctctgcccatctgctgccacctgttccaggcggaagggccaagcgatctggatctggagcaacaaacttctcactactcaaacaagcaggtgacgtggaggagaatcccgggcctactagtatggactggatttggcgcatccttttccttgtcggcgctgctaccggcgcgcattccgggcccgaagtgcaactggttgaatccggtggcggcctggtgcaagcaggcggatctctcagacttagctgtgccgcctccggcagaaccttcacaatgggatggtttaggcaggctccagggaaagagagagagttcgtcgccgccatctctctgtctcccacactggcctactacgccgactctgtgaaaggccggttcaccatctccagagataatgccaagaacaccgtggtgctgcaaatgaactctctgaaacccgaggatacagccctgtactattgtgccgctgaccggaagtccgtgatgagcatcagacccgattactggggacagggcacacaagtcacagtgtcctctggatccggcggcggaggatctggcggaggcggatctgggggcggaggctctttcgaacaagttcagcttcaacagcctggcgctgagctggtcaaacctggcgcttctgtgaagatgagctgcaaagccagcggctacgccttcagcagctactggatcaactggatgaagcagaaacccggccagggactcgaatggatcggccaaatctatcccggcgacggcgacaccaactacaacggcaagttcaagggcagagccacactgaccgccgatacctctagcagcacagcctacatgcagctgagcagcctgaccagcgaagatagcgccgtgtacttctgtgcccggtccatcacaacagtcgtgggctgcgctatggactattggggccagggaacaagcgtgaccgtgtctagtacgcgtatccagaaccctgatcctgccgtgtaccagctgcgggatagcaagagcagcgacaagagcgtgtgtctgttcaccgacttcgacagccagaccaacgtgtcccagagcaaggactccgacgtgtacatcaccgataagaccgtgctggacatgcggagcatggacttcaagagcaactccgccgtggcctggtccaacaagtccgatttcgcctgcgccaacgccttcaacaacagcattatccccgaggacacattcttcccaagccccgagagcagctgcggtaccgtcgagaaagaacatccacagcttggcgctggcaccgtcctgttgcttagagccggattctatgccgtcagcttcctgtccgtggctgtggggtctacagtgtattaccagggaaaatgtctcacctggaaaggccccagacgccagcttccagctgttgttcctgctccactgccaccaccttgtggctcctctgctcacttgcttccaccagtgcctggcggacgcgccaagagaagcggatctggcgtgaagcagaccctgaatttcgacctgctgaagctggctggcgacgtggaatccaacccaggcccttctagaggccatatgaccgagtacaagcccacggtgcgcctcgccacccgcgacgacgtccccagggccgtacgcaccctcgccgccgcgttcgccgactaccccgccacgcgccacaccgtcgatccggaccgccacatcgagcgggtcaccgagctgcaagaactcttcctcacgcgcgtcgggctcgacatcggcaaggtgtgggtcgcggacgacggcgccgcggtggcggtctggaccacgccggagagcgtcgaagcgggggcggtgttcgccgagatcggcccgcgcatggccgagttgagcggttcccggctggccgcgcagcaacagatggaaggcctcctggcgccgcaccggcccaaggagcccgcgtggttcctggccaccgtcggcgtctcgcccgaccaccagggcaagggtctgggcagcgccgtcgtgctccccggagtggaggcggccgagcgcgccggggtgcccgccttcctggagacctccgcgccccgcaacctccccttctacgagcggctcggcttcaccgtcaccgccgacgtcgaggtgcccgaaggaccgcgcacctggtgcatgacccgcaagcccggtgcctga

SEQ ID NO: 1715 - DNA, 2772 bp, Artificial Sequence
  Synthetic Polynucleotide
atggccttaccagtgaccgccttgctcctgccgctggccttgctgctccacgccgccaggccggaagtgcagctggttgaatctggcggaggactggttcaggctggcggatctctgagactgtcttgtgccgccagcggcagaacctttagcatgggctggtttagacaggcccctggcaaagagagagagttcgtcgccgccatcacatactctggcggcagcccttactacgccgactctgtgaagggcagattcaccatcagccgggacaacgccaagaacaccgtgtacctccagatgaacagcctgaagcctgaggacaccgccgtgtactactgcgccgccaatccaacatacggcagcgactggaacgccgagaattggggccagggaacccaagtgacagtgtctagcctcgaggacctgaagaacgtgttcccacctgaggtggccgtgttcgagcctagcgaggccgagatcagccacacccagaaagccaccctcgtgtgcctggctaccggcttctaccccgaccatgtggaactgtcttggtgggtcaacggcaaagaggtgcacagcggcgtgtctaccgacccccagccactgaaagaacagcccgccctgaacgacagccggtactgcctgagcagcagactgagagtgtccgccaccttctggcagaacccccggaaccacttcagatgccaggtgcagttctacggcctgagcgagaacgacgagtggacccaggacagagccaagcccgtgacccagatcgtgtctgccgaagcctggggcagagccgattgcggatccgtggtggaaaaagagcaccctcagctcggagccggaacagtgctgcttctgagagccggcttttacgccgtgtcctttctgtctgtggccgtgggcagcaccgtgtactatcagggcaagtgcctgacctggaagggacctagaaggcaactgcctgctgtggtgcctgctcctttgcctcctccatgtggaagctctgcccatctgctgccacctgttccaggcggaagggccaagcgatctggatctggagcaacaaacttctcactactcaaacaagcaggtgacgtggaggagaatcccgggcctactagtatggactggatttggcgcatccttttccttgtcggcgctgctaccggcgcgcattccgggcccgaagtgcaactggttgaatccggtggcggcctggtgcaagcaggcggatctctcagacttagctgtgccgcctccggcagaaccttcacaatgggatggtttaggcaggctccagggaaagagagagagttcgtcgccgccatctctctgtctcccacactggcctactacgccgactctgtgaaaggccggttcaccatctccagagataatgccaagaacaccgtggtgctgcaaatgaactctctgaaacccgaggatacagccctgtactattgtgccgctgaccggaagtccgtgatgagcatcagacccgattactggggacagggcacacaagtcacagtgtcctctacgcgtatccagaaccctgatcctgccgtgtaccagctgcgggatagcaagagcagcgacaagagcgtgtgtctgttcaccgacttcgacagccagaccaacgtgtcccagagcaaggactccgacgtgtacatcaccgataagaccgtgctggacatgcggagcatggacttcaagagcaactccgccgtggcctggtccaacaagtccgatttcgcctgcgccaacgccttcaacaacagcattatccccgaggacacattcttcccaagccccgagagcagctgcggtaccgtcgagaaagaacatccacagcttggcgctggcaccgtcctgttgcttagagccggattctatgccgtcagcttcctgtccgtggctgtggggtctacagtgtattaccagggaaaatgtctcacctggaaaggccccagacgccagcttccagctgttgttcctgctccactgccaccaccttgtggctcctctgctcacttgcttccaccagtgcctggcggacgcgccaagagaagcggatctggcgtgaagcagaccctgaatttcgacctgctgaagctggctggcgacgtggaatccaacccaggcccttctagaggccatatgaccgagtacaagcccacggtgcgcctcgccacccgcgacgacgtccccagggccgtacgcaccctcgccgccgcgttcgccgactaccccgccacgcgccacaccgtcgatccggaccgccacatcgagcgggtcaccgagctgcaagaactcttcctcacgcgcgtcgggctcgacatcggcaaggtgtgggtcgcggacgacggcgccgcggtggcggtctggaccacgccggagagcgtcgaagcgggggcggtgttcgccgagatcggcccgcgcatggccgagttgagcggttcccggctggccgcgcagcaacagatggaaggcctcctggcgccgcaccggcccaaggagcccgcgtggttcctggccaccgtcggcgtctcgcccgaccaccagggcaagggtctgggcagcgccgtcgtgctccccggagtggaggcggccgagcgcgccggggtgcccgccttcctggagacctccgcgccccgcaacctccccttctacgagcggctcggcttcaccgtcaccgccgacgtcgaggtgcccgaaggaccgcgcacctggtgcatgacccgcaagcccggtgcctga

SEQ ID NO: 1716 - DNA, 1416 bp, Artificial Sequence
  Synthetic Polynucleotide
atggccttaccagtgaccgccttgctcctgccgctggccttgctgctccacgccgccaggccggcatgcgaagtgcagctgcttgaaagtggcggcggactgattcagcctggcggatctctgagactgagctgtgccgccagcggcttcaccttttctagccacgccatgacctgggtccgacaggcacctggaaaagggcttgaatgggtgtccgccatcagcggctctggcgattacacacactacgccgacagcgtgaagggcagattcaccatcagcagagacaacagcaagaacaccgtgtacctccagatgaacagcctgagagccgaggacagcgccgtgtattattgcgccaaggatgaggatggcggcagcctgcttggacacagaggacaaggcaccctggtcaccgtttcttccggtaccggcggaggcggatctggcggcggaggtagcggtggcggaggatctgaattcggatctctcgaggtggtggaaaaagagcaccctcagctcggagccggaacagtgctgcttctgagagccggcttttacgccgtgtcctttctgtctgtggccgtgggcagcaccgtgtactatcagggcaagtgcctgacctggaagggacctagaaggcaactgcctgctgtggtgcctgctcctttgcctcctccatgtggaagctctgcccatctgctgccacctgttccaggcggaagggccaagcgatctggatctggagcaacaaacttctcactactcaaacaagcaggtgacgtggaggagaatcccgggcctactagaggccatatgaccgagtacaagcccacggtgcgcctcgccacccgcgacgacgtccccagggccgtacgcaccctcgccgccgcgttcgccgactaccccgccacgcgccacaccgtcgatccggaccgccacatcgagcgggtcaccgagctgcaagaactcttcctcacgcgcgtcgggctcgacatcggcaaggtgtgggtcgcggacgacggcgccgcggtggcggtctggaccacgccggagagcgtcgaagcgggggcggtgttcgccgagatcggcccgcgcatggccgagttgagcggttcccggctggccgcgcagcaacagatggaaggcctcctggcgccgcaccggcccaaggagcccgcgtggttcctggccaccgtcggcgtctcgcccgaccaccagggcaagggtctgggcagcgccgtcgtgctccccggagtggaggcggccgagcgcgccggggtgcccgccttcctggagacctccgcgccccgcaacctccccttctacgagcggctcggcttcaccgtcaccgccgacgtcgaggtgcccgaaggaccgcgcacctggtgcatgacccgcaagcccggtgcctga

SEQ ID NO: 1717 - DNA, 2826 bp, Artificial Sequence
  Synthetic Polynucleotide
atggccttaccagtgaccgccttgctcctgccgctggccttgctgctccacgccgccaggccggacatccagatgacacagagccctagcagcctgtctgccagcgtgggagacagagtgaccatcacatgcaaggccagcgaccacatcaacaactggctggcctggtatcagcagaagcctggacaggcccctaagctgctgatctacggcgctaccacactggaaacaggcgtgcccagcagattttctggcagcggctctggcaccgactacaccctgacaatatccagcctccagcctgaggacttcgccacctactactgtcagcagagctggaacaccccttggacattcggccagggcaccaagctggaaatcaagagactcgagatcggctggctgttgctccaggcccctcggtgggtgttcaaggaggaagaccctattcacctgaggtgtcacagctggaagaacactgctctgcataaggtcacatatttacagaatggcaaaggcaggaagtattttcatcataattctgacttctacattccaaaagccacactcaaagacagcggctcctacttctgcagggggcttgttgggagtaaaaatgtgtcttcagagactgtgaacatcaccatcactcaaggtttggcagtgtcaaccatctcatcattctttccacctggctaccaagtgtccttctgcctggtcatggtgctgctgttcgccgtggataccggcctgtacttcagcgtcaagaccaacatccggtccagcaccagagactggaaggaccacaagttcaagtggcggaaggaccctcaggacaagagggccaagcgatctggatctggagcaacaaacttctcactactcaaacaagcaggtgacgtggaggagaatcccgggcctactagtatggactggatttggcgcatccttttccttgtcggcgctgctaccggcgcgcattccttcgaacaagttcagcttcaacagcctggcgctgagctggtcaaacctggcgcttctgtgaagatgagctgcaaagccagcggctacgccttcagcagctactggatcaactggatgaagcagaaacccggccagggactcgaatggatcggccaaatctatcccggcgacggcgacaccaactacaacggcaagttcaagggcagagccacactgaccgccgatacctctagcagcacagcctacatgcagctgagcagcctgaccagcgaagatagcgccgtgtacttctgtgcccggtccatcacaacagtcgtgggctgcgctatggactattggggccagggaacaagcgtgaccgtgtctagtacgcgtcagagcaaggctcaggttctccagagtgtggcaggccagactctgactgtcagatgccagtatccaccaacaggctccctctatgagaaaaaaggatggtgtaaagaggcttctgccctcgtctgcatccggctggttacctctagcaagcccagaactatggcctggacatcccggtttacaatctgggatgaccctgatgccggatttttcacagtgacaatgacggatctgcgcgaggaagattccgggcactattggtgtagaatctacaggccctccgacaactccgtgtctaagtctgtgcgcttttacctggtcgtcagccctgccagtgcctccactcagacatcttggaccccaagggaccttgtgtcctctcagacacagacacagtcctgcgtgccaccaactgctggcgcaagacaggctccagagtctcccagcacaatccccgtcccttctcagccccagaactccacacttaggccaggaccagctgctccaatcgcactggtcccagtgttctgcggactgctggttgccaagtctctggtgctgagcgcactcctcgtttggtggggcgatatttggtggaaaacgatgatggaattgagatccctcgatacgcagaaagccacatgccaccttcagcaagtcacagacttgccttggaccagcgtcagctctcccgtggaacgggaaattctgtatcatacagtggcccgcaccaagatttccgacgatgacgacgagcacacactgcgcgccaagagaagcggatctggcgtgaagcagaccctgaatttcgacctgctgaagctggctggcgacgtggaatccaacccaggcccttctagaggccatatgaccgagtacaagcccacggtgcgcctcgccacccgcgacgacgtccccagggccgtacgcaccctcgccgccgcgttcgccgactaccccgccacgcgccacaccgtcgatccggaccgccacatcgagcgggtcaccgagctgcaagaactcttcctcacgcgcgtcgggctcgacatcggcaaggtgtgggtcgcggacgacggcgccgcggtggcggtctggaccacgccggagagcgtcgaagcgggggcggtgttcgccgagatcggcccgcgcatggccgagttgagcggttcccggctggccgcgcagcaacagatggaaggcctcctggcgccgcaccggcccaaggagcccgcgtggttcctggccaccgtcggcgtctcgcccgaccaccagggcaagggtctgggcagcgccgtcgtgctccccggagtggaggcggccgagcgcgccggggtgcccgccttcctggagacctccgcgccccgcaacctccccttctacgagcggctcggcttcaccgtcaccgccgacgtcgaggtgcccgaaggaccgcgcacctggtgcatgacccgcaagcccggtgcctga

SEQ ID NO: 1718 - DNA, 2988 bp, Artificial Sequence
  Synthetic Polynucleotide
atggccttaccagtgaccgccttgctcctgccgctggccttgctgctccacgccgccaggccggcatgcgaagtgcagctgcttgaaagtggcggcggactgattcagcctggcggatctctgagactgagctgtgccgccagcggcttcaccttttctagccacgccatgacctgggtccgacaggcacctggaaaagggcttgaatgggtgtccgccatcagcggctctggcgattacacacactacgccgacagcgtgaagggcagattcaccatcagcagagacaacagcaagaacaccgtgtacctccagatgaacagcctgagagccgaggacagcgccgtgtattattgcgccaaggatgaggatggcggcagcctgcttggacacagaggacaaggcaccctggtcaccgtttcttccggtaccggcggaggcggatctggcggcggaggtagcggtggcggaggatctgaattcggatctctcgagatcggctggctgttgctccaggcccctcggtgggtgttcaaggaggaagaccctattcacctgaggtgtcacagctggaagaacactgctctgcataaggtcacatatttacagaatggcaaaggcaggaagtattttcatcataattctgacttctacattccaaaagccacactcaaagacagcggctcctacttctgcagggggcttgttgggagtaaaaatgtgtcttcagagactgtgaacatcaccatcactcaaggtttggcagtgtcaaccatctcatcattctttccacctggctaccaagtgtccttctgcctggtcatggtgctgctgttcgccgtggataccggcctgtacttcagcgtcaagaccaacatccggtccagcaccagagactggaaggaccacaagttcaagtggcggaaggaccctcaggacaagagggccaagcgatctggatctggagcaacaaacttctcactactcaaacaagcaggtgacgtggaggagaatcccgggcctactagtgccaccatggactggatttggcgcatccttttccttgtcggcgctgctaccggcgcccattccgggcccgaagtgcagctggttgaatctggcggaggactggttcaggctggcggatctctgagactgtcttgtgccgccagcggcagaacctttagcatgggctggtttagacaggcccctggcaaagagagagagttcgtcgccgccatcacatactctggcggcagcccttactacgccgactctgtgaagggcagattcaccatcagccgggacaacgccaagaacaccgtgtacctccagatgaacagcctgaagcctgaggacaccgccgtgtactactgcgccgccaatccaacatacggcagcgactggaacgccgagaattggggccagggaacccaagtgacagtgtctagcggatccggcggcggaggatctggcggaggcggatctgggggcggaggctctttcgaaggcagcacgcgtcagagcaaggctcaggttctccagagtgtggcaggccagactctgactgtcagatgccagtatccaccaacaggctccctctatgagaaaaaaggatggtgtaaagaggcttctgccctcgtctgcatccggctggttacctctagcaagcccagaactatggcctggacatcccggtttacaatctgggatgaccctgatgccggatttttcacagtgacaatgacggatctgcgcgaggaagattccgggcactattggtgtagaatctacaggccctccgacaactccgtgtctaagtctgtgcgcttttacctggtcgtcagccctgccagtgcctccactcagacatcttggaccccaagggaccttgtgtcctctcagacacagacacagtcctgcgtgccaccaactgctggcgcaagacaggctccagagtctcccagcacaatccccgtcccttctcagccccagaactccacacttaggccaggaccagctgctccaatcgcactggtcccagtgttctgcggactgctggttgccaagtctctggtgctgagcgcactcctcgtttggtggggcgatatttggtggaaaacgatgatggaattgagatccctcgatacgcagaaagccacatgccaccttcagcaagtcacagacttgccttggaccagcgtcagctctcccgtggaacgggaaattctgtatcatacagtggcccgcaccaagatttccgacgatgacgacgagcacacactgcgcgccaagagaagcggatctggcgtgaagcagaccctgaatttcgacctgctgaagctggctggcgacgtggaatccaacccaggcccttctagaggccatatgaccgagtacaagcccacggtgcgcctcgccacccgcgacgacgtccccagggccgtacgcaccctcgccgccgcgttcgccgactaccccgccacgcgccacaccgtcgatccggaccgccacatcgagcgggtcaccgagctgcaagaactcttcctcacgcgcgtcgggctcgacatcggcaaggtgtgggtcgcggacgacggcgccgcggtggcggtctggaccacgccggagagcgtcgaagcgggggcggtgttcgccgagatcggcccgcgcatggccgagttgagcggttcccggctggccgcgcagcaacagatggaaggcctcctggcgccgcaccggcccaaggagcccgcgtggttcctggccaccgtcggcgtctcgcccgaccaccagggcaagggtctgggcagcgccgtcgtgctccccggagtggaggcggccgagcgcgccggggtgcccgccttcctggagacctccgcgccccgcaacctccccttctacgagcggctcggcttcaccgtcaccgccgacgtcgaggtgcccgaaggaccgcgcacctggtgcatgacccgcaagcccggtgcctga

SEQ ID NO: 1719 - DNA, 3438 bp, Artificial Sequence
  Synthetic Polynucleotide
atggccttaccagtgaccgccttgctcctgccgctggccttgctgctccacgccgccaggccggacatccagatgacacagagccctagcagcctgtctgccagcgtgggagacagagtgaccatcacatgcaaggccagcgaccacatcaacaactggctggcctggtatcagcagaagcctggacaggcccctaagctgctgatctacggcgctaccacactggaaacaggcgtgcccagcagattttctggcagcggctctggcaccgactacaccctgacaatatccagcctccagcctgaggacttcgccacctactactgtcagcagagctggaacaccccttggacattcggccagggcaccaagctggaaatcaagagactcgagggacagcctaaggccaatcctaccgtgacactgttccctccaagcagcgaagaactccaggccaacaaggccacacttgtgtgcctgatctccgacttctaccctggggctgtgacagtggcttggaaggccgatggatctcctgtgaaagccggcgtggaaaccaccaagccatccaagcagagcaacaacaaatacgccgccagctcctacctgagcctgacacctgagcagtggaagtcccacagatcctacagctgccaagtgacccacgaaggcagcaccgtggaaaagacagtggcccctacagagtgcagcggatccatcggctggctgttgctccaggcccctcggtgggtgttcaaggaggaagaccctattcacctgaggtgtcacagctggaagaacactgctctgcataaggtcacatatttacagaatggcaaaggcaggaagtattttcatcataattctgacttctacattccaaaagccacactcaaagacagcggctcctacttctgcagggggcttgttgggagtaaaaatgtgtcttcagagactgtgaacatcaccatcactcaaggtttggcagtgtcaaccatctcatcattctttccacctggctaccaagtgtccttctgcctggtcatggtgctgctgttcgccgtggataccggcctgtacttcagcgtcaagaccaacatccggtccagcaccagagactggaaggaccacaagttcaagtggcggaaggaccctcaggacaagagggccaagcgatctggatctggagcaacaaacttctcactactcaaacaagcaggtgacgtggaggagaatcccgggcctactagtatggactggatttggcgcatccttttccttgtcggcgctgctaccggcgcgcattccttcgaacaagttcagcttcaacagcctggcgctgagctggtcaaacctggcgcttctgtgaagatgagctgcaaagccagcggctacgccttcagcagctactggatcaactggatgaagcagaaacccggccagggactcgaatggatcggccaaatctatcccggcgacggcgacaccaactacaacggcaagttcaagggcagagccacactgaccgccgatacctctagcagcacagcctacatgcagctgagcagcctgaccagcgaagatagcgccgtgtacttctgtgcccggtccatcacaacagtcgtgggctgcgctatggactattggggccagggaacaagcgtgaccgtgtctagtacgcgtgcctctacaaagggaccctccgtgtttcctctggctcccagcagcaagtctacaagcggaggaacagccgctctgggctgcctggtcaaggattactttcccgagcctgtgaccgtgtcctggaatagcggagcactgacaagcggcgtgcacacctttccagccgtgctgcaaagcagcggcctgtactctctgagcagcgtggtcacagtgcctagctctagcctgggcacccagacctacatctgcaatgtgaaccacaagcctagcaacaccaaggtggacaagagagtggaacccaagagctgtggtacccagagcaaggctcaggttctccagagtgtggcaggccagactctgactgtcagatgccagtatccaccaacaggctccctctatgagaaaaaaggatggtgtaaagaggcttctgccctcgtctgcatccggctggttacctctagcaagcccagaactatggcctggacatcccggtttacaatctgggatgaccctgatgccggatttttcacagtgacaatgacggatctgcgcgaggaagattccgggcactattggtgtagaatctacaggccctccgacaactccgtgtctaagtctgtgcgcttttacctggtcgtcagccctgccagtgcctccactcagacatcttggaccccaagggaccttgtgtcctctcagacacagacacagtcctgcgtgccaccaactgctggcgcaagacaggctccagagtctcccagcacaatccccgtcccttctcagccccagaactccacacttaggccaggaccagctgctccaatcgcactggtcccagtgttctgcggactgctggttgccaagtctctggtgctgagcgcactcctcgtttggtggggcgatatttggtggaaaacgatgatggaattgagatccctcgatacgcagaaagccacatgccaccttcagcaagtcacagacttgccttggaccagcgtcagctctcccgtggaacgggaaattctgtatcatacagtggcccgcaccaagatttccgacgatgacgacgagcacacactgcgcgccaagagaagcggatctggcgtgaagcagaccctgaatttcgacctgctgaagctggctggcgacgtggaatccaacccaggcccttctagaggcgggatccacaccatggctacctacgaggtgctgtgcgaggtggcaagaaagctgggcaccgacgacagagaagtggtgctgttcctgctgaacgtgttcatccctcagcctacactggcccagctgatcggtgcactgagagccctgaaagaggaaggccggctgacctttcctctgctggccgaatgcctgttcagagccggaagaagggatctgctgcgggacctgctgcatctggaccccagatttctggaaagacacctggccggcaccatgagctacttcagcccttaccagctgaccgtgctgcacgttgacggcgaactgtgcgccagagatattcggagcctgatcttcctgagcaaggacaccatcggcagccggtctacccctcagacatttctgcactgggtgtactgcatggaaaacctggacctgctcggccccacagatgtggatgccctgatgtccatgctgagaagcctgagcagagtggacctccagagacaggtgcagacactgatgggactgcacctgagcggacctagccacagccagcactacagacacacccct

SEQ ID NO: 1720 - DNA, 3597 bp, Artificial Sequence
  Synthetic Polynucleotide
atggccttaccagtgaccgccttgctcctgccgctggccttgctgctccacgccgccaggccggacatccagatgacacagagccctagcagcctgtctgccagcgtgggagacagagtgaccatcacatgcaaggccagcgaccacatcaacaactggctggcctggtatcagcagaagcctggacaggcccctaagctgctgatctacggcgctaccacactggaaacaggcgtgcccagcagattttctggcagcggctctggcaccgactacaccctgacaatatccagcctccagcctgaggacttcgccacctactactgtcagcagagctggaacaccccttggacattcggccagggcaccaagctggaaatcaagagactcgagggacagcctaaggccaatcctaccgtgacactgttccctccaagcagcgaagaactccaggccaacaaggccacacttgtgtgcctgatctccgacttctaccctggggctgtgacagtggcttggaaggccgatggatctcctgtgaaagccggcgtggaaaccaccaagccatccaagcagagcaacaacaaatacgccgccagctcctacctgagcctgacacctgagcagtggaagtcccacagatcctacagctgccaagtgacccacgaaggcagcaccgtggaaaagacagtggcccctacagagtgcagcggatccatcggctggctgttgctccaggcccctcggtgggtgttcaaggaggaagaccctattcacctgaggtgtcacagctggaagaacactgctctgcataaggtcacatatttacagaatggcaaaggcaggaagtattttcatcataattctgacttctacattccaaaagccacactcaaagacagcggctcctacttctgcagggggcttgttgggagtaaaaatgtgtcttcagagactgtgaacatcaccatcactcaaggtttggcagtgtcaaccatctcatcattctttccacctggctaccaagtgtccttctgcctggtcatggtgctgctgttcgccgtggataccggcctgtacttcagcgtcaagaccaacatccggtccagcaccagagactggaaggaccacaagttcaagtggcggaaggaccctcaggacaagagggccaagcgatctggatctggagcaacaaacttctcactactcaaacaagcaggtgacgtggaggagaatcccgggcctactagtatggactggatttggcgcatccttttccttgtcggcgctgctaccggcgcgcattccttcgaacaagttcagcttcaacagcctggcgctgagctggtcaaacctggcgcttctgtgaagatgagctgcaaagccagcggctacgccttcagcagctactggatcaactggatgaagcagaaacccggccagggactcgaatggatcggccaaatctatcccggcgacggcgacaccaactacaacggcaagttcaagggcagagccacactgaccgccgatacctctagcagcacagcctacatgcagctgagcagcctgaccagcgaagatagcgccgtgtacttctgtgcccggtccatcacaacagtcgtgggctgcgctatggactattggggccagggaacaagcgtgaccgtgtctagtacgcgtgcctctacaaagggaccctccgtgtttcctctggctcccagcagcaagtctacaagcggaggaacagccgctctgggctgcctggtcaaggattactttcccgagcctgtgaccgtgtcctggaatagcggagcactgacaagcggcgtgcacacctttccagccgtgctgcaaagcagcggcctgtactctctgagcagcgtggtcacagtgcctagctctagcctgggcacccagacctacatctgcaatgtgaaccacaagcctagcaacaccaaggtggacaagagagtggaacccaagagctgtggtacccagagcaaggctcaggttctccagagtgtggcaggccagactctgactgtcagatgccagtatccaccaacaggctccctctatgagaaaaaaggatggtgtaaagaggcttctgccctcgtctgcatccggctggttacctctagcaagcccagaactatggcctggacatcccggtttacaatctgggatgaccctgatgccggatttttcacagtgacaatgacggatctgcgcgaggaagattccgggcactattggtgtagaatctacaggccctccgacaactccgtgtctaagtctgtgcgcttttacctggtcgtcagccctgccagtgcctccactcagacatcttggaccccaagggaccttgtgtcctctcagacacagacacagtcctgcgtgccaccaactgctggcgcaagacaggctccagagtctcccagcacaatccccgtcccttctcagccccagaactccacacttaggccaggaccagctgctccaatcgcactggtcccagtgttctgcggactgctggttgccaagtctctggtgctgagcgcactcctcgtttggtggggcgatatttggtggaaaacgatgatggaattgagatccctcgatacgcagaaagccacatgccaccttcagcaagtcacagacttgccttggaccagcgtcagctctcccgtggaacgggaaattctgtatcatacagtggcccgcaccaagatttccgacgatgacgacgagcacacactgcgcgccaagagaagcggatctggcgtgaagcagaccctgaatttcgacctgctgaagctggctggcgacgtggaatccaacccaggcccttctagaggcgggatccacaccatgtccgactccaaggaggtccctagccttccatttttgcgacacttgctcgaagagttggacagccatgaggacagcttgctgctgtttctgtgtcacgacgcggccccgggctgcacgacggtcacgcaagctttgtgctcgcttagccaacagcgcaagctgaccctcgcggctctggtcgagatgctctacgtgctgcagcgtatggatcttctcaagagccgcttcgggctcagcaaggagggggccgagcaattgctgggcacaagctttctcacgcgctaccgcaagctcatggtttgcgtgggtgaggagctcgactcgagcgagctacgcgctctacgcttgttcgcgtgcaacctgaatccgagcctgagcacggcgctttctgagagcagccgctttgtcgagcttgtactcgcgcttgaaaacgtaggactcgtctcgccatcgagtgtttccgtgcttgcggacatgttgcgcactcttcggcgcctcgatttgtgccagcagcttgttgagtacgaacaacaagagcaagccaggtaccgttactgttacgcggcctcgccctcattgccagttcgtacgttacgtcgggggcacggcgcgagtgaacacgagcagctgtgcatgcccgtgcaagaatcctctgacagccccgagctgctgcgcacgcccgtacaagaatcctccagcgacagccccgagcaaacgact

SEQ ID NO: 1721 - DNA, 3465 bp, Artificial Sequence
  Synthetic Polynucleotide
atggccttaccagtgaccgccttgctcctgccgctggccttgctgctccacgccgccaggccggacatccagatgacacagagccctagcagcctgtctgccagcgtgggagacagagtgaccatcacatgcaaggccagcgaccacatcaacaactggctggcctggtatcagcagaagcctggacaggcccctaagctgctgatctacggcgctaccacactggaaacaggcgtgcccagcagattttctggcagcggctctggcaccgactacaccctgacaatatccagcctccagcctgaggacttcgccacctactactgtcagcagagctggaacaccccttggacattcggccagggcaccaagctggaaatcaagagactcgagggacagcctaaggccaatcctaccgtgacactgttccctccaagcagcgaagaactccaggccaacaaggccacacttgtgtgcctgatctccgacttctaccctggggctgtgacagtggcttggaaggccgatggatctcctgtgaaagccggcgtggaaaccaccaagccatccaagcagagcaacaacaaatacgccgccagctcctacctgagcctgacacctgagcagtggaagtcccacagatcctacagctgccaagtgacccacgaaggcagcaccgtggaaaagacagtggcccctacagagtgcagcggatccatcggctggctgttgctccaggcccctcggtgggtgttcaaggaggaagaccctattcacctgaggtgtcacagctggaagaacactgctctgcataaggtcacatatttacagaatggcaaaggcaggaagtattttcatcataattctgacttctacattccaaaagccacactcaaagacagcggctcctacttctgcagggggcttgttgggagtaaaaatgtgtcttcagagactgtgaacatcaccatcactcaaggtttggcagtgtcaaccatctcatcattctttccacctggctaccaagtgtccttctgcctggtcatggtgctgctgttcgccgtggataccggcctgtacttcagcgtcaagaccaacatccggtccagcaccagagactggaaggaccacaagttcaagtggcggaaggaccctcaggacaagagggccaagcgatctggatctggagcaacaaacttctcactactcaaacaagcaggtgacgtggaggagaatcccgggcctactagtatggactggatttggcgcatccttttccttgtcggcgctgctaccggcgcgcattccttcgaacaagttcagcttcaacagcctggcgctgagctggtcaaacctggcgcttctgtgaagatgagctgcaaagccagcggctacgccttcagcagctactggatcaactggatgaagcagaaacccggccagggactcgaatggatcggccaaatctatcccggcgacggcgacaccaactacaacggcaagttcaagggcagagccacactgaccgccgatacctctagcagcacagcctacatgcagctgagcagcctgaccagcgaagatagcgccgtgtacttctgtgcccggtccatcacaacagtcgtgggctgcgctatggactattggggccagggaacaagcgtgaccgtgtctagtacgcgtgcctctacaaagggaccctccgtgtttcctctggctcccagcagcaagtctacaagcggaggaacagccgctctgggctgcctggtcaaggattactttcccgagcctgtgaccgtgtcctggaatagcggagcactgacaagcggcgtgcacacctttccagccgtgctgcaaagcagcggcctgtactctctgagcagcgtggtcacagtgcctagctctagcctgggcacccagacctacatctgcaatgtgaaccacaagcctagcaacaccaaggtggacaagagagtggaacccaagagctgtggtacccagagcaaggctcaggttctccagagtgtggcaggccagactctgactgtcagatgccagtatccaccaacaggctccctctatgagaaaaaaggatggtgtaaagaggcttctgccctcgtctgcatccggctggttacctctagcaagcccagaactatggcctggacatcccggtttacaatctgggatgaccctgatgccggatttttcacagtgacaatgacggatctgcgcgaggaagattccgggcactattggtgtagaatctacaggccctccgacaactccgtgtctaagtctgtgcgcttttacctggtcgtcagccctgccagtgcctccactcagacatcttggaccccaagggaccttgtgtcctctcagacacagacacagtcctgcgtgccaccaactgctggcgcaagacaggctccagagtctcccagcacaatccccgtcccttctcagccccagaactccacacttaggccaggaccagctgctccaatcgcactggtcccagtgttctgcggactgctggttgccaagtctctggtgctgagcgcactcctcgtttggtggggcgatatttggtggaaaacgatgatggaattgagatccctcgatacgcagaaagccacatgccaccttcagcaagtcacagacttgccttggaccagcgtcagctctcccgtggaacgggaaattctgtatcatacagtggcccgcaccaagatttccgacgatgacgacgagcacacactgcgcgccaagagaagcggatctggcgtgaagcagaccctgaatttcgacctgctgaagctggctggcgacgtggaatccaacccaggcccttctagaggccatatgaccgagtacaagcccacggtgcgcctcgccacccgcgacgacgtccccagggccgtacgcaccctcgccgccgcgttcgccgactaccccgccacgcgccacaccgtcgatccggaccgccacatcgagcgggtcaccgagctgcaagaactcttcctcacgcgcgtcgggctcgacatcggcaaggtgtgggtcgcggacgacggcgccgcggtggcggtctggaccacgccggagagcgtcgaagcgggggcggtgttcgccgagatcggcccgcgcatggccgagttgagcggttcccggctggccgcgcagcaacagatggaaggcctcctggcgccgcaccggcccaaggagcccgcgtggttcctggccaccgtcggcgtctcgcccgaccaccagggcaagggtctgggcagcgccgtcgtgctccccggagtggaggcggccgagcgcgccggggtgcccgccttcctggagacctccgcgccccgcaacctccccttctacgagcggctcggcttcaccgtcaccgccgacgtcgaggtgcccgaaggaccgcgcacctggtgcatgacccgcaagcccggtgcctga

SEQ ID NO: 1722 - DNA, 3876 bp, Artificial Sequence
  Synthetic Polynucleotide
atggccttaccagtgaccgccttgctcctgccgctggccttgctgctccacgccgccaggccggaagtgcagctggttgaatctggcggaggactggttcaggctggcggatctctgagactgtcttgtgccgccagcggcagaacctttagcatgggctggtttagacaggcccctggcaaagagagagagttcgtcgccgccatcacatactctggcggcagcccttactacgccgactctgtgaagggcagattcaccatcagccgggacaacgccaagaacaccgtgtacctccagatgaacagcctgaagcctgaggacaccgccgtgtactactgcgccgccaatccaacatacggcagcgactggaacgccgagaattggggccagggaacccaagtgacagtgtctagcggtaccggcggaggcggatctggcggcggaggtagcggtggcggaggatctgaattcgacatccagatgacacagagccctagcagcctgtctgccagcgtgggagacagagtgaccatcacatgcaaggccagcgaccacatcaacaactggctggcctggtatcagcagaagcctggacaggcccctaagctgctgatctacggcgctaccacactggaaacaggcgtgcccagcagattttctggcagcggctctggcaccgactacaccctgacaatatccagcctccagcctgaggacttcgccacctactactgtcagcagagctggaacaccccttggacattcggccagggcaccaagctggaaatcaagagactcgagggacagcctaaggccaatcctaccgtgacactgttccctccaagcagcgaagaactccaggccaacaaggccacacttgtgtgcctgatctccgacttctaccctggggctgtgacagtggcttggaaggccgatggatctcctgtgaaagccggcgtggaaaccaccaagccatccaagcagagcaacaacaaatacgccgccagctcctacctgagcctgacacctgagcagtggaagtcccacagatcctacagctgccaagtgacccacgaaggcagcaccgtggaaaagacagtggcccctacagagtgcagcggatccatcggctggctgttgctccaggcccctcggtgggtgttcaaggaggaagaccctattcacctgaggtgtcacagctggaagaacactgctctgcataaggtcacatatttacagaatggcaaaggcaggaagtattttcatcataattctgacttctacattccaaaagccacactcaaagacagcggctcctacttctgcagggggcttgttgggagtaaaaatgtgtcttcagagactgtgaacatcaccatcactcaaggtttggcagtgtcaaccatctcatcattctttccacctggctaccaagtgtccttctgcctggtcatggtgctgctgttcgccgtggataccggcctgtacttcagcgtcaagaccaacatccggtccagcaccagagactggaaggaccacaagttcaagtggcggaaggaccctcaggacaagagggccaagcgatctggatctggagcaacaaacttctcactactcaaacaagcaggtgacgtggaggagaatcccgggcctactagtatggactggatttggcgcatccttttccttgtcggcgctgctaccggcgcgcattccttcgaacaagttcagcttcaacagcctggcgctgagctggtcaaacctggcgcttctgtgaagatgagctgcaaagccagcggctacgccttcagcagctactggatcaactggatgaagcagaaacccggccagggactcgaatggatcggccaaatctatcccggcgacggcgacaccaactacaacggcaagttcaagggcagagccacactgaccgccgatacctctagcagcacagcctacatgcagctgagcagcctgaccagcgaagatagcgccgtgtacttctgtgcccggtccatcacaacagtcgtgggctgcgctatggactattggggccagggaacaagcgtgaccgtgtctagtacgcgtgcctctacaaagggaccctccgtgtttcctctggctcccagcagcaagtctacaagcggaggaacagccgctctgggctgcctggtcaaggattactttcccgagcctgtgaccgtgtcctggaatagcggagcactgacaagcggcgtgcacacctttccagccgtgctgcaaagcagcggcctgtactctctgagcagcgtggtcacagtgcctagctctagcctgggcacccagacctacatctgcaatgtgaaccacaagcctagcaacaccaaggtggacaagagagtggaacccaagagctgtggtacccagagcaaggctcaggttctccagagtgtggcaggccagactctgactgtcagatgccagtatccaccaacaggctccctctatgagaaaaaaggatggtgtaaagaggcttctgccctcgtctgcatccggctggttacctctagcaagcccagaactatggcctggacatcccggtttacaatctgggatgaccctgatgccggatttttcacagtgacaatgacggatctgcgcgaggaagattccgggcactattggtgtagaatctacaggccctccgacaactccgtgtctaagtctgtgcgcttttacctggtcgtcagccctgccagtgcctccactcagacatcttggaccccaagggaccttgtgtcctctcagacacagacacagtcctgcgtgccaccaactgctggcgcaagacaggctccagagtctcccagcacaatccccgtcccttctcagccccagaactccacacttaggccaggaccagctgctccaatcgcactggtcccagtgttctgcggactgctggttgccaagtctctggtgctgagcgcactcctcgtttggtggggcgatatttggtggaaaacgatgatggaattgagatccctcgatacgcagaaagccacatgccaccttcagcaagtcacagacttgccttggaccagcgtcagctctcccgtggaacgggaaattctgtatcatacagtggcccgcaccaagatttccgacgatgacgacgagcacacactgcgcgccaagagaagcggatctggcgtgaagcagaccctgaatttcgacctgctgaagctggctggcgacgtggaatccaacccaggcccttctagaggccatatgaccgagtacaagcccacggtgcgcctcgccacccgcgacgacgtccccagggccgtacgcaccctcgccgccgcgttcgccgactaccccgccacgcgccacaccgtcgatccggaccgccacatcgagcgggtcaccgagctgcaagaactcttcctcacgcgcgtcgggctcgacatcggcaaggtgtgggtcgcggacgacggcgccgcggtggcggtctggaccacgccggagagcgtcgaagcgggggcggtgttcgccgagatcggcccgcgcatggccgagttgagcggttcccggctggccgcgcagcaacagatggaaggcctcctggcgccgcaccggcccaaggagcccgcgtggttcctggccaccgtcggcgtctcgcccgaccaccagggcaagggtctgggcagcgccgtcgtgctccccggagtggaggcggccgagcgcgccggggtgcccgccttcctggagacctccgcgccccgcaacctccccttctacgagcggctcggcttcaccgtcaccgccgacgtcgaggtgcccgaaggaccgcgcacctggtgcatgacccgcaagcccggtgcctga

SEQ ID NO: 1723 - DNA, 4287 bp, Artificial Sequence
  Synthetic Polynucleotide
atggccttaccagtgaccgccttgctcctgccgctggccttgctgctccacgccgccaggccggaagtgcagctggttgaatctggcggaggactggttcaggctggcggatctctgagactgtcttgtgccgccagcggcagaacctttagcatgggctggtttagacaggcccctggcaaagagagagagttcgtcgccgccatcacatactctggcggcagcccttactacgccgactctgtgaagggcagattcaccatcagccgggacaacgccaagaacaccgtgtacctccagatgaacagcctgaagcctgaggacaccgccgtgtactactgcgccgccaatccaacatacggcagcgactggaacgccgagaattggggccagggaacccaagtgacagtgtctagcggtaccggcggaggcggatctggcggcggaggtagcggtggcggaggatctgaattcgacatccagatgacacagagccctagcagcctgtctgccagcgtgggagacagagtgaccatcacatgcaaggccagcgaccacatcaacaactggctggcctggtatcagcagaagcctggacaggcccctaagctgctgatctacggcgctaccacactggaaacaggcgtgcccagcagattttctggcagcggctctggcaccgactacaccctgacaatatccagcctccagcctgaggacttcgccacctactactgtcagcagagctggaacaccccttggacattcggccagggcaccaagctggaaatcaagagactcgagggacagcctaaggccaatcctaccgtgacactgttccctccaagcagcgaagaactccaggccaacaaggccacacttgtgtgcctgatctccgacttctaccctggggctgtgacagtggcttggaaggccgatggatctcctgtgaaagccggcgtggaaaccaccaagccatccaagcagagcaacaacaaatacgccgccagctcctacctgagcctgacacctgagcagtggaagtcccacagatcctacagctgccaagtgacccacgaaggcagcaccgtggaaaagacagtggcccctacagagtgcagcggatccatcggctggctgttgctccaggcccctcggtgggtgttcaaggaggaagaccctattcacctgaggtgtcacagctggaagaacactgctctgcataaggtcacatatttacagaatggcaaaggcaggaagtattttcatcataattctgacttctacattccaaaagccacactcaaagacagcggctcctacttctgcagggggcttgttgggagtaaaaatgtgtcttcagagactgtgaacatcaccatcactcaaggtttggcagtgtcaaccatctcatcattctttccacctggctaccaagtgtccttctgcctggtcatggtgctgctgttcgccgtggataccggcctgtacttcagcgtcaagaccaacatccggtccagcaccagagactggaaggaccacaagttcaagtggcggaaggaccctcaggacaagagggccaagcgatctggatctggagcaacaaacttctcactactcaaacaagcaggtgacgtggaggagaatcccgggcctactagtatggactggatttggcgcatccttttccttgtcggcgctgctaccggcgcgcattccgggcccgaagtgcaactggttgaatccggtggcggcctggtgcaagcaggcggatctctcagacttagctgtgccgcctccggcagaaccttcacaatgggatggtttaggcaggctccagggaaagagagagagttcgtcgccgccatctctctgtctcccacactggcctactacgccgactctgtgaaaggccggttcaccatctccagagataatgccaagaacaccgtggtgctgcaaatgaactctctgaaacccgaggatacagccctgtactattgtgccgctgaccggaagtccgtgatgagcatcagacccgattactggggacagggcacacaagtcacagtgtcctctggatccggcggcggaggatctggcggaggcggatctgggggcggaggctctttcgaacaagttcagcttcaacagcctggcgctgagctggtcaaacctggcgcttctgtgaagatgagctgcaaagccagcggctacgccttcagcagctactggatcaactggatgaagcagaaacccggccagggactcgaatggatcggccaaatctatcccggcgacggcgacaccaactacaacggcaagttcaagggcagagccacactgaccgccgatacctctagcagcacagcctacatgcagctgagcagcctgaccagcgaagatagcgccgtgtacttctgtgcccggtccatcacaacagtcgtgggctgcgctatggactattggggccagggaacaagcgtgaccgtgtctagtacgcgtgcctctacaaagggaccctccgtgtttcctctggctcccagcagcaagtctacaagcggaggaacagccgctctgggctgcctggtcaaggattactttcccgagcctgtgaccgtgtcctggaatagcggagcactgacaagcggcgtgcacacctttccagccgtgctgcaaagcagcggcctgtactctctgagcagcgtggtcacagtgcctagctctagcctgggcacccagacctacatctgcaatgtgaaccacaagcctagcaacaccaaggtggacaagagagtggaacccaagagctgtggtacccagagcaaggctcaggttctccagagtgtggcaggccagactctgactgtcagatgccagtatccaccaacaggctccctctatgagaaaaaaggatggtgtaaagaggcttctgccctcgtctgcatccggctggttacctctagcaagcccagaactatggcctggacatcccggtttacaatctgggatgaccctgatgccggatttttcacagtgacaatgacggatctgcgcgaggaagattccgggcactattggtgtagaatctacaggccctccgacaactccgtgtctaagtctgtgcgcttttacctggtcgtcagccctgccagtgcctccactcagacatcttggaccccaagggaccttgtgtcctctcagacacagacacagtcctgcgtgccaccaactgctggcgcaagacaggctccagagtctcccagcacaatccccgtcccttctcagccccagaactccacacttaggccaggaccagctgctccaatcgcactggtcccagtgttctgcggactgctggttgccaagtctctggtgctgagcgcactcctcgtttggtggggcgatatttggtggaaaacgatgatggaattgagatccctcgatacgcagaaagccacatgccaccttcagcaagtcacagacttgccttggaccagcgtcagctctcccgtggaacgggaaattctgtatcatacagtggcccgcaccaagatttccgacgatgacgacgagcacacactgcgcgccaagagaagcggatctggcgtgaagcagaccctgaatttcgacctgctgaagctggctggcgacgtggaatccaacccaggcccttctagaggccatatgaccgagtacaagcccacggtgcgcctcgccacccgcgacgacgtccccagggccgtacgcaccctcgccgccgcgttcgccgactaccccgccacgcgccacaccgtcgatccggaccgccacatcgagcgggtcaccgagctgcaagaactcttcctcacgcgcgtcgggctcgacatcggcaaggtgtgggtcgcggacgacggcgccgcggtggcggtctggaccacgccggagagcgtcgaagcgggggcggtgttcgccgagatcggcccgcgcatggccgagttgagcggttcccggctggccgcgcagcaacagatggaaggcctcctggcgccgcaccggcccaaggagcccgcgtggttcctggccaccgtcggcgtctcgcccgaccaccagggcaagggtctgggcagcgccgtcgtgctccccggagtggaggcggccgagcgcgccggggtgcccgccttcctggagacctccgcgccccgcaacctccccttctacgagcggctcggcttcaccgtcaccgccgacgtcgaggtgcccgaaggaccgcgcacctggtgcatgacccgcaagcccggtgcctga

SEQ ID NO: 1724 - DNA, 3486 bp, Artificial Sequence
  Synthetic Polynucleotide
atggccttaccagtgaccgccttgctcctgccgctggccttgctgctccacgccgccaggccggaagtgcagctggttgaatctggcggaggactggttcaggctggcggatctctgagactgtcttgtgccgccagcggcagaacctttagcatgggctggtttagacaggcccctggcaaagagagagagttcgtcgccgccatcacatactctggcggcagcccttactacgccgactctgtgaagggcagattcaccatcagccgggacaacgccaagaacaccgtgtacctccagatgaacagcctgaagcctgaggacaccgccgtgtactactgcgccgccaatccaacatacggcagcgactggaacgccgagaattggggccagggaacccaagtgacagtgtctagcctcgagggacagcctaaggccaatcctaccgtgacactgttccctccaagcagcgaagaactccaggccaacaaggccacacttgtgtgcctgatctccgacttctaccctggggctgtgacagtggcttggaaggccgatggatctcctgtgaaagccggcgtggaaaccaccaagccatccaagcagagcaacaacaaatacgccgccagctcctacctgagcctgacacctgagcagtggaagtcccacagatcctacagctgccaagtgacccacgaaggcagcaccgtggaaaagacagtggcccctacagagtgcagcggatccatcggctggctgttgctccaggcccctcggtgggtgttcaaggaggaagaccctattcacctgaggtgtcacagctggaagaacactgctctgcataaggtcacatatttacagaatggcaaaggcaggaagtattttcatcataattctgacttctacattccaaaagccacactcaaagacagcggctcctacttctgcagggggcttgttgggagtaaaaatgtgtcttcagagactgtgaacatcaccatcactcaaggtttggcagtgtcaaccatctcatcattctttccacctggctaccaagtgtccttctgcctggtcatggtgctgctgttcgccgtggataccggcctgtacttcagcgtcaagaccaacatccggtccagcaccagagactggaaggaccacaagttcaagtggcggaaggaccctcaggacaagagggccaagcgatctggatctggagcaacaaacttctcactactcaaacaagcaggtgacgtggaggagaatcccgggcctactagtatggactggatttggcgcatccttttccttgtcggcgctgctaccggcgcgcattccgggcccgaagtgcaactggttgaatccggtggcggcctggtgcaagcaggcggatctctcagacttagctgtgccgcctccggcagaaccttcacaatgggatggtttaggcaggctccagggaaagagagagagttcgtcgccgccatctctctgtctcccacactggcctactacgccgactctgtgaaaggccggttcaccatctccagagataatgccaagaacaccgtggtgctgcaaatgaactctctgaaacccgaggatacagccctgtactattgtgccgctgaccggaagtccgtgatgagcatcagacccgattactggggacagggcacacaagtcacagtgtcctctacgcgtgcctctacaaagggaccctccgtgtttcctctggctcccagcagcaagtctacaagcggaggaacagccgctctgggctgcctggtcaaggattactttcccgagcctgtgaccgtgtcctggaatagcggagcactgacaagcggcgtgcacacctttccagccgtgctgcaaagcagcggcctgtactctctgagcagcgtggtcacagtgcctagctctagcctgggcacccagacctacatctgcaatgtgaaccacaagcctagcaacaccaaggtggacaagagagtggaacccaagagctgtggtacccagagcaaggctcaggttctccagagtgtggcaggccagactctgactgtcagatgccagtatccaccaacaggctccctctatgagaaaaaaggatggtgtaaagaggcttctgccctcgtctgcatccggctggttacctctagcaagcccagaactatggcctggacatcccggtttacaatctgggatgaccctgatgccggatttttcacagtgacaatgacggatctgcgcgaggaagattccgggcactattggtgtagaatctacaggccctccgacaactccgtgtctaagtctgtgcgcttttacctggtcgtcagccctgccagtgcctccactcagacatcttggaccccaagggaccttgtgtcctctcagacacagacacagtcctgcgtgccaccaactgctggcgcaagacaggctccagagtctcccagcacaatccccgtcccttctcagccccagaactccacacttaggccaggaccagctgctccaatcgcactggtcccagtgttctgcggactgctggttgccaagtctctggtgctgagcgcactcctcgtttggtggggcgatatttggtggaaaacgatgatggaattgagatccctcgatacgcagaaagccacatgccaccttcagcaagtcacagacttgccttggaccagcgtcagctctcccgtggaacgggaaattctgtatcatacagtggcccgcaccaagatttccgacgatgacgacgagcacacactgcgcgccaagagaagcggatctggcgtgaagcagaccctgaatttcgacctgctgaagctggctggcgacgtggaatccaacccaggcccttctagaggccatatgaccgagtacaagcccacggtgcgcctcgccacccgcgacgacgtccccagggccgtacgcaccctcgccgccgcgttcgccgactaccccgccacgcgccacaccgtcgatccggaccgccacatcgagcgggtcaccgagctgcaagaactcttcctcacgcgcgtcgggctcgacatcggcaaggtgtgggtcgcggacgacggcgccgcggtggcggtctggaccacgccggagagcgtcgaagcgggggcggtgttcgccgagatcggcccgcgcatggccgagttgagcggttcccggctggccgcgcagcaacagatggaaggcctcctggcgccgcaccggcccaaggagcccgcgtggttcctggccaccgtcggcgtctcgcccgaccaccagggcaagggtctgggcagcgccgtcgtgctccccggagtggaggcggccgagcgcgccggggtgcccgccttcctggagacctccgcgccccgcaacctccccttctacgagcggctcggcttcaccgtcaccgccgacgtcgaggtgcccgaaggaccgcgcacctggtgcatgacccgcaagcccggtgcctga

SEQ ID NO: 1725 - DNA, 3510 bp, Artificial Sequence
  Synthetic Polynucleotide
atggccttaccagtgaccgccttgctcctgccgctggccttgctgctccacgccgccaggccggacatccagatgacacagagccctagcagcctgtctgccagcgtgggagacagagtgaccatcacatgcaaggccagcgaccacatcaacaactggctggcctggtatcagcagaagcctggacaggcccctaagctgctgatctacggcgctaccacactggaaacaggcgtgcccagcagattttctggcagcggctctggcaccgactacaccctgacaatatccagcctccagcctgaggacttcgccacctactactgtcagcagagctggaacaccccttggacattcggccagggcaccaagctggaaatcaagagactcgaggacctgaagaacgtgttcccacctgaggtggccgtgttcgagcctagcgaggccgagatcagccacacccagaaagccaccctcgtgtgcctggctaccggcttctaccccgaccatgtggaactgtcttggtgggtcaacggcaaagaggtgcacagcggcgtgtctaccgacccccagccactgaaagaacagcccgccctgaacgacagccggtactgcctgagcagcagactgagagtgtccgccaccttctggcagaacccccggaaccacttcagatgccaggtgcagttctacggcctgagcgagaacgacgagtggacccaggacagagccaagcccgtgacccagatcgtgtctgccgaagcctggggcagagccgattgcggatccatcggctggctgttgctccaggcccctcggtgggtgttcaaggaggaagaccctattcacctgaggtgtcacagctggaagaacactgctctgcataaggtcacatatttacagaatggcaaaggcaggaagtattttcatcataattctgacttctacattccaaaagccacactcaaagacagcggctcctacttctgcagggggcttgttgggagtaaaaatgtgtcttcagagactgtgaacatcaccatcactcaaggtttggcagtgtcaaccatctcatcattctttccacctggctaccaagtgtccttctgcctggtcatggtgctgctgttcgccgtggataccggcctgtacttcagcgtcaagaccaacatccggtccagcaccagagactggaaggaccacaagttcaagtggcggaaggaccctcaggacaagagggccaagcgatctggatctggagcaacaaacttctcactactcaaacaagcaggtgacgtggaggagaatcccgggcctactagtatggactggatttggcgcatccttttccttgtcggcgctgctaccggcgcgcattccttcgaacaagttcagcttcaacagcctggcgctgagctggtcaaacctggcgcttctgtgaagatgagctgcaaagccagcggctacgccttcagcagctactggatcaactggatgaagcagaaacccggccagggactcgaatggatcggccaaatctatcccggcgacggcgacaccaactacaacggcaagttcaagggcagagccacactgaccgccgatacctctagcagcacagcctacatgcagctgagcagcctgaccagcgaagatagcgccgtgtacttctgtgcccggtccatcacaacagtcgtgggctgcgctatggactattggggccagggaacaagcgtgaccgtgtctagtacgcgtatccagaaccctgatcctgccgtgtaccagctgcgggatagcaagagcagcgacaagagcgtgtgtctgttcaccgacttcgacagccagaccaacgtgtcccagagcaaggactccgacgtgtacatcaccgataagaccgtgctggacatgcggagcatggacttcaagagcaactccgccgtggcctggtccaacaagtccgatttcgcctgcgccaacgccttcaacaacagcattatccccgaggacacattcttcccaagccccgagagcagctgcggtacccagagcaaggctcaggttctccagagtgtggcaggccagactctgactgtcagatgccagtatccaccaacaggctccctctatgagaaaaaaggatggtgtaaagaggcttctgccctcgtctgcatccggctggttacctctagcaagcccagaactatggcctggacatcccggtttacaatctgggatgaccctgatgccggatttttcacagtgacaatgacggatctgcgcgaggaagattccgggcactattggtgtagaatctacaggccctccgacaactccgtgtctaagtctgtgcgcttttacctggtcgtcagccctgccagtgcctccactcagacatcttggaccccaagggaccttgtgtcctctcagacacagacacagtcctgcgtgccaccaactgctggcgcaagacaggctccagagtctcccagcacaatccccgtcccttctcagccccagaactccacacttaggccaggaccagctgctccaatcgcactggtcccagtgttctgcggactgctggttgccaagtctctggtgctgagcgcactcctcgtttggtggggcgatatttggtggaaaacgatgatggaattgagatccctcgatacgcagaaagccacatgccaccttcagcaagtcacagacttgccttggaccagcgtcagctctcccgtggaacgggaaattctgtatcatacagtggcccgcaccaagatttccgacgatgacgacgagcacacactgcgcgccaagagaagcggatctggcgtgaagcagaccctgaatttcgacctgctgaagctggctggcgacgtggaatccaacccaggcccttctagaggccatatgaccgagtacaagcccacggtgcgcctcgccacccgcgacgacgtccccagggccgtacgcaccctcgccgccgcgttcgccgactaccccgccacgcgccacaccgtcgatccggaccgccacatcgagcgggtcaccgagctgcaagaactcttcctcacgcgcgtcgggctcgacatcggcaaggtgtgggtcgcggacgacggcgccgcggtggcggtctggaccacgccggagagcgtcgaagcgggggcggtgttcgccgagatcggcccgcgcatggccgagttgagcggttcccggctggccgcgcagcaacagatggaaggcctcctggcgccgcaccggcccaaggagcccgcgtggttcctggccaccgtcggcgtctcgcccgaccaccagggcaagggtctgggcagcgccgtcgtgctccccggagtggaggcggccgagcgcgccggggtgcccgccttcctggagacctccgcgccccgcaacctccccttctacgagcggctcggcttcaccgtcaccgccgacgtcgaggtgcccgaaggaccgcgcacctggtgcatgacccgcaagcccggtgcctga

SEQ ID NO: 1726 - DNA, 3921 bp, Artificial Sequence
  Synthetic Polynucleotide
atggccttaccagtgaccgccttgctcctgccgctggccttgctgctccacgccgccaggccggaagtgcagctggttgaatctggcggaggactggttcaggctggcggatctctgagactgtcttgtgccgccagcggcagaacctttagcatgggctggtttagacaggcccctggcaaagagagagagttcgtcgccgccatcacatactctggcggcagcccttactacgccgactctgtgaagggcagattcaccatcagccgggacaacgccaagaacaccgtgtacctccagatgaacagcctgaagcctgaggacaccgccgtgtactactgcgccgccaatccaacatacggcagcgactggaacgccgagaattggggccagggaacccaagtgacagtgtctagcggtaccggcggaggcggatctggcggcggaggtagcggtggcggaggatctgaattcgacatccagatgacacagagccctagcagcctgtctgccagcgtgggagacagagtgaccatcacatgcaaggccagcgaccacatcaacaactggctggcctggtatcagcagaagcctggacaggcccctaagctgctgatctacggcgctaccacactggaaacaggcgtgcccagcagattttctggcagcggctctggcaccgactacaccctgacaatatccagcctccagcctgaggacttcgccacctactactgtcagcagagctggaacaccccttggacattcggccagggcaccaagctggaaatcaagagactcgaggacctgaagaacgtgttcccacctgaggtggccgtgttcgagcctagcgaggccgagatcagccacacccagaaagccaccctcgtgtgcctggctaccggcttctaccccgaccatgtggaactgtcttggtgggtcaacggcaaagaggtgcacagcggcgtgtctaccgacccccagccactgaaagaacagcccgccctgaacgacagccggtactgcctgagcagcagactgagagtgtccgccaccttctggcagaacccccggaaccacttcagatgccaggtgcagttctacggcctgagcgagaacgacgagtggacccaggacagagccaagcccgtgacccagatcgtgtctgccgaagcctggggcagagccgattgcggatccatcggctggctgttgctccaggcccctcggtgggtgttcaaggaggaagaccctattcacctgaggtgtcacagctggaagaacactgctctgcataaggtcacatatttacagaatggcaaaggcaggaagtattttcatcataattctgacttctacattccaaaagccacactcaaagacagcggctcctacttctgcagggggcttgttgggagtaaaaatgtgtcttcagagactgtgaacatcaccatcactcaaggtttggcagtgtcaaccatctcatcattctttccacctggctaccaagtgtccttctgcctggtcatggtgctgctgttcgccgtggataccggcctgtacttcagcgtcaagaccaacatccggtccagcaccagagactggaaggaccacaagttcaagtggcggaaggaccctcaggacaagagggccaagcgatctggatctggagcaacaaacttctcactactcaaacaagcaggtgacgtggaggagaatcccgggcctactagtatggactggatttggcgcatccttttccttgtcggcgctgctaccggcgcgcattccttcgaacaagttcagcttcaacagcctggcgctgagctggtcaaacctggcgcttctgtgaagatgagctgcaaagccagcggctacgccttcagcagctactggatcaactggatgaagcagaaacccggccagggactcgaatggatcggccaaatctatcccggcgacggcgacaccaactacaacggcaagttcaagggcagagccacactgaccgccgatacctctagcagcacagcctacatgcagctgagcagcctgaccagcgaagatagcgccgtgtacttctgtgcccggtccatcacaacagtcgtgggctgcgctatggactattggggccagggaacaagcgtgaccgtgtctagtacgcgtatccagaaccctgatcctgccgtgtaccagctgcgggatagcaagagcagcgacaagagcgtgtgtctgttcaccgacttcgacagccagaccaacgtgtcccagagcaaggactccgacgtgtacatcaccgataagaccgtgctggacatgcggagcatggacttcaagagcaactccgccgtggcctggtccaacaagtccgatttcgcctgcgccaacgccttcaacaacagcattatccccgaggacacattcttcccaagccccgagagcagctgcggtacccagagcaaggctcaggttctccagagtgtggcaggccagactctgactgtcagatgccagtatccaccaacaggctccctctatgagaaaaaaggatggtgtaaagaggcttctgccctcgtctgcatccggctggttacctctagcaagcccagaactatggcctggacatcccggtttacaatctgggatgaccctgatgccggatttttcacagtgacaatgacggatctgcgcgaggaagattccgggcactattggtgtagaatctacaggccctccgacaactccgtgtctaagtctgtgcgcttttacctggtcgtcagccctgccagtgcctccactcagacatcttggaccccaagggaccttgtgtcctctcagacacagacacagtcctgcgtgccaccaactgctggcgcaagacaggctccagagtctcccagcacaatccccgtcccttctcagccccagaactccacacttaggccaggaccagctgctccaatcgcactggtcccagtgttctgcggactgctggttgccaagtctctggtgctgagcgcactcctcgtttggtggggcgatatttggtggaaaacgatgatggaattgagatccctcgatacgcagaaagccacatgccaccttcagcaagtcacagacttgccttggaccagcgtcagctctcccgtggaacgggaaattctgtatcatacagtggcccgcaccaagatttccgacgatgacgacgagcacacactgcgcgccaagagaagcggatctggcgtgaagcagaccctgaatttcgacctgctgaagctggctggcgacgtggaatccaacccaggcccttctagaggccatatgaccgagtacaagcccacggtgcgcctcgccacccgcgacgacgtccccagggccgtacgcaccctcgccgccgcgttcgccgactaccccgccacgcgccacaccgtcgatccggaccgccacatcgagcgggtcaccgagctgcaagaactcttcctcacgcgcgtcgggctcgacatcggcaaggtgtgggtcgcggacgacggcgccgcggtggcggtctggaccacgccggagagcgtcgaagcgggggcggtgttcgccgagatcggcccgcgcatggccgagttgagcggttcccggctggccgcgcagcaacagatggaaggcctcctggcgccgcaccggcccaaggagcccgcgtggttcctggccaccgtcggcgtctcgcccgaccaccagggcaagggtctgggcagcgccgtcgtgctccccggagtggaggcggccgagcgcgccggggtgcccgccttcctggagacctccgcgccccgcaacctccccttctacgagcggctcggcttcaccgtcaccgccgacgtcgaggtgcccgaaggaccgcgcacctggtgcatgacccgcaagcccggtgcctga

SEQ ID NO: 1727 - DNA, 4332 bp, Artificial Sequence
  Synthetic Polynucleotide
atggccttaccagtgaccgccttgctcctgccgctggccttgctgctccacgccgccaggccggaagtgcagctggttgaatctggcggaggactggttcaggctggcggatctctgagactgtcttgtgccgccagcggcagaacctttagcatgggctggtttagacaggcccctggcaaagagagagagttcgtcgccgccatcacatactctggcggcagcccttactacgccgactctgtgaagggcagattcaccatcagccgggacaacgccaagaacaccgtgtacctccagatgaacagcctgaagcctgaggacaccgccgtgtactactgcgccgccaatccaacatacggcagcgactggaacgccgagaattggggccagggaacccaagtgacagtgtctagcggtaccggcggaggcggatctggcggcggaggtagcggtggcggaggatctgaattcgacatccagatgacacagagccctagcagcctgtctgccagcgtgggagacagagtgaccatcacatgcaaggccagcgaccacatcaacaactggctggcctggtatcagcagaagcctggacaggcccctaagctgctgatctacggcgctaccacactggaaacaggcgtgcccagcagattttctggcagcggctctggcaccgactacaccctgacaatatccagcctccagcctgaggacttcgccacctactactgtcagcagagctggaacaccccttggacattcggccagggcaccaagctggaaatcaagagactcgaggacctgaagaacgtgttcccacctgaggtggccgtgttcgagcctagcgaggccgagatcagccacacccagaaagccaccctcgtgtgcctggctaccggcttctaccccgaccatgtggaactgtcttggtgggtcaacggcaaagaggtgcacagcggcgtgtctaccgacccccagccactgaaagaacagcccgccctgaacgacagccggtactgcctgagcagcagactgagagtgtccgccaccttctggcagaacccccggaaccacttcagatgccaggtgcagttctacggcctgagcgagaacgacgagtggacccaggacagagccaagcccgtgacccagatcgtgtctgccgaagcctggggcagagccgattgcggatccatcggctggctgttgctccaggcccctcggtgggtgttcaaggaggaagaccctattcacctgaggtgtcacagctggaagaacactgctctgcataaggtcacatatttacagaatggcaaaggcaggaagtattttcatcataattctgacttctacattccaaaagccacactcaaagacagcggctcctacttctgcagggggcttgttgggagtaaaaatgtgtcttcagagactgtgaacatcaccatcactcaaggtttggcagtgtcaaccatctcatcattctttccacctggctaccaagtgtccttctgcctggtcatggtgctgctgttcgccgtggataccggcctgtacttcagcgtcaagaccaacatccggtccagcaccagagactggaaggaccacaagttcaagtggcggaaggaccctcaggacaagagggccaagcgatctggatctggagcaacaaacttctcactactcaaacaagcaggtgacgtggaggagaatcccgggcctactagtatggactggatttggcgcatccttttccttgtcggcgctgctaccggcgcgcattccgggcccgaagtgcaactggttgaatccggtggcggcctggtgcaagcaggcggatctctcagacttagctgtgccgcctccggcagaaccttcacaatgggatggtttaggcaggctccagggaaagagagagagttcgtcgccgccatctctctgtctcccacactggcctactacgccgactctgtgaaaggccggttcaccatctccagagataatgccaagaacaccgtggtgctgcaaatgaactctctgaaacccgaggatacagccctgtactattgtgccgctgaccggaagtccgtgatgagcatcagacccgattactggggacagggcacacaagtcacagtgtcctctggatccggcggcggaggatctggcggaggcggatctgggggcggaggctctttcgaacaagttcagcttcaacagcctggcgctgagctggtcaaacctggcgcttctgtgaagatgagctgcaaagccagcggctacgccttcagcagctactggatcaactggatgaagcagaaacccggccagggactcgaatggatcggccaaatctatcccggcgacggcgacaccaactacaacggcaagttcaagggcagagccacactgaccgccgatacctctagcagcacagcctacatgcagctgagcagcctgaccagcgaagatagcgccgtgtacttctgtgcccggtccatcacaacagtcgtgggctgcgctatggactattggggccagggaacaagcgtgaccgtgtctagtacgcgtatccagaaccctgatcctgccgtgtaccagctgcgggatagcaagagcagcgacaagagcgtgtgtctgttcaccgacttcgacagccagaccaacgtgtcccagagcaaggactccgacgtgtacatcaccgataagaccgtgctggacatgcggagcatggacttcaagagcaactccgccgtggcctggtccaacaagtccgatttcgcctgcgccaacgccttcaacaacagcattatccccgaggacacattcttcccaagccccgagagcagctgcggtacccagagcaaggctcaggttctccagagtgtggcaggccagactctgactgtcagatgccagtatccaccaacaggctccctctatgagaaaaaaggatggtgtaaagaggcttctgccctcgtctgcatccggctggttacctctagcaagcccagaactatggcctggacatcccggtttacaatctgggatgaccctgatgccggatttttcacagtgacaatgacggatctgcgcgaggaagattccgggcactattggtgtagaatctacaggccctccgacaactccgtgtctaagtctgtgcgcttttacctggtcgtcagccctgccagtgcctccactcagacatcttggaccccaagggaccttgtgtcctctcagacacagacacagtcctgcgtgccaccaactgctggcgcaagacaggctccagagtctcccagcacaatccccgtcccttctcagccccagaactccacacttaggccaggaccagctgctccaatcgcactggtcccagtgttctgcggactgctggttgccaagtctctggtgctgagcgcactcctcgtttggtggggcgatatttggtggaaaacgatgatggaattgagatccctcgatacgcagaaagccacatgccaccttcagcaagtcacagacttgccttggaccagcgtcagctctcccgtggaacgggaaattctgtatcatacagtggcccgcaccaagatttccgacgatgacgacgagcacacactgcgcgccaagagaagcggatctggcgtgaagcagaccctgaatttcgacctgctgaagctggctggcgacgtggaatccaacccaggcccttctagaggccatatgaccgagtacaagcccacggtgcgcctcgccacccgcgacgacgtccccagggccgtacgcaccctcgccgccgcgttcgccgactaccccgccacgcgccacaccgtcgatccggaccgccacatcgagcgggtcaccgagctgcaagaactcttcctcacgcgcgtcgggctcgacatcggcaaggtgtgggtcgcggacgacggcgccgcggtggcggtctggaccacgccggagagcgtcgaagcgggggcggtgttcgccgagatcggcccgcgcatggccgagttgagcggttcccggctggccgcgcagcaacagatggaaggcctcctggcgccgcaccggcccaaggagcccgcgtggttcctggccaccgtcggcgtctcgcccgaccaccagggcaagggtctgggcagcgccgtcgtgctccccggagtggaggcggccgagcgcgccggggtgcccgccttcctggagacctccgcgccccgcaacctccccttctacgagcggctcggcttcaccgtcaccgccgacgtcgaggtgcccgaaggaccgcgcacctggtgcatgacccgcaagcccggtgcctga

SEQ ID NO: 1728 - DNA, 3531 bp, Artificial Sequence
  Synthetic Polynucleotide
atggccttaccagtgaccgccttgctcctgccgctggccttgctgctccacgccgccaggccggaagtgcagctggttgaatctggcggaggactggttcaggctggcggatctctgagactgtcttgtgccgccagcggcagaacctttagcatgggctggtttagacaggcccctggcaaagagagagagttcgtcgccgccatcacatactctggcggcagcccttactacgccgactctgtgaagggcagattcaccatcagccgggacaacgccaagaacaccgtgtacctccagatgaacagcctgaagcctgaggacaccgccgtgtactactgcgccgccaatccaacatacggcagcgactggaacgccgagaattggggccagggaacccaagtgacagtgtctagcctcgaggacctgaagaacgtgttcccacctgaggtggccgtgttcgagcctagcgaggccgagatcagccacacccagaaagccaccctcgtgtgcctggctaccggcttctaccccgaccatgtggaactgtcttggtgggtcaacggcaaagaggtgcacagcggcgtgtctaccgacccccagccactgaaagaacagcccgccctgaacgacagccggtactgcctgagcagcagactgagagtgtccgccaccttctggcagaacccccggaaccacttcagatgccaggtgcagttctacggcctgagcgagaacgacgagtggacccaggacagagccaagcccgtgacccagatcgtgtctgccgaagcctggggcagagccgattgcggatccatcggctggctgttgctccaggcccctcggtgggtgttcaaggaggaagaccctattcacctgaggtgtcacagctggaagaacactgctctgcataaggtcacatatttacagaatggcaaaggcaggaagtattttcatcataattctgacttctacattccaaaagccacactcaaagacagcggctcctacttctgcagggggcttgttgggagtaaaaatgtgtcttcagagactgtgaacatcaccatcactcaaggtttggcagtgtcaaccatctcatcattctttccacctggctaccaagtgtccttctgcctggtcatggtgctgctgttcgccgtggataccggcctgtacttcagcgtcaagaccaacatccggtccagcaccagagactggaaggaccacaagttcaagtggcggaaggaccctcaggacaagagggccaagcgatctggatctggagcaacaaacttctcactactcaaacaagcaggtgacgtggaggagaatcccgggcctactagtatggactggatttggcgcatccttttccttgtcggcgctgctaccggcgcgcattccgggcccgaagtgcaactggttgaatccggtggcggcctggtgcaagcaggcggatctctcagacttagctgtgccgcctccggcagaaccttcacaatgggatggtttaggcaggctccagggaaagagagagagttcgtcgccgccatctctctgtctcccacactggcctactacgccgactctgtgaaaggccggttcaccatctccagagataatgccaagaacaccgtggtgctgcaaatgaactctctgaaacccgaggatacagccctgtactattgtgccgctgaccggaagtccgtgatgagcatcagacccgattactggggacagggcacacaagtcacagtgtcctctacgcgtatccagaaccctgatcctgccgtgtaccagctgcgggatagcaagagcagcgacaagagcgtgtgtctgttcaccgacttcgacagccagaccaacgtgtcccagagcaaggactccgacgtgtacatcaccgataagaccgtgctggacatgcggagcatggacttcaagagcaactccgccgtggcctggtccaacaagtccgatttcgcctgcgccaacgccttcaacaacagcattatccccgaggacacattcttcccaagccccgagagcagctgcggtacccagagcaaggctcaggttctccagagtgtggcaggccagactctgactgtcagatgccagtatccaccaacaggctccctctatgagaaaaaaggatggtgtaaagaggcttctgccctcgtctgcatccggctggttacctctagcaagcccagaactatggcctggacatcccggtttacaatctgggatgaccctgatgccggatttttcacagtgacaatgacggatctgcgcgaggaagattccgggcactattggtgtagaatctacaggccctccgacaactccgtgtctaagtctgtgcgcttttacctggtcgtcagccctgccagtgcctccactcagacatcttggaccccaagggaccttgtgtcctctcagacacagacacagtcctgcgtgccaccaactgctggcgcaagacaggctccagagtctcccagcacaatccccgtcccttctcagccccagaactccacacttaggccaggaccagctgctccaatcgcactggtcccagtgttctgcggactgctggttgccaagtctctggtgctgagcgcactcctcgtttggtggggcgatatttggtggaaaacgatgatggaattgagatccctcgatacgcagaaagccacatgccaccttcagcaagtcacagacttgccttggaccagcgtcagctctcccgtggaacgggaaattctgtatcatacagtggcccgcaccaagatttccgacgatgacgacgagcacacactgcgcgccaagagaagcggatctggcgtgaagcagaccctgaatttcgacctgctgaagctggctggcgacgtggaatccaacccaggcccttctagaggccatatgaccgagtacaagcccacggtgcgcctcgccacccgcgacgacgtccccagggccgtacgcaccctcgccgccgcgttcgccgactaccccgccacgcgccacaccgtcgatccggaccgccacatcgagcgggtcaccgagctgcaagaactcttcctcacgcgcgtcgggctcgacatcggcaaggtgtgggtcgcggacgacggcgccgcggtggcggtctggaccacgccggagagcgtcgaagcgggggcggtgttcgccgagatcggcccgcgcatggccgagttgagcggttcccggctggccgcgcagcaacagatggaaggcctcctggcgccgcaccggcccaaggagcccgcgtggttcctggccaccgtcggcgtctcgcccgaccaccagggcaagggtctgggcagcgccgtcgtgctccccggagtggaggcggccgagcgcgccggggtgcccgccttcctggagacctccgcgccccgcaacctccccttctacgagcggctcggcttcaccgtcaccgccgacgtcgaggtgcccgaaggaccgcgcacctggtgcatgacccgcaagcccggtgcctga

SEQ ID NO: 1729 - DNA, 1635 bp, Artificial Sequence; identical to SEQ ID NO: 1664
  Synthetic Polynucleotide

SEQ ID NO: 1730 - DNA, 3144 bp, Artificial Sequence
  Synthetic Polynucleotide
atggccttaccagtgaccgccttgctcctgccgctggccttgctgctccacgccgccaggccggacatccagatgacacagagccctagcagcctgtctgccagcgtgggagacagagtgaccatcacatgcaaggccagcgaccacatcaacaactggctggcctggtatcagcagaagcctggacaggcccctaagctgctgatctacggcgctaccacactggaaacaggcgtgcccagcagattttctggcagcggctctggcaccgactacaccctgacaatatccagcctccagcctgaggacttcgccacctactactgtcagcagagctggaacaccccttggacattcggccagggcaccaagctggaaatcaagagactcgagcagtctaaagcccaggtgctgcaatctgtggccggacagacactgacagtgcggtgtcagtatcctcctaccggcagcctgtacgagaagaaaggctggtgcaaagaggccagcgcactcgtctgtatcagactggtcaccagcagcaagccccggacaatggcatggaccagcagattcaccatctgggacgatcccgacgccggcttctttaccgtgaccatgaccgacctgagagaagaggacagcggccactactggtgccggatctacagacccagcgacaacagcgtgtccaagagcgtgcggttctacctggtggtgtctcctgcctctgccagcacacagacaagctggaccccacgcgatctggtgtctagccagactcagacccagagctgtgtgcctcctacagctggtgctagacaggcccctgagagcccttctacaatccccgttccaagccagcctcagaacagcacactcagacctggacctgccgctcctattgctctggtgcctgtgttttgtggcctgctggtggctaagagcctggtgctgtctgccctgcttgtttggtggggagacatctggtggaaaaccatgatggaactgcggagcctggacacccagaaggccacctgtcatctccagcaagtgaccgatctgccctggacctctgtgtcaagccccgtggaaagagagatcctgtaccacaccgtggctcggaccaagatcagcgacgacgatgatgagcacacccttagggccaagcgatctggatctggagcaacaaacttctcactactcaaacaagcaggtgacgtggaggagaatcccgggcctactagtatggactggatttggcgcatccttttccttgtcggcgctgctaccggcgcgcattccttcgaacaagttcagcttcaacagcctggcgctgagctggtcaaacctggcgcttctgtgaagatgagctgcaaagccagcggctacgccttcagcagctactggatcaactggatgaagcagaaacccggccagggactcgaatggatcggccaaatctatcccggcgacggcgacaccaactacaacggcaagttcaagggcagagccacactgaccgccgatacctctagcagcacagcctacatgcagctgagcagcctgaccagcgaagatagcgccgtgtacttctgtgcccggtccatcacaacagtcgtgggctgcgctatggactattggggccagggaacaagcgtgaccgtgtctagtacgcgtcagagcaaggctcaggttctccagagtgtggcaggccagactctgactgtcagatgccagtatccaccaacaggctccctctatgagaaaaaaggatggtgtaaagaggcttctgccctcgtctgcatccggctggttacctctagcaagcccagaactatggcctggacatcccggtttacaatctgggatgaccctgatgccggatttttcacagtgacaatgacggatctgcgcgaggaagattccgggcactattggtgtagaatctacaggccctccgacaactccgtgtctaagtctgtgcgcttttacctggtcgtcagccctgccagtgcctccactcagacatcttggaccccaagggaccttgtgtcctctcagacacagacacagtcctgcgtgccaccaactgctggcgcaagacaggctccagagtctcccagcacaatccccgtcccttctcagccccagaactccacacttaggccaggaccagctgctccaatcgcactggtcccagtgttctgcggactgctggttgccaagtctctggtgctgagcgcactcctcgtttggtggggcgatatttggtggaaaacgatgatggaattgagatccctcgatacgcagaaagccacatgccaccttcagcaagtcacagacttgccttggaccagcgtcagctctcccgtggaacgggaaattctgtatcatacagtggcccgcaccaagatttccgacgatgacgacgagcacacactgcgcgccaagagaagcggatctggcgtgaagcagaccctgaatttcgacctgctgaagctggctggcgacgtggaatccaacccaggcccttctagaggccatatgaccgagtacaagcccacggtgcgcctcgccacccgcgacgacgtccccagggccgtacgcaccctcgccgccgcgttcgccgactaccccgccacgcgccacaccgtcgatccggaccgccacatcgagcgggtcaccgagctgcaagaactcttcctcacgcgcgtcgggctcgacatcggcaaggtgtgggtcgcggacgacggcgccgcggtggcggtctggaccacgccggagagcgtcgaagcgggggcggtgttcgccgagatcggcccgcgcatggccgagttgagcggttcccggctggccgcgcagcaacagatggaaggcctcctggcgccgcaccggcccaaggagcccgcgtggttcctggccaccgtcggcgtctcgcccgaccaccagggcaagggtctgggcagcgccgtcgtgctccccggagtggaggcggccgagcgcgccggggtgcccgccttcctggagacctccgcgccccgcaacctccccttctacgagcggctcggcttcaccgtcaccgccgacgtcgaggtgcccgaaggaccgcgcacctggtgcatgacccgcaagcccggtgcctga

SEQ ID NO: 1731 - DNA, 3306 bp, Artificial Sequence
  Synthetic Polynucleotide
atggccttaccagtgaccgccttgctcctgccgctggccttgctgctccacgccgccaggccggcatgcgaagtgcagctgcttgaaagtggcggcggactgattcagcctggcggatctctgagactgagctgtgccgccagcggcttcaccttttctagccacgccatgacctgggtccgacaggcacctggaaaagggcttgaatgggtgtccgccatcagcggctctggcgattacacacactacgccgacagcgtgaagggcagattcaccatcagcagagacaacagcaagaacaccgtgtacctccagatgaacagcctgagagccgaggacagcgccgtgtattattgcgccaaggatgaggatggcggcagcctgcttggacacagaggacaaggcaccctggtcaccgtttcttccggtaccggcggaggcggatctggcggcggaggtagcggtggcggaggatctgaattcggatctctcgagcagtctaaagcccaggtgctgcaatctgtggccggacagacactgacagtgcggtgtcagtatcctcctaccggcagcctgtacgagaagaaaggctggtgcaaagaggccagcgcactcgtctgtatcagactggtcaccagcagcaagccccggacaatggcatggaccagcagattcaccatctgggacgatcccgacgccggcttctttaccgtgaccatgaccgacctgagagaagaggacagcggccactactggtgccggatctacagacccagcgacaacagcgtgtccaagagcgtgcggttctacctggtggtgtctcctgcctctgccagcacacagacaagctggaccccacgcgatctggtgtctagccagactcagacccagagctgtgtgcctcctacagctggtgctagacaggcccctgagagcccttctacaatccccgttccaagccagcctcagaacagcacactcagacctggacctgccgctcctattgctctggtgcctgtgttttgtggcctgctggtggctaagagcctggtgctgtctgccctgcttgtttggtggggagacatctggtggaaaaccatgatggaactgcggagcctggacacccagaaggccacctgtcatctccagcaagtgaccgatctgccctggacctctgtgtcaagccccgtggaaagagagatcctgtaccacaccgtggctcggaccaagatcagcgacgacgatgatgagcacacccttagggccaagcgatctggatctggagcaacaaacttctcactactcaaacaagcaggtgacgtggaggagaatcccgggcctactagtgccaccatggactggatttggcgcatccttttccttgtcggcgctgctaccggcgcccattccgggcccgaagtgcagctggttgaatctggcggaggactggttcaggctggcggatctctgagactgtcttgtgccgccagcggcagaacctttagcatgggctggtttagacaggcccctggcaaagagagagagttcgtcgccgccatcacatactctggcggcagcccttactacgccgactctgtgaagggcagattcaccatcagccgggacaacgccaagaacaccgtgtacctccagatgaacagcctgaagcctgaggacaccgccgtgtactactgcgccgccaatccaacatacggcagcgactggaacgccgagaattggggccagggaacccaagtgacagtgtctagcggatccggcggcggaggatctggcggaggcggatctgggggcggaggctctttcgaaggcagcacgcgtcagagcaaggctcaggttctccagagtgtggcaggccagactctgactgtcagatgccagtatccaccaacaggctccctctatgagaaaaaaggatggtgtaaagaggcttctgccctcgtctgcatccggctggttacctctagcaagcccagaactatggcctggacatcccggtttacaatctgggatgaccctgatgccggatttttcacagtgacaatgacggatctgcgcgaggaagattccgggcactattggtgtagaatctacaggccctccgacaactccgtgtctaagtctgtgcgcttttacctggtcgtcagccctgccagtgcctccactcagacatcttggaccccaagggaccttgtgtcctctcagacacagacacagtcctgcgtgccaccaactgctggcgcaagacaggctccagagtctcccagcacaatccccgtcccttctcagccccagaactccacacttaggccaggaccagctgctccaatcgcactggtcccagtgttctgcggactgctggttgccaagtctctggtgctgagcgcactcctcgtttggtggggcgatatttggtggaaaacgatgatggaattgagatccctcgatacgcagaaagccacatgccaccttcagcaagtcacagacttgccttggaccagcgtcagctctcccgtggaacgggaaattctgtatcatacagtggcccgcaccaagatttccgacgatgacgacgagcacacactgcgcgccaagagaagcggatctggcgtgaagcagaccctgaatttcgacctgctgaagctggctggcgacgtggaatccaacccaggcccttctagaggccatatgaccgagtacaagcccacggtgcgcctcgccacccgcgacgacgtccccagggccgtacgcaccctcgccgccgcgttcgccgactaccccgccacgcgccacaccgtcgatccggaccgccacatcgagcgggtcaccgagctgcaagaactcttcctcacgcgcgtcgggctcgacatcggcaaggtgtgggtcgcggacgacggcgccgcggtggcggtctggaccacgccggagagcgtcgaagcgggggcggtgttcgccgagatcggcccgcgcatggccgagttgagcggttcccggctggccgcgcagcaacagatggaaggcctcctggcgccgcaccggcccaaggagcccgcgtggttcctggccaccgtcggcgtctcgcccgaccaccagggcaagggtctgggcagcgccgtcgtgctccccggagtggaggcggccgagcgcgccggggtgcccgccttcctggagacctccgcgccccgcaacctccccttctacgagcggctcggcttcaccgtcaccgccgacgtcgaggtgcccgaaggaccgcgcacctggtgcatgacccgcaagcccggtgcctga

SEQ ID NO: 1732 - DNA, 3756 bp, Artificial Sequence
  Synthetic Polynucleotide
atggccttaccagtgaccgccttgctcctgccgctggccttgctgctccacgccgccaggccggacatccagatgacacagagccctagcagcctgtctgccagcgtgggagacagagtgaccatcacatgcaaggccagcgaccacatcaacaactggctggcctggtatcagcagaagcctggacaggcccctaagctgctgatctacggcgctaccacactggaaacaggcgtgcccagcagattttctggcagcggctctggcaccgactacaccctgacaatatccagcctccagcctgaggacttcgccacctactactgtcagcagagctggaacaccccttggacattcggccagggcaccaagctggaaatcaagagactcgagggacagcctaaggccaatcctaccgtgacactgttccctccaagcagcgaagaactccaggccaacaaggccacacttgtgtgcctgatctccgacttctaccctggggctgtgacagtggcttggaaggccgatggatctcctgtgaaagccggcgtggaaaccaccaagccatccaagcagagcaacaacaaatacgccgccagctcctacctgagcctgacacctgagcagtggaagtcccacagatcctacagctgccaagtgacccacgaaggcagcaccgtggaaaagacagtggcccctacagagtgcagcggatcccagtctaaagcccaggtgctgcaatctgtggccggacagacactgacagtgcggtgtcagtatcctcctaccggcagcctgtacgagaagaaaggctggtgcaaagaggccagcgcactcgtctgtatcagactggtcaccagcagcaagccccggacaatggcatggaccagcagattcaccatctgggacgatcccgacgccggcttctttaccgtgaccatgaccgacctgagagaagaggacagcggccactactggtgccggatctacagacccagcgacaacagcgtgtccaagagcgtgcggttctacctggtggtgtctcctgcctctgccagcacacagacaagctggaccccacgcgatctggtgtctagccagactcagacccagagctgtgtgcctcctacagctggtgctagacaggcccctgagagcccttctacaatccccgttccaagccagcctcagaacagcacactcagacctggacctgccgctcctattgctctggtgcctgtgttttgtggcctgctggtggctaagagcctggtgctgtctgccctgcttgtttggtggggagacatctggtggaaaaccatgatggaactgcggagcctggacacccagaaggccacctgtcatctccagcaagtgaccgatctgccctggacctctgtgtcaagccccgtggaaagagagatcctgtaccacaccgtggctcggaccaagatcagcgacgacgatgatgagcacacccttagggccaagcgatctggatctggagcaacaaacttctcactactcaaacaagcaggtgacgtggaggagaatcccgggcctactagtatggactggatttggcgcatccttttccttgtcggcgctgctaccggcgcgcattccttcgaacaagttcagcttcaacagcctggcgctgagctggtcaaacctggcgcttctgtgaagatgagctgcaaagccagcggctacgccttcagcagctactggatcaactggatgaagcagaaacccggccagggactcgaatggatcggccaaatctatcccggcgacggcgacaccaactacaacggcaagttcaagggcagagccacactgaccgccgatacctctagcagcacagcctacatgcagctgagcagcctgaccagcgaagatagcgccgtgtacttctgtgcccggtccatcacaacagtcgtgggctgcgctatggactattggggccagggaacaagcgtgaccgtgtctagtacgcgtgcctctacaaagggaccctccgtgtttcctctggctcccagcagcaagtctacaagcggaggaacagccgctctgggctgcctggtcaaggattactttcccgagcctgtgaccgtgtcctggaatagcggagcactgacaagcggcgtgcacacctttccagccgtgctgcaaagcagcggcctgtactctctgagcagcgtggtcacagtgcctagctctagcctgggcacccagacctacatctgcaatgtgaaccacaagcctagcaacaccaaggtggacaagagagtggaacccaagagctgtggtacccagagcaaggctcaggttctccagagtgtggcaggccagactctgactgtcagatgccagtatccaccaacaggctccctctatgagaaaaaaggatggtgtaaagaggcttctgccctcgtctgcatccggctggttacctctagcaagcccagaactatggcctggacatcccggtttacaatctgggatgaccctgatgccggatttttcacagtgacaatgacggatctgcgcgaggaagattccgggcactattggtgtagaatctacaggccctccgacaactccgtgtctaagtctgtgcgcttttacctggtcgtcagccctgccagtgcctccactcagacatcttggaccccaagggaccttgtgtcctctcagacacagacacagtcctgcgtgccaccaactgctggcgcaagacaggctccagagtctcccagcacaatccccgtcccttctcagccccagaactccacacttaggccaggaccagctgctccaatcgcactggtcccagtgttctgcggactgctggttgccaagtctctggtgctgagcgcactcctcgtttggtggggcgatatttggtggaaaacgatgatggaattgagatccctcgatacgcagaaagccacatgccaccttcagcaagtcacagacttgccttggaccagcgtcagctctcccgtggaacgggaaattctgtatcatacagtggcccgcaccaagatttccgacgatgacgacgagcacacactgcgcgccaagagaagcggatctggcgtgaagcagaccctgaatttcgacctgctgaagctggctggcgacgtggaatccaacccaggcccttctagaggcgggatccacaccatggctacctacgaggtgctgtgcgaggtggcaagaaagctgggcaccgacgacagagaagtggtgctgttcctgctgaacgtgttcatccctcagcctacactggcccagctgatcggtgcactgagagccctgaaagaggaaggccggctgacctttcctctgctggccgaatgcctgttcagagccggaagaagggatctgctgcgggacctgctgcatctggaccccagatttctggaaagacacctggccggcaccatgagctacttcagcccttaccagctgaccgtgctgcacgttgacggcgaactgtgcgccagagatattcggagcctgatcttcctgagcaaggacaccatcggcagccggtctacccctcagacatttctgcactgggtgtactgcatggaaaacctggacctgctcggccccacagatgtggatgccctgatgtccatgctgagaagcctgagcagagtggacctccagagacaggtgcagacactgatgggactgcacctgagcggacctagccacagccagcactacagacacacccct

SEQ ID NO: 1733 - DNA, 3915 bp, Artificial Sequence
  Synthetic Polynucleotide
atggccttaccagtgaccgccttgctcctgccgctggccttgctgctccacgccgccaggccggacatccagatgacacagagccctagcagcctgtctgccagcgtgggagacagagtgaccatcacatgcaaggccagcgaccacatcaacaactggctggcctggtatcagcagaagcctggacaggcccctaagctgctgatctacggcgctaccacactggaaacaggcgtgcccagcagattttctggcagcggctctggcaccgactacaccctgacaatatccagcctccagcctgaggacttcgccacctactactgtcagcagagctggaacaccccttggacattcggccagggcaccaagctggaaatcaagagactcgagggacagcctaaggccaatcctaccgtgacactgttccctccaagcagcgaagaactccaggccaacaaggccacacttgtgtgcctgatctccgacttctaccctggggctgtgacagtggcttggaaggccgatggatctcctgtgaaagccggcgtggaaaccaccaagccatccaagcagagcaacaacaaatacgccgccagctcctacctgagcctgacacctgagcagtggaagtcccacagatcctacagctgccaagtgacccacgaaggcagcaccgtggaaaagacagtggcccctacagagtgcagcggatcccagtctaaagcccaggtgctgcaatctgtggccggacagacactgacagtgcggtgtcagtatcctcctaccggcagcctgtacgagaagaaaggctggtgcaaagaggccagcgcactcgtctgtatcagactggtcaccagcagcaagccccggacaatggcatggaccagcagattcaccatctgggacgatcccgacgccggcttctttaccgtgaccatgaccgacctgagagaagaggacagcggccactactggtgccggatctacagacccagcgacaacagcgtgtccaagagcgtgcggttctacctggtggtgtctcctgcctctgccagcacacagacaagctggaccccacgcgatctggtgtctagccagactcagacccagagctgtgtgcctcctacagctggtgctagacaggcccctgagagcccttctacaatccccgttccaagccagcctcagaacagcacactcagacctggacctgccgctcctattgctctggtgcctgtgttttgtggcctgctggtggctaagagcctggtgctgtctgccctgcttgtttggtggggagacatctggtggaaaaccatgatggaactgcggagcctggacacccagaaggccacctgtcatctccagcaagtgaccgatctgccctggacctctgtgtcaagccccgtggaaagagagatcctgtaccacaccgtggctcggaccaagatcagcgacgacgatgatgagcacacccttagggccaagcgatctggatctggagcaacaaacttctcactactcaaacaagcaggtgacgtggaggagaatcccgggcctactagtatggactggatttggcgcatccttttccttgtcggcgctgctaccggcgcgcattccttcgaacaagttcagcttcaacagcctggcgctgagctggtcaaacctggcgcttctgtgaagatgagctgcaaagccagcggctacgccttcagcagctactggatcaactggatgaagcagaaacccggccagggactcgaatggatcggccaaatctatcccggcgacggcgacaccaactacaacggcaagttcaagggcagagccacactgaccgccgatacctctagcagcacagcctacatgcagctgagcagcctgaccagcgaagatagcgccgtgtacttctgtgcccggtccatcacaacagtcgtgggctgcgctatggactattggggccagggaacaagcgtgaccgtgtctagtacgcgtgcctctacaaagggaccctccgtgtttcctctggctcccagcagcaagtctacaagcggaggaacagccgctctgggctgcctggtcaaggattactttcccgagcctgtgaccgtgtcctggaatagcggagcactgacaagcggcgtgcacacctttccagccgtgctgcaaagcagcggcctgtactctctgagcagcgtggtcacagtgcctagctctagcctgggcacccagacctacatctgcaatgtgaaccacaagcctagcaacaccaaggtggacaagagagtggaacccaagagctgtggtacccagagcaaggctcaggttctccagagtgtggcaggccagactctgactgtcagatgccagtatccaccaacaggctccctctatgagaaaaaaggatggtgtaaagaggcttctgccctcgtctgcatccggctggttacctctagcaagcccagaactatggcctggacatcccggtttacaatctgggatgaccctgatgccggatttttcacagtgacaatgacggatctgcgcgaggaagattccgggcactattggtgtagaatctacaggccctccgacaactccgtgtctaagtctgtgcgcttttacctggtcgtcagccctgccagtgcctccactcagacatcttggaccccaagggaccttgtgtcctctcagacacagacacagtcctgcgtgccaccaactgctggcgcaagacaggctccagagtctcccagcacaatccccgtcccttctcagccccagaactccacacttaggccaggaccagctgctccaatcgcactggtcccagtgttctgcggactgctggttgccaagtctctggtgctgagcgcactcctcgtttggtggggcgatatttggtggaaaacgatgatggaattgagatccctcgatacgcagaaagccacatgccaccttcagcaagtcacagacttgccttggaccagcgtcagctctcccgtggaacgggaaattctgtatcatacagtggcccgcaccaagatttccgacgatgacgacgagcacacactgcgcgccaagagaagcggatctggcgtgaagcagaccctgaatttcgacctgctgaagctggctggcgacgtggaatccaacccaggcccttctagaggcgggatccacaccatgtccgactccaaggaggtccctagccttccatttttgcgacacttgctcgaagagttggacagccatgaggacagcttgctgctgtttctgtgtcacgacgcggccccgggctgcacgacggtcacgcaagctttgtgctcgcttagccaacagcgcaagctgaccctcgcggctctggtcgagatgctctacgtgctgcagcgtatggatcttctcaagagccgcttcgggctcagcaaggagggggccgagcaattgctgggcacaagctttctcacgcgctaccgcaagctcatggtttgcgtgggtgaggagctcgactcgagcgagctacgcgctctacgcttgttcgcgtgcaacctgaatccgagcctgagcacggcgctttctgagagcagccgctttgtcgagcttgtactcgcgcttgaaaacgtaggactcgtctcgccatcgagtgtttccgtgcttgcggacatgttgcgcactcttcggcgcctcgatttgtgccagcagcttgttgagtacgaacaacaagagcaagccaggtaccgttactgttacgcggcctcgccctcattgccagttcgtacgttacgtcgggggcacggcgcgagtgaacacgagcagctgtgcatgcccgtgcaagaatcctctgacagccccgagctgctgcgcacgcccgtacaagaatcctccagcgacagccccgagcaaacgact

SEQ ID NO: 1734 - DNA, 3783 bp, Artificial Sequence
  Synthetic Polynucleotide
atggccttaccagtgaccgccttgctcctgccgctggccttgctgctccacgccgccaggccggacatccagatgacacagagccctagcagcctgtctgccagcgtgggagacagagtgaccatcacatgcaaggccagcgaccacatcaacaactggctggcctggtatcagcagaagcctggacaggcccctaagctgctgatctacggcgctaccacactggaaacaggcgtgcccagcagattttctggcagcggctctggcaccgactacaccctgacaatatccagcctccagcctgaggacttcgccacctactactgtcagcagagctggaacaccccttggacattcggccagggcaccaagctggaaatcaagagactcgagggacagcctaaggccaatcctaccgtgacactgttccctccaagcagcgaagaactccaggccaacaaggccacacttgtgtgcctgatctccgacttctaccctggggctgtgacagtggcttggaaggccgatggatctcctgtgaaagccggcgtggaaaccaccaagccatccaagcagagcaacaacaaatacgccgccagctcctacctgagcctgacacctgagcagtggaagtcccacagatcctacagctgccaagtgacccacgaaggcagcaccgtggaaaagacagtggcccctacagagtgcagcggatcccagtctaaagcccaggtgctgcaatctgtggccggacagacactgacagtgcggtgtcagtatcctcctaccggcagcctgtacgagaagaaaggctggtgcaaagaggccagcgcactcgtctgtatcagactggtcaccagcagcaagccccggacaatggcatggaccagcagattcaccatctgggacgatcccgacgccggcttctttaccgtgaccatgaccgacctgagagaagaggacagcggccactactggtgccggatctacagacccagcgacaacagcgtgtccaagagcgtgcggttctacctggtggtgtctcctgcctctgccagcacacagacaagctggaccccacgcgatctggtgtctagccagactcagacccagagctgtgtgcctcctacagctggtgctagacaggcccctgagagcccttctacaatccccgttccaagccagcctcagaacagcacactcagacctggacctgccgctcctattgctctggtgcctgtgttttgtggcctgctggtggctaagagcctggtgctgtctgccctgcttgtttggtggggagacatctggtggaaaaccatgatggaactgcggagcctggacacccagaaggccacctgtcatctccagcaagtgaccgatctgccctggacctctgtgtcaagccccgtggaaagagagatcctgtaccacaccgtggctcggaccaagatcagcgacgacgatgatgagcacacccttagggccaagcgatctggatctggagcaacaaacttctcactactcaaacaagcaggtgacgtggaggagaatcccgggcctactagtatggactggatttggcgcatccttttccttgtcggcgctgctaccggcgcgcattccttcgaacaagttcagcttcaacagcctggcgctgagctggtcaaacctggcgcttctgtgaagatgagctgcaaagccagcggctacgccttcagcagctactggatcaactggatgaagcagaaacccggccagggactcgaatggatcggccaaatctatcccggcgacggcgacaccaactacaacggcaagttcaagggcagagccacactgaccgccgatacctctagcagcacagcctacatgcagctgagcagcctgaccagcgaagatagcgccgtgtacttctgtgcccggtccatcacaacagtcgtgggctgcgctatggactattggggccagggaacaagcgtgaccgtgtctagtacgcgtgcctctacaaagggaccctccgtgtttcctctggctcccagcagcaagtctacaagcggaggaacagccgctctgggctgcctggtcaaggattactttcccgagcctgtgaccgtgtcctggaatagcggagcactgacaagcggcgtgcacacctttccagccgtgctgcaaagcagcggcctgtactctctgagcagcgtggtcacagtgcctagctctagcctgggcacccagacctacatctgcaatgtgaaccacaagcctagcaacaccaaggtggacaagagagtggaacccaagagctgtggtacccagagcaaggctcaggttctccagagtgtggcaggccagactctgactgtcagatgccagtatccaccaacaggctccctctatgagaaaaaaggatggtgtaaagaggcttctgccctcgtctgcatccggctggttacctctagcaagcccagaactatggcctggacatcccggtttacaatctgggatgaccctgatgccggatttttcacagtgacaatgacggatctgcgcgaggaagattccgggcactattggtgtagaatctacaggccctccgacaactccgtgtctaagtctgtgcgcttttacctggtcgtcagccctgccagtgcctccactcagacatcttggaccccaagggaccttgtgtcctctcagacacagacacagtcctgcgtgccaccaactgctggcgcaagacaggctccagagtctcccagcacaatccccgtcccttctcagccccagaactccacacttaggccaggaccagctgctccaatcgcactggtcccagtgttctgcggactgctggttgccaagtctctggtgctgagcgcactcctcgtttggtggggcgatatttggtggaaaacgatgatggaattgagatccctcgatacgcagaaagccacatgccaccttcagcaagtcacagacttgccttggaccagcgtcagctctcccgtggaacgggaaattctgtatcatacagtggcccgcaccaagatttccgacgatgacgacgagcacacactgcgcgccaagagaagcggatctggcgtgaagcagaccctgaatttcgacctgctgaagctggctggcgacgtggaatccaacccaggcccttctagaggccatatgaccgagtacaagcccacggtgcgcctcgccacccgcgacgacgtccccagggccgtacgcaccctcgccgccgcgttcgccgactaccccgccacgcgccacaccgtcgatccggaccgccacatcgagcgggtcaccgagctgcaagaactcttcctcacgcgcgtcgggctcgacatcggcaaggtgtgggtcgcggacgacggcgccgcggtggcggtctggaccacgccggagagcgtcgaagcgggggcggtgttcgccgagatcggcccgcgcatggccgagttgagcggttcccggctggccgcgcagcaacagatggaaggcctcctggcgccgcaccggcccaaggagcccgcgtggttcctggccaccgtcggcgtctcgcccgaccaccagggcaagggtctgggcagcgccgtcgtgctccccggagtggaggcggccgagcgcgccggggtgcccgccttcctggagacctccgcgccccgcaacctccccttctacgagcggctcggcttcaccgtcaccgccgacgtcgaggtgcccgaaggaccgcgcacctggtgcatgacccgcaagcccggtgcctga

SEQ ID NO: 1735 - DNA, 4194 bp, Artificial Sequence
  Synthetic Polynucleotide
atggccttaccagtgaccgccttgctcctgccgctggccttgctgctccacgccgccaggccggaagtgcagctggttgaatctggcggaggactggttcaggctggcggatctctgagactgtcttgtgccgccagcggcagaacctttagcatgggctggtttagacaggcccctggcaaagagagagagttcgtcgccgccatcacatactctggcggcagcccttactacgccgactctgtgaagggcagattcaccatcagccgggacaacgccaagaacaccgtgtacctccagatgaacagcctgaagcctgaggacaccgccgtgtactactgcgccgccaatccaacatacggcagcgactggaacgccgagaattggggccagggaacccaagtgacagtgtctagcggtaccggcggaggcggatctggcggcggaggtagcggtggcggaggatctgaattcgacatccagatgacacagagccctagcagcctgtctgccagcgtgggagacagagtgaccatcacatgcaaggccagcgaccacatcaacaactggctggcctggtatcagcagaagcctggacaggcccctaagctgctgatctacggcgctaccacactggaaacaggcgtgcccagcagattttctggcagcggctctggcaccgactacaccctgacaatatccagcctccagcctgaggacttcgccacctactactgtcagcagagctggaacaccccttggacattcggccagggcaccaagctggaaatcaagagactcgagggacagcctaaggccaatcctaccgtgacactgttccctccaagcagcgaagaactccaggccaacaaggccacacttgtgtgcctgatctccgacttctaccctggggctgtgacagtggcttggaaggccgatggatctcctgtgaaagccggcgtggaaaccaccaagccatccaagcagagcaacaacaaatacgccgccagctcctacctgagcctgacacctgagcagtggaagtcccacagatcctacagctgccaagtgacccacgaaggcagcaccgtggaaaagacagtggcccctacagagtgcagcggatcccagtctaaagcccaggtgctgcaatctgtggccggacagacactgacagtgcggtgtcagtatcctcctaccggcagcctgtacgagaagaaaggctggtgcaaagaggccagcgcactcgtctgtatcagactggtcaccagcagcaagccccggacaatggcatggaccagcagattcaccatctgggacgatcccgacgccggcttctttaccgtgaccatgaccgacctgagagaagaggacagcggccactactggtgccggatctacagacccagcgacaacagcgtgtccaagagcgtgcggttctacctggtggtgtctcctgcctctgccagcacacagacaagctggaccccacgcgatctggtgtctagccagactcagacccagagctgtgtgcctcctacagctggtgctagacaggcccctgagagcccttctacaatccccgttccaagccagcctcagaacagcacactcagacctggacctgccgctcctattgctctggtgcctgtgttttgtggcctgctggtggctaagagcctggtgctgtctgccctgcttgtttggtggggagacatctggtggaaaaccatgatggaactgcggagcctggacacccagaaggccacctgtcatctccagcaagtgaccgatctgccctggacctctgtgtcaagccccgtggaaagagagatcctgtaccacaccgtggctcggaccaagatcagcgacgacgatgatgagcacacccttagggccaagcgatctggatctggagcaacaaacttctcactactcaaacaagcaggtgacgtggaggagaatcccgggcctactagtatggactggatttggcgcatccttttccttgtcggcgctgctaccggcgcgcattccttcgaacaagttcagcttcaacagcctggcgctgagctggtcaaacctggcgcttctgtgaagatgagctgcaaagccagcggctacgccttcagcagctactggatcaactggatgaagcagaaacccggccagggactcgaatggatcggccaaatctatcccggcgacggcgacaccaactacaacggcaagttcaagggcagagccacactgaccgccgatacctctagcagcacagcctacatgcagctgagcagcctgaccagcgaagatagcgccgtgtacttctgtgcccggtccatcacaacagtcgtgggctgcgctatggactattggggccagggaacaagcgtgaccgtgtctagtacgcgtgcctctacaaagggaccctccgtgtttcctctggctcccagcagcaagtctacaagcggaggaacagccgctctgggctgcctggtcaaggattactttcccgagcctgtgaccgtgtcctggaatagcggagcactgacaagcggcgtgcacacctttccagccgtgctgcaaagcagcggcctgtactctctgagcagcgtggtcacagtgcctagctctagcctgggcacccagacctacatctgcaatgtgaaccacaagcctagcaacaccaaggtggacaagagagtggaacccaagagctgtggtacccagagcaaggctcaggttctccagagtgtggcaggccagactctgactgtcagatgccagtatccaccaacaggctccctctatgagaaaaaaggatggtgtaaagaggcttctgccctcgtctgcatccggctggttacctctagcaagcccagaactatggcctggacatcccggtttacaatctgggatgaccctgatgccggatttttcacagtgacaatgacggatctgcgcgaggaagattccgggcactattggtgtagaatctacaggccctccgacaactccgtgtctaagtctgtgcgcttttacctggtcgtcagccctgccagtgcctccactcagacatcttggaccccaagggaccttgtgtcctctcagacacagacacagtcctgcgtgccaccaactgctggcgcaagacaggctccagagtctcccagcacaatccccgtcccttctcagccccagaactccacacttaggccaggaccagctgctccaatcgcactggtcccagtgttctgcggactgctggttgccaagtctctggtgctgagcgcactcctcgtttggtggggcgatatttggtggaaaacgatgatggaattgagatccctcgatacgcagaaagccacatgccaccttcagcaagtcacagacttgccttggaccagcgtcagctctcccgtggaacgggaaattctgtatcatacagtggcccgcaccaagatttccgacgatgacgacgagcacacactgcgcgccaagagaagcggatctggcgtgaagcagaccctgaatttcgacctgctgaagctggctggcgacgtggaatccaacccaggcccttctagaggccatatgaccgagtacaagcccacggtgcgcctcgccacccgcgacgacgtccccagggccgtacgcaccctcgccgccgcgttcgccgactaccccgccacgcgccacaccgtcgatccggaccgccacatcgagcgggtcaccgagctgcaagaactcttcctcacgcgcgtcgggctcgacatcggcaaggtgtgggtcgcggacgacggcgccgcggtggcggtctggaccacgccggagagcgtcgaagcgggggcggtgttcgccgagatcggcccgcgcatggccgagttgagcggttcccggctggccgcgcagcaacagatggaaggcctcctggcgccgcaccggcccaaggagcccgcgtggttcctggccaccgtcggcgtctcgcccgaccaccagggcaagggtctgggcagcgccgtcgtgctccccggagtggaggcggccgagcgcgccggggtgcccgccttcctggagacctccgcgccccgcaacctccccttctacgagcggctcggcttcaccgtcaccgccgacgtcgaggtgcccgaaggaccgcgcacctggtgcatgacccgcaagcccggtgcctga

SEQ ID NO: 1736 - DNA, 4605 bp, Artificial Sequence
  Synthetic Polynucleotide
atggccttaccagtgaccgccttgctcctgccgctggccttgctgctccacgccgccaggccggaagtgcagctggttgaatctggcggaggactggttcaggctggcggatctctgagactgtcttgtgccgccagcggcagaacctttagcatgggctggtttagacaggcccctggcaaagagagagagttcgtcgccgccatcacatactctggcggcagcccttactacgccgactctgtgaagggcagattcaccatcagccgggacaacgccaagaacaccgtgtacctccagatgaacagcctgaagcctgaggacaccgccgtgtactactgcgccgccaatccaacatacggcagcgactggaacgccgagaattggggccagggaacccaagtgacagtgtctagcggtaccggcggaggcggatctggcggcggaggtagcggtggcggaggatctgaattcgacatccagatgacacagagccctagcagcctgtctgccagcgtgggagacagagtgaccatcacatgcaaggccagcgaccacatcaacaactggctggcctggtatcagcagaagcctggacaggcccctaagctgctgatctacggcgctaccacactggaaacaggcgtgcccagcagattttctggcagcggctctggcaccgactacaccctgacaatatccagcctccagcctgaggacttcgccacctactactgtcagcagagctggaacaccccttggacattcggccagggcaccaagctggaaatcaagagactcgagggacagcctaaggccaatcctaccgtgacactgttccctccaagcagcgaagaactccaggccaacaaggccacacttgtgtgcctgatctccgacttctaccctggggctgtgacagtggcttggaaggccgatggatctcctgtgaaagccggcgtggaaaccaccaagccatccaagcagagcaacaacaaatacgccgccagctcctacctgagcctgacacctgagcagtggaagtcccacagatcctacagctgccaagtgacccacgaaggcagcaccgtggaaaagacagtggcccctacagagtgcagcggatcccagtctaaagcccaggtgctgcaatctgtggccggacagacactgacagtgcggtgtcagtatcctcctaccggcagcctgtacgagaagaaaggctggtgcaaagaggccagcgcactcgtctgtatcagactggtcaccagcagcaagccccggacaatggcatggaccagcagattcaccatctgggacgatcccgacgccggcttctttaccgtgaccatgaccgacctgagagaagaggacagcggccactactggtgccggatctacagacccagcgacaacagcgtgtccaagagcgtgcggttctacctggtggtgtctcctgcctctgccagcacacagacaagctggaccccacgcgatctggtgtctagccagactcagacccagagctgtgtgcctcctacagctggtgctagacaggcccctgagagcccttctacaatccccgttccaagccagcctcagaacagcacactcagacctggacctgccgctcctattgctctggtgcctgtgttttgtggcctgctggtggctaagagcctggtgctgtctgccctgcttgtttggtggggagacatctggtggaaaaccatgatggaactgcggagcctggacacccagaaggccacctgtcatctccagcaagtgaccgatctgccctggacctctgtgtcaagccccgtggaaagagagatcctgtaccacaccgtggctcggaccaagatcagcgacgacgatgatgagcacacccttagggccaagcgatctggatctggagcaacaaacttctcactactcaaacaagcaggtgacgtggaggagaatcccgggcctactagtatggactggatttggcgcatccttttccttgtcggcgctgctaccggcgcgcattccgggcccgaagtgcaactggttgaatccggtggcggcctggtgcaagcaggcggatctctcagacttagctgtgccgcctccggcagaaccttcacaatgggatggtttaggcaggctccagggaaagagagagagttcgtcgccgccatctctctgtctcccacactggcctactacgccgactctgtgaaaggccggttcaccatctccagagataatgccaagaacaccgtggtgctgcaaatgaactctctgaaacccgaggatacagccctgtactattgtgccgctgaccggaagtccgtgatgagcatcagacccgattactggggacagggcacacaagtcacagtgtcctctggatccggcggcggaggatctggcggaggcggatctgggggcggaggctctttcgaacaagttcagcttcaacagcctggcgctgagctggtcaaacctggcgcttctgtgaagatgagctgcaaagccagcggctacgccttcagcagctactggatcaactggatgaagcagaaacccggccagggactcgaatggatcggccaaatctatcccggcgacggcgacaccaactacaacggcaagttcaagggcagagccacactgaccgccgatacctctagcagcacagcctacatgcagctgagcagcctgaccagcgaagatagcgccgtgtacttctgtgcccggtccatcacaacagtcgtgggctgcgctatggactattggggccagggaacaagcgtgaccgtgtctagtacgcgtgcctctacaaagggaccctccgtgtttcctctggctcccagcagcaagtctacaagcggaggaacagccgctctgggctgcctggtcaaggattactttcccgagcctgtgaccgtgtcctggaatagcggagcactgacaagcggcgtgcacacctttccagccgtgctgcaaagcagcggcctgtactctctgagcagcgtggtcacagtgcctagctctagcctgggcacccagacctacatctgcaatgtgaaccacaagcctagcaacaccaaggtggacaagagagtggaacccaagagctgtggtacccagagcaaggctcaggttctccagagtgtggcaggccagactctgactgtcagatgccagtatccaccaacaggctccctctatgagaaaaaaggatggtgtaaagaggcttctgccctcgtctgcatccggctggttacctctagcaagcccagaactatggcctggacatcccggtttacaatctgggatgaccctgatgccggatttttcacagtgacaatgacggatctgcgcgaggaagattccgggcactattggtgtagaatctacaggccctccgacaactccgtgtctaagtctgtgcgcttttacctggtcgtcagccctgccagtgcctccactcagacatcttggaccccaagggaccttgtgtcctctcagacacagacacagtcctgcgtgccaccaactgctggcgcaagacaggctccagagtctcccagcacaatccccgtcccttctcagccccagaactccacacttaggccaggaccagctgctccaatcgcactggtcccagtgttctgcggactgctggttgccaagtctctggtgctgagcgcactcctcgtttggtggggcgatatttggtggaaaacgatgatggaattgagatccctcgatacgcagaaagccacatgccaccttcagcaagtcacagacttgccttggaccagcgtcagctctcccgtggaacgggaaattctgtatcatacagtggcccgcaccaagatttccgacgatgacgacgagcacacactgcgcgccaagagaagcggatctggcgtgaagcagaccctgaatttcgacctgctgaagctggctggcgacgtggaatccaacccaggcccttctagaggccatatgaccgagtacaagcccacggtgcgcctcgccacccgcgacgacgtccccagggccgtacgcaccctcgccgccgcgttcgccgactaccccgccacgcgccacaccgtcgatccggaccgccacatcgagcgggtcaccgagctgcaagaactcttcctcacgcgcgtcgggctcgacatcggcaaggtgtgggtcgcggacgacggcgccgcggtggcggtctggaccacgccggagagcgtcgaagcgggggcggtgttcgccgagatcggcccgcgcatggccgagttgagcggttcccggctggccgcgcagcaacagatggaaggcctcctggcgccgcaccggcccaaggagcccgcgtggttcctggccaccgtcggcgtctcgcccgaccaccagggcaagggtctgggcagcgccgtcgtgctccccggagtggaggcggccgagcgcgccggggtgcccgccttcctggagacctccgcgccccgcaacctccccttctacgagcggctcggcttcaccgtcaccgccgacgtcgaggtgcccgaaggaccgcgcacctggtgcatgacccgcaagcccggtgcctga

SEQ ID NO: 1737 - DNA, 3804 bp, Artificial Sequence
  Synthetic Polynucleotide
atggccttaccagtgaccgccttgctcctgccgctggccttgctgctccacgccgccaggccggaagtgcagctggttgaatctggcggaggactggttcaggctggcggatctctgagactgtcttgtgccgccagcggcagaacctttagcatgggctggtttagacaggcccctggcaaagagagagagttcgtcgccgccatcacatactctggcggcagcccttactacgccgactctgtgaagggcagattcaccatcagccgggacaacgccaagaacaccgtgtacctccagatgaacagcctgaagcctgaggacaccgccgtgtactactgcgccgccaatccaacatacggcagcgactggaacgccgagaattggggccagggaacccaagtgacagtgtctagcctcgagggacagcctaaggccaatcctaccgtgacactgttccctccaagcagcgaagaactccaggccaacaaggccacacttgtgtgcctgatctccgacttctaccctggggctgtgacagtggcttggaaggccgatggatctcctgtgaaagccggcgtggaaaccaccaagccatccaagcagagcaacaacaaatacgccgccagctcctacctgagcctgacacctgagcagtggaagtcccacagatcctacagctgccaagtgacccacgaaggcagcaccgtggaaaagacagtggcccctacagagtgcagcggatcccagtctaaagcccaggtgctgcaatctgtggccggacagacactgacagtgcggtgtcagtatcctcctaccggcagcctgtacgagaagaaaggctggtgcaaagaggccagcgcactcgtctgtatcagactggtcaccagcagcaagccccggacaatggcatggaccagcagattcaccatctgggacgatcccgacgccggcttctttaccgtgaccatgaccgacctgagagaagaggacagcggccactactggtgccggatctacagacccagcgacaacagcgtgtccaagagcgtgcggttctacctggtggtgtctcctgcctctgccagcacacagacaagctggaccccacgcgatctggtgtctagccagactcagacccagagctgtgtgcctcctacagctggtgctagacaggcccctgagagcccttctacaatccccgttccaagccagcctcagaacagcacactcagacctggacctgccgctcctattgctctggtgcctgtgttttgtggcctgctggtggctaagagcctggtgctgtctgccctgcttgtttggtggggagacatctggtggaaaaccatgatggaactgcggagcctggacacccagaaggccacctgtcatctccagcaagtgaccgatctgccctggacctctgtgtcaagccccgtggaaagagagatcctgtaccacaccgtggctcggaccaagatcagcgacgacgatgatgagcacacccttagggccaagcgatctggatctggagcaacaaacttctcactactcaaacaagcaggtgacgtggaggagaatcccgggcctactagtatggactggatttggcgcatccttttccttgtcggcgctgctaccggcgcgcattccgggcccgaagtgcaactggttgaatccggtggcggcctggtgcaagcaggcggatctctcagacttagctgtgccgcctccggcagaaccttcacaatgggatggtttaggcaggctccagggaaagagagagagttcgtcgccgccatctctctgtctcccacactggcctactacgccgactctgtgaaaggccggttcaccatctccagagataatgccaagaacaccgtggtgctgcaaatgaactctctgaaacccgaggatacagccctgtactattgtgccgctgaccggaagtccgtgatgagcatcagacccgattactggggacagggcacacaagtcacagtgtcctctacgcgtgcctctacaaagggaccctccgtgtttcctctggctcccagcagcaagtctacaagcggaggaacagccgctctgggctgcctggtcaaggattactttcccgagcctgtgaccgtgtcctggaatagcggagcactgacaagcggcgtgcacacctttccagccgtgctgcaaagcagcggcctgtactctctgagcagcgtggtcacagtgcctagctctagcctgggcacccagacctacatctgcaatgtgaaccacaagcctagcaacaccaaggtggacaagagagtggaacccaagagctgtggtacccagagcaaggctcaggttctccagagtgtggcaggccagactctgactgtcagatgccagtatccaccaacaggctccctctatgagaaaaaaggatggtgtaaagaggcttctgccctcgtctgcatccggctggttacctctagcaagcccagaactatggcctggacatcccggtttacaatctgggatgaccctgatgccggatttttcacagtgacaatgacggatctgcgcgaggaagattccgggcactattggtgtagaatctacaggccctccgacaactccgtgtctaagtctgtgcgcttttacctggtcgtcagccctgccagtgcctccactcagacatcttggaccccaagggaccttgtgtcctctcagacacagacacagtcctgcgtgccaccaactgctggcgcaagacaggctccagagtctcccagcacaatccccgtcccttctcagccccagaactccacacttaggccaggaccagctgctccaatcgcactggtcccagtgttctgcggactgctggttgccaagtctctggtgctgagcgcactcctcgtttggtggggcgatatttggtggaaaacgatgatggaattgagatccctcgatacgcagaaagccacatgccaccttcagcaagtcacagacttgccttggaccagcgtcagctctcccgtggaacgggaaattctgtatcatacagtggcccgcaccaagatttccgacgatgacgacgagcacacactgcgcgccaagagaagcggatctggcgtgaagcagaccctgaatttcgacctgctgaagctggctggcgacgtggaatccaacccaggcccttctagaggccatatgaccgagtacaagcccacggtgcgcctcgccacccgcgacgacgtccccagggccgtacgcaccctcgccgccgcgttcgccgactaccccgccacgcgccacaccgtcgatccggaccgccacatcgagcgggtcaccgagctgcaagaactcttcctcacgcgcgtcgggctcgacatcggcaaggtgtgggtcgcggacgacggcgccgcggtggcggtctggaccacgccggagagcgtcgaagcgggggcggtgttcgccgagatcggcccgcgcatggccgagttgagcggttcccggctggccgcgcagcaacagatggaaggcctcctggcgccgcaccggcccaaggagcccgcgtggttcctggccaccgtcggcgtctcgcccgaccaccagggcaagggtctgggcagcgccgtcgtgctccccggagtggaggcggccgagcgcgccggggtgcccgccttcctggagacctccgcgccccgcaacctccccttctacgagcggctcggcttcaccgtcaccgccgacgtcgaggtgcccgaaggaccgcgcacctggtgcatgacccgcaagcccggtgcctga

SEQ ID NO: 1738 - DNA, 3828 bp, Artificial Sequence
  Synthetic Polynucleotide
atggccttaccagtgaccgccttgctcctgccgctggccttgctgctccacgccgccaggccggacatccagatgacacagagccctagcagcctgtctgccagcgtgggagacagagtgaccatcacatgcaaggccagcgaccacatcaacaactggctggcctggtatcagcagaagcctggacaggcccctaagctgctgatctacggcgctaccacactggaaacaggcgtgcccagcagattttctggcagcggctctggcaccgactacaccctgacaatatccagcctccagcctgaggacttcgccacctactactgtcagcagagctggaacaccccttggacattcggccagggcaccaagctggaaatcaagagactcgaggacctgaagaacgtgttcccacctgaggtggccgtgttcgagcctagcgaggccgagatcagccacacccagaaagccaccctcgtgtgcctggctaccggcttctaccccgaccatgtggaactgtcttggtgggtcaacggcaaagaggtgcacagcggcgtgtctaccgacccccagccactgaaagaacagcccgccctgaacgacagccggtactgcctgagcagcagactgagagtgtccgccaccttctggcagaacccccggaaccacttcagatgccaggtgcagttctacggcctgagcgagaacgacgagtggacccaggacagagccaagcccgtgacccagatcgtgtctgccgaagcctggggcagagccgattgcggatcccagtctaaagcccaggtgctgcaatctgtggccggacagacactgacagtgcggtgtcagtatcctcctaccggcagcctgtacgagaagaaaggctggtgcaaagaggccagcgcactcgtctgtatcagactggtcaccagcagcaagccccggacaatggcatggaccagcagattcaccatctgggacgatcccgacgccggcttctttaccgtgaccatgaccgacctgagagaagaggacagcggccactactggtgccggatctacagacccagcgacaacagcgtgtccaagagcgtgcggttctacctggtggtgtctcctgcctctgccagcacacagacaagctggaccccacgcgatctggtgtctagccagactcagacccagagctgtgtgcctcctacagctggtgctagacaggcccctgagagcccttctacaatccccgttccaagccagcctcagaacagcacactcagacctggacctgccgctcctattgctctggtgcctgtgttttgtggcctgctggtggctaagagcctggtgctgtctgccctgcttgtttggtggggagacatctggtggaaaaccatgatggaactgcggagcctggacacccagaaggccacctgtcatctccagcaagtgaccgatctgccctggacctctgtgtcaagccccgtggaaagagagatcctgtaccacaccgtggctcggaccaagatcagcgacgacgatgatgagcacacccttagggccaagcgatctggatctggagcaacaaacttctcactactcaaacaagcaggtgacgtggaggagaatcccgggcctactagtatggactggatttggcgcatccttttccttgtcggcgctgctaccggcgcgcattccttcgaacaagttcagcttcaacagcctggcgctgagctggtcaaacctggcgcttctgtgaagatgagctgcaaagccagcggctacgccttcagcagctactggatcaactggatgaagcagaaacccggccagggactcgaatggatcggccaaatctatcccggcgacggcgacaccaactacaacggcaagttcaagggcagagccacactgaccgccgatacctctagcagcacagcctacatgcagctgagcagcctgaccagcgaagatagcgccgtgtacttctgtgcccggtccatcacaacagtcgtgggctgcgctatggactattggggccagggaacaagcgtgaccgtgtctagtacgcgtatccagaaccctgatcctgccgtgtaccagctgcgggatagcaagagcagcgacaagagcgtgtgtctgttcaccgacttcgacagccagaccaacgtgtcccagagcaaggactccgacgtgtacatcaccgataagaccgtgctggacatgcggagcatggacttcaagagcaactccgccgtggcctggtccaacaagtccgatttcgcctgcgccaacgccttcaacaacagcattatccccgaggacacattcttcccaagccccgagagcagctgcggtacccagagcaaggctcaggttctccagagtgtggcaggccagactctgactgtcagatgccagtatccaccaacaggctccctctatgagaaaaaaggatggtgtaaagaggcttctgccctcgtctgcatccggctggttacctctagcaagcccagaactatggcctggacatcccggtttacaatctgggatgaccctgatgccggatttttcacagtgacaatgacggatctgcgcgaggaagattccgggcactattggtgtagaatctacaggccctccgacaactccgtgtctaagtctgtgcgcttttacctggtcgtcagccctgccagtgcctccactcagacatcttggaccccaagggaccttgtgtcctctcagacacagacacagtcctgcgtgccaccaactgctggcgcaagacaggctccagagtctcccagcacaatccccgtcccttctcagccccagaactccacacttaggccaggaccagctgctccaatcgcactggtcccagtgttctgcggactgctggttgccaagtctctggtgctgagcgcactcctcgtttggtggggcgatatttggtggaaaacgatgatggaattgagatccctcgatacgcagaaagccacatgccaccttcagcaagtcacagacttgccttggaccagcgtcagctctcccgtggaacgggaaattctgtatcatacagtggcccgcaccaagatttccgacgatgacgacgagcacacactgcgcgccaagagaagcggatctggcgtgaagcagaccctgaatttcgacctgctgaagctggctggcgacgtggaatccaacccaggcccttctagaggccatatgaccgagtacaagcccacggtgcgcctcgccacccgcgacgacgtccccagggccgtacgcaccctcgccgccgcgttcgccgactaccccgccacgcgccacaccgtcgatccggaccgccacatcgagcgggtcaccgagctgcaagaactcttcctcacgcgcgtcgggctcgacatcggcaaggtgtgggtcgcggacgacggcgccgcggtggcggtctggaccacgccggagagcgtcgaagcgggggcggtgttcgccgagatcggcccgcgcatggccgagttgagcggttcccggctggccgcgcagcaacagatggaaggcctcctggcgccgcaccggcccaaggagcccgcgtggttcctggccaccgtcggcgtctcgcccgaccaccagggcaagggtctgggcagcgccgtcgtgctccccggagtggaggcggccgagcgcgccggggtgcccgccttcctggagacctccgcgccccgcaacctccccttctacgagcggctcggcttcaccgtcaccgccgacgtcgaggtgcccgaaggaccgcgcacctggtgcatgacccgcaagcccggtgcctga

SEQ ID NO: 1739 - DNA, 4239 bp, Artificial Sequence
  Synthetic Polynucleotide
atggccttaccagtgaccgccttgctcctgccgctggccttgctgctccacgccgccaggccggaagtgcagctggttgaatctggcggaggactggttcaggctggcggatctctgagactgtcttgtgccgccagcggcagaacctttagcatgggctggtttagacaggcccctggcaaagagagagagttcgtcgccgccatcacatactctggcggcagcccttactacgccgactctgtgaagggcagattcaccatcagccgggacaacgccaagaacaccgtgtacctccagatgaacagcctgaagcctgaggacaccgccgtgtactactgcgccgccaatccaacatacggcagcgactggaacgccgagaattggggccagggaacccaagtgacagtgtctagcggtaccggcggaggcggatctggcggcggaggtagcggtggcggaggatctgaattcgacatccagatgacacagagccctagcagcctgtctgccagcgtgggagacagagtgaccatcacatgcaaggccagcgaccacatcaacaactggctggcctggtatcagcagaagcctggacaggcccctaagctgctgatctacggcgctaccacactggaaacaggcgtgcccagcagattttctggcagcggctctggcaccgactacaccctgacaatatccagcctccagcctgaggacttcgccacctactactgtcagcagagctggaacaccccttggacattcggccagggcaccaagctggaaatcaagagactcgaggacctgaagaacgtgttcccacctgaggtggccgtgttcgagcctagcgaggccgagatcagccacacccagaaagccaccctcgtgtgcctggctaccggcttctaccccgaccatgtggaactgtcttggtgggtcaacggcaaagaggtgcacagcggcgtgtctaccgacccccagccactgaaagaacagcccgccctgaacgacagccggtactgcctgagcagcagactgagagtgtccgccaccttctggcagaacccccggaaccacttcagatgccaggtgcagttctacggcctgagcgagaacgacgagtggacccaggacagagccaagcccgtgacccagatcgtgtctgccgaagcctggggcagagccgattgcggatcccagtctaaagcccaggtgctgcaatctgtggccggacagacactgacagtgcggtgtcagtatcctcctaccggcagcctgtacgagaagaaaggctggtgcaaagaggccagcgcactcgtctgtatcagactggtcaccagcagcaagccccggacaatggcatggaccagcagattcaccatctgggacgatcccgacgccggcttctttaccgtgaccatgaccgacctgagagaagaggacagcggccactactggtgccggatctacagacccagcgacaacagcgtgtccaagagcgtgcggttctacctggtggtgtctcctgcctctgccagcacacagacaagctggaccccacgcgatctggtgtctagccagactcagacccagagctgtgtgcctcctacagctggtgctagacaggcccctgagagcccttctacaatccccgttccaagccagcctcagaacagcacactcagacctggacctgccgctcctattgctctggtgcctgtgttttgtggcctgctggtggctaagagcctggtgctgtctgccctgcttgtttggtggggagacatctggtggaaaaccatgatggaactgcggagcctggacacccagaaggccacctgtcatctccagcaagtgaccgatctgccctggacctctgtgtcaagccccgtggaaagagagatcctgtaccacaccgtggctcggaccaagatcagcgacgacgatgatgagcacacccttagggccaagcgatctggatctggagcaacaaacttctcactactcaaacaagcaggtgacgtggaggagaatcccgggcctactagtatggactggatttggcgcatccttttccttgtcggcgctgctaccggcgcgcattccttcgaacaagttcagcttcaacagcctggcgctgagctggtcaaacctggcgcttctgtgaagatgagctgcaaagccagcggctacgccttcagcagctactggatcaactggatgaagcagaaacccggccagggactcgaatggatcggccaaatctatcccggcgacggcgacaccaactacaacggcaagttcaagggcagagccacactgaccgccgatacctctagcagcacagcctacatgcagctgagcagcctgaccagcgaagatagcgccgtgtacttctgtgcccggtccatcacaacagtcgtgggctgcgctatggactattggggccagggaacaagcgtgaccgtgtctagtacgcgtatccagaaccctgatcctgccgtgtaccagctgcgggatagcaagagcagcgacaagagcgtgtgtctgttcaccgacttcgacagccagaccaacgtgtcccagagcaaggactccgacgtgtacatcaccgataagaccgtgctggacatgcggagcatggacttcaagagcaactccgccgtggcctggtccaacaagtccgatttcgcctgcgccaacgccttcaacaacagcattatccccgaggacacattcttcccaagccccgagagcagctgcggtacccagagcaaggctcaggttctccagagtgtggcaggccagactctgactgtcagatgccagtatccaccaacaggctccctctatgagaaaaaaggatggtgtaaagaggcttctgccctcgtctgcatccggctggttacctctagcaagcccagaactatggcctggacatcccggtttacaatctgggatgaccctgatgccggatttttcacagtgacaatgacggatctgcgcgaggaagattccgggcactattggtgtagaatctacaggccctccgacaactccgtgtctaagtctgtgcgcttttacctggtcgtcagccctgccagtgcctccactcagacatcttggaccccaagggaccttgtgtcctctcagacacagacacagtcctgcgtgccaccaactgctggcgcaagacaggctccagagtctcccagcacaatccccgtcccttctcagccccagaactccacacttaggccaggaccagctgctccaatcgcactggtcccagtgttctgcggactgctggttgccaagtctctggtgctgagcgcactcctcgtttggtggggcgatatttggtggaaaacgatgatggaattgagatccctcgatacgcagaaagccacatgccaccttcagcaagtcacagacttgccttggaccagcgtcagctctcccgtggaacgggaaattctgtatcatacagtggcccgcaccaagatttccgacgatgacgacgagcacacactgcgcgccaagagaagcggatctggcgtgaagcagaccctgaatttcgacctgctgaagctggctggcgacgtggaatccaacccaggcccttctagaggccatatgaccgagtacaagcccacggtgcgcctcgccacccgcgacgacgtccccagggccgtacgcaccctcgccgccgcgttcgccgactaccccgccacgcgccacaccgtcgatccggaccgccacatcgagcgggtcaccgagctgcaagaactcttcctcacgcgcgtcgggctcgacatcggcaaggtgtgggtcgcggacgacggcgccgcggtggcggtctggaccacgccggagagcgtcgaagcgggggcggtgttcgccgagatcggcccgcgcatggccgagttgagcggttcccggctggccgcgcagcaacagatggaaggcctcctggcgccgcaccggcccaaggagcccgcgtggttcctggccaccgtcggcgtctcgcccgaccaccagggcaagggtctgggcagcgccgtcgtgctccccggagtggaggcggccgagcgcgccggggtgcccgccttcctggagacctccgcgccccgcaacctccccttctacgagcggctcggcttcaccgtcaccgccgacgtcgaggtgcccgaaggaccgcgcacctggtgcatgacccgcaagcccggtgcctga

SEQ ID NO: 1740 - DNA, 4650 bp, Artificial Sequence
  Synthetic Polynucleotide
atggccttaccagtgaccgccttgctcctgccgctggccttgctgctccacgccgccaggccggaagtgcagctggttgaatctggcggaggactggttcaggctggcggatctctgagactgtcttgtgccgccagcggcagaacctttagcatgggctggtttagacaggcccctggcaaagagagagagttcgtcgccgccatcacatactctggcggcagcccttactacgccgactctgtgaagggcagattcaccatcagccgggacaacgccaagaacaccgtgtacctccagatgaacagcctgaagcctgaggacaccgccgtgtactactgcgccgccaatccaacatacggcagcgactggaacgccgagaattggggccagggaacccaagtgacagtgtctagcggtaccggcggaggcggatctggcggcggaggtagcggtggcggaggatctgaattcgacatccagatgacacagagccctagcagcctgtctgccagcgtgggagacagagtgaccatcacatgcaaggccagcgaccacatcaacaactggctggcctggtatcagcagaagcctggacaggcccctaagctgctgatctacggcgctaccacactggaaacaggcgtgcccagcagattttctggcagcggctctggcaccgactacaccctgacaatatccagcctccagcctgaggacttcgccacctactactgtcagcagagctggaacaccccttggacattcggccagggcaccaagctggaaatcaagagactcgaggacctgaagaacgtgttcccacctgaggtggccgtgttcgagcctagcgaggccgagatcagccacacccagaaagccaccctcgtgtgcctggctaccggcttctaccccgaccatgtggaactgtcttggtgggtcaacggcaaagaggtgcacagcggcgtgtctaccgacccccagccactgaaagaacagcccgccctgaacgacagccggtactgcctgagcagcagactgagagtgtccgccaccttctggcagaacccccggaaccacttcagatgccaggtgcagttctacggcctgagcgagaacgacgagtggacccaggacagagccaagcccgtgacccagatcgtgtctgccgaagcctggggcagagccgattgcggatcccagtctaaagcccaggtgctgcaatctgtggccggacagacactgacagtgcggtgtcagtatcctcctaccggcagcctgtacgagaagaaaggctggtgcaaagaggccagcgcactcgtctgtatcagactggtcaccagcagcaagccccggacaatggcatggaccagcagattcaccatctgggacgatcccgacgccggcttctttaccgtgaccatgaccgacctgagagaagaggacagcggccactactggtgccggatctacagacccagcgacaacagcgtgtccaagagcgtgcggttctacctggtggtgtctcctgcctctgccagcacacagacaagctggaccccacgcgatctggtgtctagccagactcagacccagagctgtgtgcctcctacagctggtgctagacaggcccctgagagcccttctacaatccccgttccaagccagcctcagaacagcacactcagacctggacctgccgctcctattgctctggtgcctgtgttttgtggcctgctggtggctaagagcctggtgctgtctgccctgcttgtttggtggggagacatctggtggaaaaccatgatggaactgcggagcctggacacccagaaggccacctgtcatctccagcaagtgaccgatctgccctggacctctgtgtcaagccccgtggaaagagagatcctgtaccacaccgtggctcggaccaagatcagcgacgacgatgatgagcacacccttagggccaagcgatctggatctggagcaacaaacttctcactactcaaacaagcaggtgacgtggaggagaatcccgggcctactagtatggactggatttggcgcatccttttccttgtcggcgctgctaccggcgcgcattccgggcccgaagtgcaactggttgaatccggtggcggcctggtgcaagcaggcggatctctcagacttagctgtgccgcctccggcagaaccttcacaatgggatggtttaggcaggctccagggaaagagagagagttcgtcgccgccatctctctgtctcccacactggcctactacgccgactctgtgaaaggccggttcaccatctccagagataatgccaagaacaccgtggtgctgcaaatgaactctctgaaacccgaggatacagccctgtactattgtgccgctgaccggaagtccgtgatgagcatcagacccgattactggggacagggcacacaagtcacagtgtcctctggatccggcggcggaggatctggcggaggcggatctgggggcggaggctctttcgaacaagttcagcttcaacagcctggcgctgagctggtcaaacctggcgcttctgtgaagatgagctgcaaagccagcggctacgccttcagcagctactggatcaactggatgaagcagaaacccggccagggactcgaatggatcggccaaatctatcccggcgacggcgacaccaactacaacggcaagttcaagggcagagccacactgaccgccgatacctctagcagcacagcctacatgcagctgagcagcctgaccagcgaagatagcgccgtgtacttctgtgcccggtccatcacaacagtcgtgggctgcgctatggactattggggccagggaacaagcgtgaccgtgtctagtacgcgtatccagaaccctgatcctgccgtgtaccagctgcgggatagcaagagcagcgacaagagcgtgtgtctgttcaccgacttcgacagccagaccaacgtgtcccagagcaaggactccgacgtgtacatcaccgataagaccgtgctggacatgcggagcatggacttcaagagcaactccgccgtggcctggtccaacaagtccgatttcgcctgcgccaacgccttcaacaacagcattatccccgaggacacattcttcccaagccccgagagcagctgcggtacccagagcaaggctcaggttctccagagtgtggcaggccagactctgactgtcagatgccagtatccaccaacaggctccctctatgagaaaaaaggatggtgtaaagaggcttctgccctcgtctgcatccggctggttacctctagcaagcccagaactatggcctggacatcccggtttacaatctgggatgaccctgatgccggatttttcacagtgacaatgacggatctgcgcgaggaagattccgggcactattggtgtagaatctacaggccctccgacaactccgtgtctaagtctgtgcgcttttacctggtcgtcagccctgccagtgcctccactcagacatcttggaccccaagggaccttgtgtcctctcagacacagacacagtcctgcgtgccaccaactgctggcgcaagacaggctccagagtctcccagcacaatccccgtcccttctcagccccagaactccacacttaggccaggaccagctgctccaatcgcactggtcccagtgttctgcggactgctggttgccaagtctctggtgctgagcgcactcctcgtttggtggggcgatatttggtggaaaacgatgatggaattgagatccctcgatacgcagaaagccacatgccaccttcagcaagtcacagacttgccttggaccagcgtcagctctcccgtggaacgggaaattctgtatcatacagtggcccgcaccaagatttccgacgatgacgacgagcacacactgcgcgccaagagaagcggatctggcgtgaagcagaccctgaatttcgacctgctgaagctggctggcgacgtggaatccaacccaggcccttctagaggccatatgaccgagtacaagcccacggtgcgcctcgccacccgcgacgacgtccccagggccgtacgcaccctcgccgccgcgttcgccgactaccccgccacgcgccacaccgtcgatccggaccgccacatcgagcgggtcaccgagctgcaagaactcttcctcacgcgcgtcgggctcgacatcggcaaggtgtgggtcgcggacgacggcgccgcggtggcggtctggaccacgccggagagcgtcgaagcgggggcggtgttcgccgagatcggcccgcgcatggccgagttgagcggttcccggctggccgcgcagcaacagatggaaggcctcctggcgccgcaccggcccaaggagcccgcgtggttcctggccaccgtcggcgtctcgcccgaccaccagggcaagggtctgggcagcgccgtcgtgctccccggagtggaggcggccgagcgcgccggggtgcccgccttcctggagacctccgcgccccgcaacctccccttctacgagcggctcggcttcaccgtcaccgccgacgtcgaggtgcccgaaggaccgcgcacctggtgcatgacccgcaagcccggtgcctga

SEQ ID NO: 1741 - DNA, 3849 bp, Artificial Sequence
  Synthetic Polynucleotide
atggccttaccagtgaccgccttgctcctgccgctggccttgctgctccacgccgccaggccggaagtgcagctggttgaatctggcggaggactggttcaggctggcggatctctgagactgtcttgtgccgccagcggcagaacctttagcatgggctggtttagacaggcccctggcaaagagagagagttcgtcgccgccatcacatactctggcggcagcccttactacgccgactctgtgaagggcagattcaccatcagccgggacaacgccaagaacaccgtgtacctccagatgaacagcctgaagcctgaggacaccgccgtgtactactgcgccgccaatccaacatacggcagcgactggaacgccgagaattggggccagggaacccaagtgacagtgtctagcctcgaggacctgaagaacgtgttcccacctgaggtggccgtgttcgagcctagcgaggccgagatcagccacacccagaaagccaccctcgtgtgcctggctaccggcttctaccccgaccatgtggaactgtcttggtgggtcaacggcaaagaggtgcacagcggcgtgtctaccgacccccagccactgaaagaacagcccgccctgaacgacagccggtactgcctgagcagcagactgagagtgtccgccaccttctggcagaacccccggaaccacttcagatgccaggtgcagttctacggcctgagcgagaacgacgagtggacccaggacagagccaagcccgtgacccagatcgtgtctgccgaagcctggggcagagccgattgcggatcccagtctaaagcccaggtgctgcaatctgtggccggacagacactgacagtgcggtgtcagtatcctcctaccggcagcctgtacgagaagaaaggctggtgcaaagaggccagcgcactcgtctgtatcagactggtcaccagcagcaagccccggacaatggcatggaccagcagattcaccatctgggacgatcccgacgccggcttctttaccgtgaccatgaccgacctgagagaagaggacagcggccactactggtgccggatctacagacccagcgacaacagcgtgtccaagagcgtgcggttctacctggtggtgtctcctgcctctgccagcacacagacaagctggaccccacgcgatctggtgtctagccagactcagacccagagctgtgtgcctcctacagctggtgctagacaggcccctgagagcccttctacaatccccgttccaagccagcctcagaacagcacactcagacctggacctgccgctcctattgctctggtgcctgtgttttgtggcctgctggtggctaagagcctggtgctgtctgccctgcttgtttggtggggagacatctggtggaaaaccatgatggaactgcggagcctggacacccagaaggccacctgtcatctccagcaagtgaccgatctgccctggacctctgtgtcaagccccgtggaaagagagatcctgtaccacaccgtggctcggaccaagatcagcgacgacgatgatgagcacacccttagggccaagcgatctggatctggagcaacaaacttctcactactcaaacaagcaggtgacgtggaggagaatcccgggcctactagtatggactggatttggcgcatccttttccttgtcggcgctgctaccggcgcgcattccgggcccgaagtgcaactggttgaatccggtggcggcctggtgcaagcaggcggatctctcagacttagctgtgccgcctccggcagaaccttcacaatgggatggtttaggcaggctccagggaaagagagagagttcgtcgccgccatctctctgtctcccacactggcctactacgccgactctgtgaaaggccggttcaccatctccagagataatgccaagaacaccgtggtgctgcaaatgaactctctgaaacccgaggatacagccctgtactattgtgccgctgaccggaagtccgtgatgagcatcagacccgattactggggacagggcacacaagtcacagtgtcctctacgcgtatccagaaccctgatcctgccgtgtaccagctgcgggatagcaagagcagcgacaagagcgtgtgtctgttcaccgacttcgacagccagaccaacgtgtcccagagcaaggactccgacgtgtacatcaccgataagaccgtgctggacatgcggagcatggacttcaagagcaactccgccgtggcctggtccaacaagtccgatttcgcctgcgccaacgccttcaacaacagcattatccccgaggacacattcttcccaagccccgagagcagctgcggtacccagagcaaggctcaggttctccagagtgtggcaggccagactctgactgtcagatgccagtatccaccaacaggctccctctatgagaaaaaaggatggtgtaaagaggcttctgccctcgtctgcatccggctggttacctctagcaagcccagaactatggcctggacatcccggtttacaatctgggatgaccctgatgccggatttttcacagtgacaatgacggatctgcgcgaggaagattccgggcactattggtgtagaatctacaggccctccgacaactccgtgtctaagtctgtgcgcttttacctggtcgtcagccctgccagtgcctccactcagacatcttggaccccaagggaccttgtgtcctctcagacacagacacagtcctgcgtgccaccaactgctggcgcaagacaggctccagagtctcccagcacaatccccgtcccttctcagccccagaactccacacttaggccaggaccagctgctccaatcgcactggtcccagtgttctgcggactgctggttgccaagtctctggtgctgagcgcactcctcgtttggtggggcgatatttggtggaaaacgatgatggaattgagatccctcgatacgcagaaagccacatgccaccttcagcaagtcacagacttgccttggaccagcgtcagctctcccgtggaacgggaaattctgtatcatacagtggcccgcaccaagatttccgacgatgacgacgagcacacactgcgcgccaagagaagcggatctggcgtgaagcagaccctgaatttcgacctgctgaagctggctggcgacgtggaatccaacccaggcccttctagaggccatatgaccgagtacaagcccacggtgcgcctcgccacccgcgacgacgtccccagggccgtacgcaccctcgccgccgcgttcgccgactaccccgccacgcgccacaccgtcgatccggaccgccacatcgagcgggtcaccgagctgcaagaactcttcctcacgcgcgtcgggctcgacatcggcaaggtgtgggtcgcggacgacggcgccgcggtggcggtctggaccacgccggagagcgtcgaagcgggggcggtgttcgccgagatcggcccgcgcatggccgagttgagcggttcccggctggccgcgcagcaacagatggaaggcctcctggcgccgcaccggcccaaggagcccgcgtggttcctggccaccgtcggcgtctcgcccgaccaccagggcaagggtctgggcagcgccgtcgtgctccccggagtggaggcggccgagcgcgccggggtgcccgccttcctggagacctccgcgccccgcaacctccccttctacgagcggctcggcttcaccgtcaccgccgacgtcgaggtgcccgaaggaccgcgcacctggtgcatgacccgcaagcccggtgcctga

SEQ ID NO: 1742 - DNA, 1953 bp, Artificial Sequence
  Synthetic Polynucleotide
atggccttaccagtgaccgccttgctcctgccgctggccttgctgctccacgccgccaggccggcatgcgaagtgcagctgcttgaaagtggcggcggactgattcagcctggcggatctctgagactgagctgtgccgccagcggcttcaccttttctagccacgccatgacctgggtccgacaggcacctggaaaagggcttgaatgggtgtccgccatcagcggctctggcgattacacacactacgccgacagcgtgaagggcagattcaccatcagcagagacaacagcaagaacaccgtgtacctccagatgaacagcctgagagccgaggacagcgccgtgtattattgcgccaaggatgaggatggcggcagcctgcttggacacagaggacaaggcaccctggtcaccgtttcttccggtaccggcggaggcggatctggcggcggaggtagcggtggcggaggatctgaattcggatctctcgagcagtctaaagcccaggtgctgcaatctgtggccggacagacactgacagtgcggtgtcagtatcctcctaccggcagcctgtacgagaagaaaggctggtgcaaagaggccagcgcactcgtctgtatcagactggtcaccagcagcaagccccggacaatggcatggaccagcagattcaccatctgggacgatcccgacgccggcttctttaccgtgaccatgaccgacctgagagaagaggacagcggccactactggtgccggatctacagacccagcgacaacagcgtgtccaagagcgtgcggttctacctggtggtgtctcctgcctctgccagcacacagacaagctggaccccacgcgatctggtgtctagccagactcagacccagagctgtgtgcctcctacagctggtgctagacaggcccctgagagcccttctacaatccccgttccaagccagcctcagaacagcacactcagacctggacctgccgctcctattgctctggtgcctgtgttttgtggcctgctggtggctaagagcctggtgctgtctgccctgcttgtttggtggggagacatctggtggaaaaccatgatggaactgcggagcctggacacccagaaggccacctgtcatctccagcaagtgaccgatctgccctggacctctgtgtcaagccccgtggaaagagagatcctgtaccacaccgtggctcggaccaagatcagcgacgacgatgatgagcacacccttagggccaagcgatctggatctggagcaacaaacttctcactactcaaacaagcaggtgacgtggaggagaatcccgggcctactagaggccatatgaccgagtacaagcccacggtgcgcctcgccacccgcgacgacgtccccagggccgtacgcaccctcgccgccgcgttcgccgactaccccgccacgcgccacaccgtcgatccggaccgccacatcgagcgggtcaccgagctgcaagaactcttcctcacgcgcgtcgggctcgacatcggcaaggtgtgggtcgcggacgacggcgccgcggtggcggtctggaccacgccggagagcgtcgaagcgggggcggtgttcgccgagatcggcccgcgcatggccgagttgagcggttcccggctggccgcgcagcaacagatggaaggcctcctggcgccgcaccggcccaaggagcccgcgtggttcctggccaccgtcggcgtctcgcccgaccaccagggcaagggtctgggcagcgccgtcgtgctccccggagtggaggcggccgagcgcgccggggtgcccgccttcctggagacctccgcgccccgcaacctccccttctacgagcggctcggcttcaccgtcaccgccgacgtcgaggtgcccgaaggaccgcgcacctggtgcatgacccgcaagcccggtgcctga

SEQ ID NO: 1743 - DNA, 2529 bp, Artificial Sequence
  Synthetic Polynucleotide
atggccttaccagtgaccgccttgctcctgccgctggccttgctgctccacgccgccaggccggacatccagatgacacagagccctagcagcctgtctgccagcgtgggagacagagtgaccatcacatgcaaggccagcgaccacatcaacaactggctggcctggtatcagcagaagcctggacaggcccctaagctgctgatctacggcgctaccacactggaaacaggcgtgcccagcagattttctggcagcggctctggcaccgactacaccctgacaatatccagcctccagcctgaggacttcgccacctactactgtcagcagagctggaacaccccttggacattcggccagggcaccaagctggaaatcaagagactcgagatcggctggctgttgctccaggcccctcggtgggtgttcaaggaggaagaccctattcacctgaggtgtcacagctggaagaacactgctctgcataaggtcacatatttacagaatggcaaaggcaggaagtattttcatcataattctgacttctacattccaaaagccacactcaaagacagcggctcctacttctgcagggggcttgttgggagtaaaaatgtgtcttcagagactgtgaacatcaccatcactcaaggtttggcagtgtcaaccatctcatcattctttccacctggctaccaagtgtccttctgcctggtcatggtgctgctgttcgccgtggataccggcctgtacttcagcgtcaagaccaacatccggtccagcaccagagactggaaggaccacaagttcaagtggcggaaggaccctcaggacaagagggccaagcgatctggatctggagcaacaaacttctcactactcaaacaagcaggtgacgtggaggagaatcccgggcctactagtatggactggatttggcgcatccttttccttgtcggcgctgctaccggcgcgcattccttcgaacaagttcagcttcaacagcctggcgctgagctggtcaaacctggcgcttctgtgaagatgagctgcaaagccagcggctacgccttcagcagctactggatcaactggatgaagcagaaacccggccagggactcgaatggatcggccaaatctatcccggcgacggcgacaccaactacaacggcaagttcaagggcagagccacactgaccgccgatacctctagcagcacagcctacatgcagctgagcagcctgaccagcgaagatagcgccgtgtacttctgtgcccggtccatcacaacagtcgtgggctgcgctatggactattggggccagggaacaagcgtgaccgtgtctagtacgcgtaagtctgtgcgcttttacctggtcgtcagccctgccagtgcctccactcagacatcttggaccccaagggaccttgtgtcctctcagacacagacacagtcctgcgtgccaccaactgctggcgcaagacaggctccagagtctcccagcacaatccccgtcccttctcagccccagaactccacacttaggccaggaccagctgctccaatcgcactggtcccagtgttctgcggactgctggttgccaagtctctggtgctgagcgcactcctcgtttggtggggcgatatttggtggaaaacgatgatggaattgagatccctcgatacgcagaaagccacatgccaccttcagcaagtcacagacttgccttggaccagcgtcagctctcccgtggaacgggaaattctgtatcatacagtggcccgcaccaagatttccgacgatgacgacgagcacacactgcgcgccaagagaagcggatctggcgtgaagcagaccctgaatttcgacctgctgaagctggctggcgacgtggaatccaacccaggcccttctagaggccatatgaccgagtacaagcccacggtgcgcctcgccacccgcgacgacgtccccagggccgtacgcaccctcgccgccgcgttcgccgactaccccgccacgcgccacaccgtcgatccggaccgccacatcgagcgggtcaccgagctgcaagaactcttcctcacgcgcgtcgggctcgacatcggcaaggtgtgggtcgcggacgacggcgccgcggtggcggtctggaccacgccggagagcgtcgaagcgggggcggtgttcgccgagatcggcccgcgcatggccgagttgagcggttcccggctggccgcgcagcaacagatggaaggcctcctggcgccgcaccggcccaaggagcccgcgtggttcctggccaccgtcggcgtctcgcccgaccaccagggcaagggtctgggcagcgccgtcgtgctccccggagtggaggcggccgagcgcgccggggtgcccgccttcctggagacctccgcgccccgcaacctccccttctacgagcggctcggcttcaccgtcaccgccgacgtcgaggtgcccgaaggaccgcgcacctggtgcatgacccgcaagcccggtgcctga

SEQ ID NO: 1744 - DNA, 2691 bp, Artificial Sequence
  Synthetic Polynucleotide
atggccttaccagtgaccgccttgctcctgccgctggccttgctgctccacgccgccaggccggcatgcgaagtgcagctgcttgaaagtggcggcggactgattcagcctggcggatctctgagactgagctgtgccgccagcggcttcaccttttctagccacgccatgacctgggtccgacaggcacctggaaaagggcttgaatgggtgtccgccatcagcggctctggcgattacacacactacgccgacagcgtgaagggcagattcaccatcagcagagacaacagcaagaacaccgtgtacctccagatgaacagcctgagagccgaggacagcgccgtgtattattgcgccaaggatgaggatggcggcagcctgcttggacacagaggacaaggcaccctggtcaccgtttcttccggtaccggcggaggcggatctggcggcggaggtagcggtggcggaggatctgaattcggatctctcgagatcggctggctgttgctccaggcccctcggtgggtgttcaaggaggaagaccctattcacctgaggtgtcacagctggaagaacactgctctgcataaggtcacatatttacagaatggcaaaggcaggaagtattttcatcataattctgacttctacattccaaaagccacactcaaagacagcggctcctacttctgcagggggcttgttgggagtaaaaatgtgtcttcagagactgtgaacatcaccatcactcaaggtttggcagtgtcaaccatctcatcattctttccacctggctaccaagtgtccttctgcctggtcatggtgctgctgttcgccgtggataccggcctgtacttcagcgtcaagaccaacatccggtccagcaccagagactggaaggaccacaagttcaagtggcggaaggaccctcaggacaagagggccaagcgatctggatctggagcaacaaacttctcactactcaaacaagcaggtgacgtggaggagaatcccgggcctactagtgccaccatggactggatttggcgcatccttttccttgtcggcgctgctaccggcgcccattccgggcccgaagtgcagctggttgaatctggcggaggactggttcaggctggcggatctctgagactgtcttgtgccgccagcggcagaacctttagcatgggctggtttagacaggcccctggcaaagagagagagttcgtcgccgccatcacatactctggcggcagcccttactacgccgactctgtgaagggcagattcaccatcagccgggacaacgccaagaacaccgtgtacctccagatgaacagcctgaagcctgaggacaccgccgtgtactactgcgccgccaatccaacatacggcagcgactggaacgccgagaattggggccagggaacccaagtgacagtgtctagcggatccggcggcggaggatctggcggaggcggatctgggggcggaggctctttcgaaggcagcacgcgtaagtctgtgcgcttttacctggtcgtcagccctgccagtgcctccactcagacatcttggaccccaagggaccttgtgtcctctcagacacagacacagtcctgcgtgccaccaactgctggcgcaagacaggctccagagtctcccagcacaatccccgtcccttctcagccccagaactccacacttaggccaggaccagctgctccaatcgcactggtcccagtgttctgcggactgctggttgccaagtctctggtgctgagcgcactcctcgtttggtggggcgatatttggtggaaaacgatgatggaattgagatccctcgatacgcagaaagccacatgccaccttcagcaagtcacagacttgccttggaccagcgtcagctctcccgtggaacgggaaattctgtatcatacagtggcccgcaccaagatttccgacgatgacgacgagcacacactgcgcgccaagagaagcggatctggcgtgaagcagaccctgaatttcgacctgctgaagctggctggcgacgtggaatccaacccaggcccttctagaggccatatgaccgagtacaagcccacggtgcgcctcgccacccgcgacgacgtccccagggccgtacgcaccctcgccgccgcgttcgccgactaccccgccacgcgccacaccgtcgatccggaccgccacatcgagcgggtcaccgagctgcaagaactcttcctcacgcgcgtcgggctcgacatcggcaaggtgtgggtcgcggacgacggcgccgcggtggcggtctggaccacgccggagagcgtcgaagcgggggcggtgttcgccgagatcggcccgcgcatggccgagttgagcggttcccggctggccgcgcagcaacagatggaaggcctcctggcgccgcaccggcccaaggagcccgcgtggttcctggccaccgtcggcgtctcgcccgaccaccagggcaagggtctgggcagcgccgtcgtgctccccggagtggaggcggccgagcgcgccggggtgcccgccttcctggagacctccgcgccccgcaacctccccttctacgagcggctcggcttcaccgtcaccgccgacgtcgaggtgcccgaaggaccgcgcacctggtgcatgacccgcaagcccggtgcctga

SEQ ID NO: 1745 - DNA, 3141 bp, Artificial Sequence
  Synthetic Polynucleotide
atggccttaccagtgaccgccttgctcctgccgctggccttgctgctccacgccgccaggccggacatccagatgacacagagccctagcagcctgtctgccagcgtgggagacagagtgaccatcacatgcaaggccagcgaccacatcaacaactggctggcctggtatcagcagaagcctggacaggcccctaagctgctgatctacggcgctaccacactggaaacaggcgtgcccagcagattttctggcagcggctctggcaccgactacaccctgacaatatccagcctccagcctgaggacttcgccacctactactgtcagcagagctggaacaccccttggacattcggccagggcaccaagctggaaatcaagagactcgagggacagcctaaggccaatcctaccgtgacactgttccctccaagcagcgaagaactccaggccaacaaggccacacttgtgtgcctgatctccgacttctaccctggggctgtgacagtggcttggaaggccgatggatctcctgtgaaagccggcgtggaaaccaccaagccatccaagcagagcaacaacaaatacgccgccagctcctacctgagcctgacacctgagcagtggaagtcccacagatcctacagctgccaagtgacccacgaaggcagcaccgtggaaaagacagtggcccctacagagtgcagcggatccatcggctggctgttgctccaggcccctcggtgggtgttcaaggaggaagaccctattcacctgaggtgtcacagctggaagaacactgctctgcataaggtcacatatttacagaatggcaaaggcaggaagtattttcatcataattctgacttctacattccaaaagccacactcaaagacagcggctcctacttctgcagggggcttgttgggagtaaaaatgtgtcttcagagactgtgaacatcaccatcactcaaggtttggcagtgtcaaccatctcatcattctttccacctggctaccaagtgtccttctgcctggtcatggtgctgctgttcgccgtggataccggcctgtacttcagcgtcaagaccaacatccggtccagcaccagagactggaaggaccacaagttcaagtggcggaaggaccctcaggacaagagggccaagcgatctggatctggagcaacaaacttctcactactcaaacaagcaggtgacgtggaggagaatcccgggcctactagtatggactggatttggcgcatccttttccttgtcggcgctgctaccggcgcgcattccttcgaacaagttcagcttcaacagcctggcgctgagctggtcaaacctggcgcttctgtgaagatgagctgcaaagccagcggctacgccttcagcagctactggatcaactggatgaagcagaaacccggccagggactcgaatggatcggccaaatctatcccggcgacggcgacaccaactacaacggcaagttcaagggcagagccacactgaccgccgatacctctagcagcacagcctacatgcagctgagcagcctgaccagcgaagatagcgccgtgtacttctgtgcccggtccatcacaacagtcgtgggctgcgctatggactattggggccagggaacaagcgtgaccgtgtctagtacgcgtgcctctacaaagggaccctccgtgtttcctctggctcccagcagcaagtctacaagcggaggaacagccgctctgggctgcctggtcaaggattactttcccgagcctgtgaccgtgtcctggaatagcggagcactgacaagcggcgtgcacacctttccagccgtgctgcaaagcagcggcctgtactctctgagcagcgtggtcacagtgcctagctctagcctgggcacccagacctacatctgcaatgtgaaccacaagcctagcaacaccaaggtggacaagagagtggaacccaagagctgtggtaccaagtctgtgcgcttttacctggtcgtcagccctgccagtgcctccactcagacatcttggaccccaagggaccttgtgtcctctcagacacagacacagtcctgcgtgccaccaactgctggcgcaagacaggctccagagtctcccagcacaatccccgtcccttctcagccccagaactccacacttaggccaggaccagctgctccaatcgcactggtcccagtgttctgcggactgctggttgccaagtctctggtgctgagcgcactcctcgtttggtggggcgatatttggtggaaaacgatgatggaattgagatccctcgatacgcagaaagccacatgccaccttcagcaagtcacagacttgccttggaccagcgtcagctctcccgtggaacgggaaattctgtatcatacagtggcccgcaccaagatttccgacgatgacgacgagcacacactgcgcgccaagagaagcggatctggcgtgaagcagaccctgaatttcgacctgctgaagctggctggcgacgtggaatccaacccaggcccttctagaggcgggatccacaccatggctacctacgaggtgctgtgcgaggtggcaagaaagctgggcaccgacgacagagaagtggtgctgttcctgctgaacgtgttcatccctcagcctacactggcccagctgatcggtgcactgagagccctgaaagaggaaggccggctgacctttcctctgctggccgaatgcctgttcagagccggaagaagggatctgctgcgggacctgctgcatctggaccccagatttctggaaagacacctggccggcaccatgagctacttcagcccttaccagctgaccgtgctgcacgttgacggcgaactgtgcgccagagatattcggagcctgatcttcctgagcaaggacaccatcggcagccggtctacccctcagacatttctgcactgggtgtactgcatggaaaacctggacctgctcggccccacagatgtggatgccctgatgtccatgctgagaagcctgagcagagtggacctccagagacaggtgcagacactgatgggactgcacctgagcggacctagccacagccagcactacagacacacccct

SEQ ID NO: 1746 - DNA, 3300 bp, Artificial Sequence
  Synthetic Polynucleotide
atggccttaccagtgaccgccttgctcctgccgctggccttgctgctccacgccgccaggccggacatccagatgacacagagccctagcagcctgtctgccagcgtgggagacagagtgaccatcacatgcaaggccagcgaccacatcaacaactggctggcctggtatcagcagaagcctggacaggcccctaagctgctgatctacggcgctaccacactggaaacaggcgtgcccagcagattttctggcagcggctctggcaccgactacaccctgacaatatccagcctccagcctgaggacttcgccacctactactgtcagcagagctggaacaccccttggacattcggccagggcaccaagctggaaatcaagagactcgagggacagcctaaggccaatcctaccgtgacactgttccctccaagcagcgaagaactccaggccaacaaggccacacttgtgtgcctgatctccgacttctaccctggggctgtgacagtggcttggaaggccgatggatctcctgtgaaagccggcgtggaaaccaccaagccatccaagcagagcaacaacaaatacgccgccagctcctacctgagcctgacacctgagcagtggaagtcccacagatcctacagctgccaagtgacccacgaaggcagcaccgtggaaaagacagtggcccctacagagtgcagcggatccatcggctggctgttgctccaggcccctcggtgggtgttcaaggaggaagaccctattcacctgaggtgtcacagctggaagaacactgctctgcataaggtcacatatttacagaatggcaaaggcaggaagtattttcatcataattctgacttctacattccaaaagccacactcaaagacagcggctcctacttctgcagggggcttgttgggagtaaaaatgtgtcttcagagactgtgaacatcaccatcactcaaggtttggcagtgtcaaccatctcatcattctttccacctggctaccaagtgtccttctgcctggtcatggtgctgctgttcgccgtggataccggcctgtacttcagcgtcaagaccaacatccggtccagcaccagagactggaaggaccacaagttcaagtggcggaaggaccctcaggacaagagggccaagcgatctggatctggagcaacaaacttctcactactcaaacaagcaggtgacgtggaggagaatcccgggcctactagtatggactggatttggcgcatccttttccttgtcggcgctgctaccggcgcgcattccttcgaacaagttcagcttcaacagcctggcgctgagctggtcaaacctggcgcttctgtgaagatgagctgcaaagccagcggctacgccttcagcagctactggatcaactggatgaagcagaaacccggccagggactcgaatggatcggccaaatctatcccggcgacggcgacaccaactacaacggcaagttcaagggcagagccacactgaccgccgatacctctagcagcacagcctacatgcagctgagcagcctgaccagcgaagatagcgccgtgtacttctgtgcccggtccatcacaacagtcgtgggctgcgctatggactattggggccagggaacaagcgtgaccgtgtctagtacgcgtgcctctacaaagggaccctccgtgtttcctctggctcccagcagcaagtctacaagcggaggaacagccgctctgggctgcctggtcaaggattactttcccgagcctgtgaccgtgtcctggaatagcggagcactgacaagcggcgtgcacacctttccagccgtgctgcaaagcagcggcctgtactctctgagcagcgtggtcacagtgcctagctctagcctgggcacccagacctacatctgcaatgtgaaccacaagcctagcaacaccaaggtggacaagagagtggaacccaagagctgtggtaccaagtctgtgcgcttttacctggtcgtcagccctgccagtgcctccactcagacatcttggaccccaagggaccttgtgtcctctcagacacagacacagtcctgcgtgccaccaactgctggcgcaagacaggctccagagtctcccagcacaatccccgtcccttctcagccccagaactccacacttaggccaggaccagctgctccaatcgcactggtcccagtgttctgcggactgctggttgccaagtctctggtgctgagcgcactcctcgtttggtggggcgatatttggtggaaaacgatgatggaattgagatccctcgatacgcagaaagccacatgccaccttcagcaagtcacagacttgccttggaccagcgtcagctctcccgtggaacgggaaattctgtatcatacagtggcccgcaccaagatttccgacgatgacgacgagcacacactgcgcgccaagagaagcggatctggcgtgaagcagaccctgaatttcgacctgctgaagctggctggcgacgtggaatccaacccaggcccttctagaggcgggatccacaccatgtccgactccaaggaggtccctagccttccatttttgcgacacttgctcgaagagttggacagccatgaggacagcttgctgctgtttctgtgtcacgacgcggccccgggctgcacgacggtcacgcaagctttgtgctcgcttagccaacagcgcaagctgaccctcgcggctctggtcgagatgctctacgtgctgcagcgtatggatcttctcaagagccgcttcgggctcagcaaggagggggccgagcaattgctgggcacaagctttctcacgcgctaccgcaagctcatggtttgcgtgggtgaggagctcgactcgagcgagctacgcgctctacgcttgttcgcgtgcaacctgaatccgagcctgagcacggcgctttctgagagcagccgctttgtcgagcttgtactcgcgcttgaaaacgtaggactcgtctcgccatcgagtgtttccgtgcttgcggacatgttgcgcactcttcggcgcctcgatttgtgccagcagcttgttgagtacgaacaacaagagcaagccaggtaccgttactgttacgcggcctcgccctcattgccagttcgtacgttacgtcgggggcacggcgcgagtgaacacgagcagctgtgcatgcccgtgcaagaatcctctgacagccccgagctgctgcgcacgcccgtacaagaatcctccagcgacagccccgagcaaacgact

SEQ ID NO: 1747 - DNA, 3168 bp, Artificial Sequence
  Synthetic Polynucleotide
atggccttaccagtgaccgccttgctcctgccgctggccttgctgctccacgccgccaggccggacatccagatgacacagagccctagcagcctgtctgccagcgtgggagacagagtgaccatcacatgcaaggccagcgaccacatcaacaactggctggcctggtatcagcagaagcctggacaggcccctaagctgctgatctacggcgctaccacactggaaacaggcgtgcccagcagattttctggcagcggctctggcaccgactacaccctgacaatatccagcctccagcctgaggacttcgccacctactactgtcagcagagctggaacaccccttggacattcggccagggcaccaagctggaaatcaagagactcgagggacagcctaaggccaatcctaccgtgacactgttccctccaagcagcgaagaactccaggccaacaaggccacacttgtgtgcctgatctccgacttctaccctggggctgtgacagtggcttggaaggccgatggatctcctgtgaaagccggcgtggaaaccaccaagccatccaagcagagcaacaacaaatacgccgccagctcctacctgagcctgacacctgagcagtggaagtcccacagatcctacagctgccaagtgacccacgaaggcagcaccgtggaaaagacagtggcccctacagagtgcagcggatccatcggctggctgttgctccaggcccctcggtgggtgttcaaggaggaagaccctattcacctgaggtgtcacagctggaagaacactgctctgcataaggtcacatatttacagaatggcaaaggcaggaagtattttcatcataattctgacttctacattccaaaagccacactcaaagacagcggctcctacttctgcagggggcttgttgggagtaaaaatgtgtcttcagagactgtgaacatcaccatcactcaaggtttggcagtgtcaaccatctcatcattctttccacctggctaccaagtgtccttctgcctggtcatggtgctgctgttcgccgtggataccggcctgtacttcagcgtcaagaccaacatccggtccagcaccagagactggaaggaccacaagttcaagtggcggaaggaccctcaggacaagagggccaagcgatctggatctggagcaacaaacttctcactactcaaacaagcaggtgacgtggaggagaatcccgggcctactagtatggactggatttggcgcatccttttccttgtcggcgctgctaccggcgcgcattccttcgaacaagttcagcttcaacagcctggcgctgagctggtcaaacctggcgcttctgtgaagatgagctgcaaagccagcggctacgccttcagcagctactggatcaactggatgaagcagaaacccggccagggactcgaatggatcggccaaatctatcccggcgacggcgacaccaactacaacggcaagttcaagggcagagccacactgaccgccgatacctctagcagcacagcctacatgcagctgagcagcctgaccagcgaagatagcgccgtgtacttctgtgcccggtccatcacaacagtcgtgggctgcgctatggactattggggccagggaacaagcgtgaccgtgtctagtacgcgtgcctctacaaagggaccctccgtgtttcctctggctcccagcagcaagtctacaagcggaggaacagccgctctgggctgcctggtcaaggattactttcccgagcctgtgaccgtgtcctggaatagcggagcactgacaagcggcgtgcacacctttccagccgtgctgcaaagcagcggcctgtactctctgagcagcgtggtcacagtgcctagctctagcctgggcacccagacctacatctgcaatgtgaaccacaagcctagcaacaccaaggtggacaagagagtggaacccaagagctgtggtaccaagtctgtgcgcttttacctggtcgtcagccctgccagtgcctccactcagacatcttggaccccaagggaccttgtgtcctctcagacacagacacagtcctgcgtgccaccaactgctggcgcaagacaggctccagagtctcccagcacaatccccgtcccttctcagccccagaactccacacttaggccaggaccagctgctccaatcgcactggtcccagtgttctgcggactgctggttgccaagtctctggtgctgagcgcactcctcgtttggtggggcgatatttggtggaaaacgatgatggaattgagatccctcgatacgcagaaagccacatgccaccttcagcaagtcacagacttgccttggaccagcgtcagctctcccgtggaacgggaaattctgtatcatacagtggcccgcaccaagatttccgacgatgacgacgagcacacactgcgcgccaagagaagcggatctggcgtgaagcagaccctgaatttcgacctgctgaagctggctggcgacgtggaatccaacccaggcccttctagaggccatatgaccgagtacaagcccacggtgcgcctcgccacccgcgacgacgtccccagggccgtacgcaccctcgccgccgcgttcgccgactaccccgccacgcgccacaccgtcgatccggaccgccacatcgagcgggtcaccgagctgcaagaactcttcctcacgcgcgtcgggctcgacatcggcaaggtgtgggtcgcggacgacggcgccgcggtggcggtctggaccacgccggagagcgtcgaagcgggggcggtgttcgccgagatcggcccgcgcatggccgagttgagcggttcccggctggccgcgcagcaacagatggaaggcctcctggcgccgcaccggcccaaggagcccgcgtggttcctggccaccgtcggcgtctcgcccgaccaccagggcaagggtctgggcagcgccgtcgtgctccccggagtggaggcggccgagcgcgccggggtgcccgccttcctggagacctccgcgccccgcaacctccccttctacgagcggctcggcttcaccgtcaccgccgacgtcgaggtgcccgaaggaccgcgcacctggtgcatgacccgcaagcccggtgcctga

SEQ ID NO: 1748 - DNA, 3579 bp, Artificial Sequence
  Synthetic Polynucleotide
atggccttaccagtgaccgccttgctcctgccgctggccttgctgctccacgccgccaggccggaagtgcagctggttgaatctggcggaggactggttcaggctggcggatctctgagactgtcttgtgccgccagcggcagaacctttagcatgggctggtttagacaggcccctggcaaagagagagagttcgtcgccgccatcacatactctggcggcagcccttactacgccgactctgtgaagggcagattcaccatcagccgggacaacgccaagaacaccgtgtacctccagatgaacagcctgaagcctgaggacaccgccgtgtactactgcgccgccaatccaacatacggcagcgactggaacgccgagaattggggccagggaacccaagtgacagtgtctagcggtaccggcggaggcggatctggcggcggaggtagcggtggcggaggatctgaattcgacatccagatgacacagagccctagcagcctgtctgccagcgtgggagacagagtgaccatcacatgcaaggccagcgaccacatcaacaactggctggcctggtatcagcagaagcctggacaggcccctaagctgctgatctacggcgctaccacactggaaacaggcgtgcccagcagattttctggcagcggctctggcaccgactacaccctgacaatatccagcctccagcctgaggacttcgccacctactactgtcagcagagctggaacaccccttggacattcggccagggcaccaagctggaaatcaagagactcgagggacagcctaaggccaatcctaccgtgacactgttccctccaagcagcgaagaactccaggccaacaaggccacacttgtgtgcctgatctccgacttctaccctggggctgtgacagtggcttggaaggccgatggatctcctgtgaaagccggcgtggaaaccaccaagccatccaagcagagcaacaacaaatacgccgccagctcctacctgagcctgacacctgagcagtggaagtcccacagatcctacagctgccaagtgacccacgaaggcagcaccgtggaaaagacagtggcccctacagagtgcagcggatccatcggctggctgttgctccaggcccctcggtgggtgttcaaggaggaagaccctattcacctgaggtgtcacagctggaagaacactgctctgcataaggtcacatatttacagaatggcaaaggcaggaagtattttcatcataattctgacttctacattccaaaagccacactcaaagacagcggctcctacttctgcagggggcttgttgggagtaaaaatgtgtcttcagagactgtgaacatcaccatcactcaaggtttggcagtgtcaaccatctcatcattctttccacctggctaccaagtgtccttctgcctggtcatggtgctgctgttcgccgtggataccggcctgtacttcagcgtcaagaccaacatccggtccagcaccagagactggaaggaccacaagttcaagtggcggaaggaccctcaggacaagagggccaagcgatctggatctggagcaacaaacttctcactactcaaacaagcaggtgacgtggaggagaatcccgggcctactagtatggactggatttggcgcatccttttccttgtcggcgctgctaccggcgcgcattccttcgaacaagttcagcttcaacagcctggcgctgagctggtcaaacctggcgcttctgtgaagatgagctgcaaagccagcggctacgccttcagcagctactggatcaactggatgaagcagaaacccggccagggactcgaatggatcggccaaatctatcccggcgacggcgacaccaactacaacggcaagttcaagggcagagccacactgaccgccgatacctctagcagcacagcctacatgcagctgagcagcctgaccagcgaagatagcgccgtgtacttctgtgcccggtccatcacaacagtcgtgggctgcgctatggactattggggccagggaacaagcgtgaccgtgtctagtacgcgtgcctctacaaagggaccctccgtgtttcctctggctcccagcagcaagtctacaagcggaggaacagccgctctgggctgcctggtcaaggattactttcccgagcctgtgaccgtgtcctggaatagcggagcactgacaagcggcgtgcacacctttccagccgtgctgcaaagcagcggcctgtactctctgagcagcgtggtcacagtgcctagctctagcctgggcacccagacctacatctgcaatgtgaaccacaagcctagcaacaccaaggtggacaagagagtggaacccaagagctgtggtaccaagtctgtgcgcttttacctggtcgtcagccctgccagtgcctccactcagacatcttggaccccaagggaccttgtgtcctctcagacacagacacagtcctgcgtgccaccaactgctggcgcaagacaggctccagagtctcccagcacaatccccgtcccttctcagccccagaactccacacttaggccaggaccagctgctccaatcgcactggtcccagtgttctgcggactgctggttgccaagtctctggtgctgagcgcactcctcgtttggtggggcgatatttggtggaaaacgatgatggaattgagatccctcgatacgcagaaagccacatgccaccttcagcaagtcacagacttgccttggaccagcgtcagctctcccgtggaacgggaaattctgtatcatacagtggcccgcaccaagatttccgacgatgacgacgagcacacactgcgcgccaagagaagcggatctggcgtgaagcagaccctgaatttcgacctgctgaagctggctggcgacgtggaatccaacccaggcccttctagaggccatatgaccgagtacaagcccacggtgcgcctcgccacccgcgacgacgtccccagggccgtacgcaccctcgccgccgcgttcgccgactaccccgccacgcgccacaccgtcgatccggaccgccacatcgagcgggtcaccgagctgcaagaactcttcctcacgcgcgtcgggctcgacatcggcaaggtgtgggtcgcggacgacggcgccgcggtggcggtctggaccacgccggagagcgtcgaagcgggggcggtgttcgccgagatcggcccgcgcatggccgagttgagcggttcccggctggccgcgcagcaacagatggaaggcctcctggcgccgcaccggcccaaggagcccgcgtggttcctggccaccgtcggcgtctcgcccgaccaccagggcaagggtctgggcagcgccgtcgtgctccccggagtggaggcggccgagcgcgccggggtgcccgccttcctggagacctccgcgccccgcaacctccccttctacgagcggctcggcttcaccgtcaccgccgacgtcgaggtgcccgaaggaccgcgcacctggtgcatgacccgcaagcccggtgcctga

SEQ ID NO: 1749 - DNA, 3990 bp, Artificial Sequence
  Synthetic Polynucleotide
atggccttaccagtgaccgccttgctcctgccgctggccttgctgctccacgccgccaggccggaagtgcagctggttgaatctggcggaggactggttcaggctggcggatctctgagactgtcttgtgccgccagcggcagaacctttagcatgggctggtttagacaggcccctggcaaagagagagagttcgtcgccgccatcacatactctggcggcagcccttactacgccgactctgtgaagggcagattcaccatcagccgggacaacgccaagaacaccgtgtacctccagatgaacagcctgaagcctgaggacaccgccgtgtactactgcgccgccaatccaacatacggcagcgactggaacgccgagaattggggccagggaacccaagtgacagtgtctagcggtaccggcggaggcggatctggcggcggaggtagcggtggcggaggatctgaattcgacatccagatgacacagagccctagcagcctgtctgccagcgtgggagacagagtgaccatcacatgcaaggccagcgaccacatcaacaactggctggcctggtatcagcagaagcctggacaggcccctaagctgctgatctacggcgctaccacactggaaacaggcgtgcccagcagattttctggcagcggctctggcaccgactacaccctgacaatatccagcctccagcctgaggacttcgccacctactactgtcagcagagctggaacaccccttggacattcggccagggcaccaagctggaaatcaagagactcgagggacagcctaaggccaatcctaccgtgacactgttccctccaagcagcgaagaactccaggccaacaaggccacacttgtgtgcctgatctccgacttctaccctggggctgtgacagtggcttggaaggccgatggatctcctgtgaaagccggcgtggaaaccaccaagccatccaagcagagcaacaacaaatacgccgccagctcctacctgagcctgacacctgagcagtggaagtcccacagatcctacagctgccaagtgacccacgaaggcagcaccgtggaaaagacagtggcccctacagagtgcagcggatccatcggctggctgttgctccaggcccctcggtgggtgttcaaggaggaagaccctattcacctgaggtgtcacagctggaagaacactgctctgcataaggtcacatatttacagaatggcaaaggcaggaagtattttcatcataattctgacttctacattccaaaagccacactcaaagacagcggctcctacttctgcagggggcttgttgggagtaaaaatgtgtcttcagagactgtgaacatcaccatcactcaaggtttggcagtgtcaaccatctcatcattctttccacctggctaccaagtgtccttctgcctggtcatggtgctgctgttcgccgtggataccggcctgtacttcagcgtcaagaccaacatccggtccagcaccagagactggaaggaccacaagttcaagtggcggaaggaccctcaggacaagagggccaagcgatctggatctggagcaacaaacttctcactactcaaacaagcaggtgacgtggaggagaatcccgggcctactagtatggactggatttggcgcatccttttccttgtcggcgctgctaccggcgcgcattccgggcccgaagtgcaactggttgaatccggtggcggcctggtgcaagcaggcggatctctcagacttagctgtgccgcctccggcagaaccttcacaatgggatggtttaggcaggctccagggaaagagagagagttcgtcgccgccatctctctgtctcccacactggcctactacgccgactctgtgaaaggccggttcaccatctccagagataatgccaagaacaccgtggtgctgcaaatgaactctctgaaacccgaggatacagccctgtactattgtgccgctgaccggaagtccgtgatgagcatcagacccgattactggggacagggcacacaagtcacagtgtcctctggatccggcggcggaggatctggcggaggcggatctgggggcggaggctctttcgaacaagttcagcttcaacagcctggcgctgagctggtcaaacctggcgcttctgtgaagatgagctgcaaagccagcggctacgccttcagcagctactggatcaactggatgaagcagaaacccggccagggactcgaatggatcggccaaatctatcccggcgacggcgacaccaactacaacggcaagttcaagggcagagccacactgaccgccgatacctctagcagcacagcctacatgcagctgagcagcctgaccagcgaagatagcgccgtgtacttctgtgcccggtccatcacaacagtcgtgggctgcgctatggactattggggccagggaacaagcgtgaccgtgtctagtacgcgtgcctctacaaagggaccctccgtgtttcctctggctcccagcagcaagtctacaagcggaggaacagccgctctgggctgcctggtcaaggattactttcccgagcctgtgaccgtgtcctggaatagcggagcactgacaagcggcgtgcacacctttccagccgtgctgcaaagcagcggcctgtactctctgagcagcgtggtcacagtgcctagctctagcctgggcacccagacctacatctgcaatgtgaaccacaagcctagcaacaccaaggtggacaagagagtggaacccaagagctgtggtaccaagtctgtgcgcttttacctggtcgtcagccctgccagtgcctccactcagacatcttggaccccaagggaccttgtgtcctctcagacacagacacagtcctgcgtgccaccaactgctggcgcaagacaggctccagagtctcccagcacaatccccgtcccttctcagccccagaactccacacttaggccaggaccagctgctccaatcgcactggtcccagtgttctgcggactgctggttgccaagtctctggtgctgagcgcactcctcgtttggtggggcgatatttggtggaaaacgatgatggaattgagatccctcgatacgcagaaagccacatgccaccttcagcaagtcacagacttgccttggaccagcgtcagctctcccgtggaacgggaaattctgtatcatacagtggcccgcaccaagatttccgacgatgacgacgagcacacactgcgcgccaagagaagcggatctggcgtgaagcagaccctgaatttcgacctgctgaagctggctggcgacgtggaatccaacccaggcccttctagaggccatatgaccgagtacaagcccacggtgcgcctcgccacccgcgacgacgtccccagggccgtacgcaccctcgccgccgcgttcgccgactaccccgccacgcgccacaccgtcgatccggaccgccacatcgagcgggtcaccgagctgcaagaactcttcctcacgcgcgtcgggctcgacatcggcaaggtgtgggtcgcggacgacggcgccgcggtggcggtctggaccacgccggagagcgtcgaagcgggggcggtgttcgccgagatcggcccgcgcatggccgagttgagcggttcccggctggccgcgcagcaacagatggaaggcctcctggcgccgcaccggcccaaggagcccgcgtggttcctggccaccgtcggcgtctcgcccgaccaccagggcaagggtctgggcagcgccgtcgtgctccccggagtggaggcggccgagcgcgccggggtgcccgccttcctggagacctccgcgccccgcaacctccccttctacgagcggctcggcttcaccgtcaccgccgacgtcgaggtgcccgaaggaccgcgcacctggtgcatgacccgcaagcccggtgcctga

SEQ ID NO: 1750 - DNA, 3189 bp, Artificial Sequence
  Synthetic Polynucleotide
atggccttaccagtgaccgccttgctcctgccgctggccttgctgctccacgccgccaggccggaagtgcagctggttgaatctggcggaggactggttcaggctggcggatctctgagactgtcttgtgccgccagcggcagaacctttagcatgggctggtttagacaggcccctggcaaagagagagagttcgtcgccgccatcacatactctggcggcagcccttactacgccgactctgtgaagggcagattcaccatcagccgggacaacgccaagaacaccgtgtacctccagatgaacagcctgaagcctgaggacaccgccgtgtactactgcgccgccaatccaacatacggcagcgactggaacgccgagaattggggccagggaacccaagtgacagtgtctagcctcgagggacagcctaaggccaatcctaccgtgacactgttccctccaagcagcgaagaactccaggccaacaaggccacacttgtgtgcctgatctccgacttctaccctggggctgtgacagtggcttggaaggccgatggatctcctgtgaaagccggcgtggaaaccaccaagccatccaagcagagcaacaacaaatacgccgccagctcctacctgagcctgacacctgagcagtggaagtcccacagatcctacagctgccaagtgacccacgaaggcagcaccgtggaaaagacagtggcccctacagagtgcagcggatccatcggctggctgttgctccaggcccctcggtgggtgttcaaggaggaagaccctattcacctgaggtgtcacagctggaagaacactgctctgcataaggtcacatatttacagaatggcaaaggcaggaagtattttcatcataattctgacttctacattccaaaagccacactcaaagacagcggctcctacttctgcagggggcttgttgggagtaaaaatgtgtcttcagagactgtgaacatcaccatcactcaaggtttggcagtgtcaaccatctcatcattctttccacctggctaccaagtgtccttctgcctggtcatggtgctgctgttcgccgtggataccggcctgtacttcagcgtcaagaccaacatccggtccagcaccagagactggaaggaccacaagttcaagtggcggaaggaccctcaggacaagagggccaagcgatctggatctggagcaacaaacttctcactactcaaacaagcaggtgacgtggaggagaatcccgggcctactagtatggactggatttggcgcatccttttccttgtcggcgctgctaccggcgcgcattccgggcccgaagtgcaactggttgaatccggtggcggcctggtgcaagcaggcggatctctcagacttagctgtgccgcctccggcagaaccttcacaatgggatggtttaggcaggctccagggaaagagagagagttcgtcgccgccatctctctgtctcccacactggcctactacgccgactctgtgaaaggccggttcaccatctccagagataatgccaagaacaccgtggtgctgcaaatgaactctctgaaacccgaggatacagccctgtactattgtgccgctgaccggaagtccgtgatgagcatcagacccgattactggggacagggcacacaagtcacagtgtcctctacgcgtgcctctacaaagggaccctccgtgtttcctctggctcccagcagcaagtctacaagcggaggaacagccgctctgggctgcctggtcaaggattactttcccgagcctgtgaccgtgtcctggaatagcggagcactgacaagcggcgtgcacacctttccagccgtgctgcaaagcagcggcctgtactctctgagcagcgtggtcacagtgcctagctctagcctgggcacccagacctacatctgcaatgtgaaccacaagcctagcaacaccaaggtggacaagagagtggaacccaagagctgtggtaccaagtctgtgcgcttttacctggtcgtcagccctgccagtgcctccactcagacatcttggaccccaagggaccttgtgtcctctcagacacagacacagtcctgcgtgccaccaactgctggcgcaagacaggctccagagtctcccagcacaatccccgtcccttctcagccccagaactccacacttaggccaggaccagctgctccaatcgcactggtcccagtgttctgcggactgctggttgccaagtctctggtgctgagcgcactcctcgtttggtggggcgatatttggtggaaaacgatgatggaattgagatccctcgatacgcagaaagccacatgccaccttcagcaagtcacagacttgccttggaccagcgtcagctctcccgtggaacgggaaattctgtatcatacagtggcccgcaccaagatttccgacgatgacgacgagcacacactgcgcgccaagagaagcggatctggcgtgaagcagaccctgaatttcgacctgctgaagctggctggcgacgtggaatccaacccaggcccttctagaggccatatgaccgagtacaagcccacggtgcgcctcgccacccgcgacgacgtccccagggccgtacgcaccctcgccgccgcgttcgccgactaccccgccacgcgccacaccgtcgatccggaccgccacatcgagcgggtcaccgagctgcaagaactcttcctcacgcgcgtcgggctcgacatcggcaaggtgtgggtcgcggacgacggcgccgcggtggcggtctggaccacgccggagagcgtcgaagcgggggcggtgttcgccgagatcggcccgcgcatggccgagttgagcggttcccggctggccgcgcagcaacagatggaaggcctcctggcgccgcaccggcccaaggagcccgcgtggttcctggccaccgtcggcgtctcgcccgaccaccagggcaagggtctgggcagcgccgtcgtgctccccggagtggaggcggccgagcgcgccggggtgcccgccttcctggagacctccgcgccccgcaacctccccttctacgagcggctcggcttcaccgtcaccgccgacgtcgaggtgcccgaaggaccgcgcacctggtgcatgacccgcaagcccggtgcctga

SEQ ID NO: 1751 - DNA, 3213 bp, Artificial Sequence
  Synthetic Polynucleotide
atggccttaccagtgaccgccttgctcctgccgctggccttgctgctccacgccgccaggccggacatccagatgacacagagccctagcagcctgtctgccagcgtgggagacagagtgaccatcacatgcaaggccagcgaccacatcaacaactggctggcctggtatcagcagaagcctggacaggcccctaagctgctgatctacggcgctaccacactggaaacaggcgtgcccagcagattttctggcagcggctctggcaccgactacaccctgacaatatccagcctccagcctgaggacttcgccacctactactgtcagcagagctggaacaccccttggacattcggccagggcaccaagctggaaatcaagagactcgaggacctgaagaacgtgttcccacctgaggtggccgtgttcgagcctagcgaggccgagatcagccacacccagaaagccaccctcgtgtgcctggctaccggcttctaccccgaccatgtggaactgtcttggtgggtcaacggcaaagaggtgcacagcggcgtgtctaccgacccccagccactgaaagaacagcccgccctgaacgacagccggtactgcctgagcagcagactgagagtgtccgccaccttctggcagaacccccggaaccacttcagatgccaggtgcagttctacggcctgagcgagaacgacgagtggacccaggacagagccaagcccgtgacccagatcgtgtctgccgaagcctggggcagagccgattgcggatccatcggctggctgttgctccaggcccctcggtgggtgttcaaggaggaagaccctattcacctgaggtgtcacagctggaagaacactgctctgcataaggtcacatatttacagaatggcaaaggcaggaagtattttcatcataattctgacttctacattccaaaagccacactcaaagacagcggctcctacttctgcagggggcttgttgggagtaaaaatgtgtcttcagagactgtgaacatcaccatcactcaaggtttggcagtgtcaaccatctcatcattctttccacctggctaccaagtgtccttctgcctggtcatggtgctgctgttcgccgtggataccggcctgtacttcagcgtcaagaccaacatccggtccagcaccagagactggaaggaccacaagttcaagtggcggaaggaccctcaggacaagagggccaagcgatctggatctggagcaacaaacttctcactactcaaacaagcaggtgacgtggaggagaatcccgggcctactagtatggactggatttggcgcatccttttccttgtcggcgctgctaccggcgcgcattccttcgaacaagttcagcttcaacagcctggcgctgagctggtcaaacctggcgcttctgtgaagatgagctgcaaagccagcggctacgccttcagcagctactggatcaactggatgaagcagaaacccggccagggactcgaatggatcggccaaatctatcccggcgacggcgacaccaactacaacggcaagttcaagggcagagccacactgaccgccgatacctctagcagcacagcctacatgcagctgagcagcctgaccagcgaagatagcgccgtgtacttctgtgcccggtccatcacaacagtcgtgggctgcgctatggactattggggccagggaacaagcgtgaccgtgtctagtacgcgtatccagaaccctgatcctgccgtgtaccagctgcgggatagcaagagcagcgacaagagcgtgtgtctgttcaccgacttcgacagccagaccaacgtgtcccagagcaaggactccgacgtgtacatcaccgataagaccgtgctggacatgcggagcatggacttcaagagcaactccgccgtggcctggtccaacaagtccgatttcgcctgcgccaacgccttcaacaacagcattatccccgaggacacattcttcccaagccccgagagcagctgcggtaccaagtctgtgcgcttttacctggtcgtcagccctgccagtgcctccactcagacatcttggaccccaagggaccttgtgtcctctcagacacagacacagtcctgcgtgccaccaactgctggcgcaagacaggctccagagtctcccagcacaatccccgtcccttctcagccccagaactccacacttaggccaggaccagctgctccaatcgcactggtcccagtgttctgcggactgctggttgccaagtctctggtgctgagcgcactcctcgtttggtggggcgatatttggtggaaaacgatgatggaattgagatccctcgatacgcagaaagccacatgccaccttcagcaagtcacagacttgccttggaccagcgtcagctctcccgtggaacgggaaattctgtatcatacagtggcccgcaccaagatttccgacgatgacgacgagcacacactgcgcgccaagagaagcggatctggcgtgaagcagaccctgaatttcgacctgctgaagctggctggcgacgtggaatccaacccaggcccttctagaggccatatgaccgagtacaagcccacggtgcgcctcgccacccgcgacgacgtccccagggccgtacgcaccctcgccgccgcgttcgccgactaccccgccacgcgccacaccgtcgatccggaccgccacatcgagcgggtcaccgagctgcaagaactcttcctcacgcgcgtcgggctcgacatcggcaaggtgtgggtcgcggacgacggcgccgcggtggcggtctggaccacgccggagagcgtcgaagcgggggcggtgttcgccgagatcggcccgcgcatggccgagttgagcggttcccggctggccgcgcagcaacagatggaaggcctcctggcgccgcaccggcccaaggagcccgcgtggttcctggccaccgtcggcgtctcgcccgaccaccagggcaagggtctgggcagcgccgtcgtgctccccggagtggaggcggccgagcgcgccggggtgcccgccttcctggagacctccgcgccccgcaacctccccttctacgagcggctcggcttcaccgtcaccgccgacgtcgaggtgcccgaaggaccgcgcacctggtgcatgacccgcaagcccggtgcctga

SEQ ID NO: 1752 - DNA, 3624 bp, Artificial Sequence
  Synthetic Polynucleotide
atggccttaccagtgaccgccttgctcctgccgctggccttgctgctccacgccgccaggccggaagtgcagctggttgaatctggcggaggactggttcaggctggcggatctctgagactgtcttgtgccgccagcggcagaacctttagcatgggctggtttagacaggcccctggcaaagagagagagttcgtcgccgccatcacatactctggcggcagcccttactacgccgactctgtgaagggcagattcaccatcagccgggacaacgccaagaacaccgtgtacctccagatgaacagcctgaagcctgaggacaccgccgtgtactactgcgccgccaatccaacatacggcagcgactggaacgccgagaattggggccagggaacccaagtgacagtgtctagcggtaccggcggaggcggatctggcggcggaggtagcggtggcggaggatctgaattcgacatccagatgacacagagccctagcagcctgtctgccagcgtgggagacagagtgaccatcacatgcaaggccagcgaccacatcaacaactggctggcctggtatcagcagaagcctggacaggcccctaagctgctgatctacggcgctaccacactggaaacaggcgtgcccagcagattttctggcagcggctctggcaccgactacaccctgacaatatccagcctccagcctgaggacttcgccacctactactgtcagcagagctggaacaccccttggacattcggccagggcaccaagctggaaatcaagagactcgaggacctgaagaacgtgttcccacctgaggtggccgtgttcgagcctagcgaggccgagatcagccacacccagaaagccaccctcgtgtgcctggctaccggcttctaccccgaccatgtggaactgtcttggtgggtcaacggcaaagaggtgcacagcggcgtgtctaccgacccccagccactgaaagaacagcccgccctgaacgacagccggtactgcctgagcagcagactgagagtgtccgccaccttctggcagaacccccggaaccacttcagatgccaggtgcagttctacggcctgagcgagaacgacgagtggacccaggacagagccaagcccgtgacccagatcgtgtctgccgaagcctggggcagagccgattgcggatccatcggctggctgttgctccaggcccctcggtgggtgttcaaggaggaagaccctattcacctgaggtgtcacagctggaagaacactgctctgcataaggtcacatatttacagaatggcaaaggcaggaagtattttcatcataattctgacttctacattccaaaagccacactcaaagacagcggctcctacttctgcagggggcttgttgggagtaaaaatgtgtcttcagagactgtgaacatcaccatcactcaaggtttggcagtgtcaaccatctcatcattctttccacctggctaccaagtgtccttctgcctggtcatggtgctgctgttcgccgtggataccggcctgtacttcagcgtcaagaccaacatccggtccagcaccagagactggaaggaccacaagttcaagtggcggaaggaccctcaggacaagagggccaagcgatctggatctggagcaacaaacttctcactactcaaacaagcaggtgacgtggaggagaatcccgggcctactagtatggactggatttggcgcatccttttccttgtcggcgctgctaccggcgcgcattccttcgaacaagttcagcttcaacagcctggcgctgagctggtcaaacctggcgcttctgtgaagatgagctgcaaagccagcggctacgccttcagcagctactggatcaactggatgaagcagaaacccggccagggactcgaatggatcggccaaatctatcccggcgacggcgacaccaactacaacggcaagttcaagggcagagccacactgaccgccgatacctctagcagcacagcctacatgcagctgagcagcctgaccagcgaagatagcgccgtgtacttctgtgcccggtccatcacaacagtcgtgggctgcgctatggactattggggccagggaacaagcgtgaccgtgtctagtacgcgtatccagaaccctgatcctgccgtgtaccagctgcgggatagcaagagcagcgacaagagcgtgtgtctgttcaccgacttcgacagccagaccaacgtgtcccagagcaaggactccgacgtgtacatcaccgataagaccgtgctggacatgcggagcatggacttcaagagcaactccgccgtggcctggtccaacaagtccgatttcgcctgcgccaacgccttcaacaacagcattatccccgaggacacattcttcccaagccccgagagcagctgcggtaccaagtctgtgcgcttttacctggtcgtcagccctgccagtgcctccactcagacatcttggaccccaagggaccttgtgtcctctcagacacagacacagtcctgcgtgccaccaactgctggcgcaagacaggctccagagtctcccagcacaatccccgtcccttctcagccccagaactccacacttaggccaggaccagctgctccaatcgcactggtcccagtgttctgcggactgctggttgccaagtctctggtgctgagcgcactcctcgtttggtggggcgatatttggtggaaaacgatgatggaattgagatccctcgatacgcagaaagccacatgccaccttcagcaagtcacagacttgccttggaccagcgtcagctctcccgtggaacgggaaattctgtatcatacagtggcccgcaccaagatttccgacgatgacgacgagcacacactgcgcgccaagagaagcggatctggcgtgaagcagaccctgaatttcgacctgctgaagctggctggcgacgtggaatccaacccaggcccttctagaggccatatgaccgagtacaagcccacggtgcgcctcgccacccgcgacgacgtccccagggccgtacgcaccctcgccgccgcgttcgccgactaccccgccacgcgccacaccgtcgatccggaccgccacatcgagcgggtcaccgagctgcaagaactcttcctcacgcgcgtcgggctcgacatcggcaaggtgtgggtcgcggacgacggcgccgcggtggcggtctggaccacgccggagagcgtcgaagcgggggcggtgttcgccgagatcggcccgcgcatggccgagttgagcggttcccggctggccgcgcagcaacagatggaaggcctcctggcgccgcaccggcccaaggagcccgcgtggttcctggccaccgtcggcgtctcgcccgaccaccagggcaagggtctgggcagcgccgtcgtgctccccggagtggaggcggccgagcgcgccggggtgcccgccttcctggagacctccgcgccccgcaacctccccttctacgagcggctcggcttcaccgtcaccgccgacgtcgaggtgcccgaaggaccgcgcacctggtgcatgacccgcaagcccggtgcctga

SEQ ID NO: 1753 - DNA, 4035 bp, Artificial Sequence
  Synthetic Polynucleotide
atggccttaccagtgaccgccttgctcctgccgctggccttgctgctccacgccgccaggccggaagtgcagctggttgaatctggcggaggactggttcaggctggcggatctctgagactgtcttgtgccgccagcggcagaacctttagcatgggctggtttagacaggcccctggcaaagagagagagttcgtcgccgccatcacatactctggcggcagcccttactacgccgactctgtgaagggcagattcaccatcagccgggacaacgccaagaacaccgtgtacctccagatgaacagcctgaagcctgaggacaccgccgtgtactactgcgccgccaatccaacatacggcagcgactggaacgccgagaattggggccagggaacccaagtgacagtgtctagcggtaccggcggaggcggatctggcggcggaggtagcggtggcggaggatctgaattcgacatccagatgacacagagccctagcagcctgtctgccagcgtgggagacagagtgaccatcacatgcaaggccagcgaccacatcaacaactggctggcctggtatcagcagaagcctggacaggcccctaagctgctgatctacggcgctaccacactggaaacaggcgtgcccagcagattttctggcagcggctctggcaccgactacaccctgacaatatccagcctccagcctgaggacttcgccacctactactgtcagcagagctggaacaccccttggacattcggccagggcaccaagctggaaatcaagagactcgaggacctgaagaacgtgttcccacctgaggtggccgtgttcgagcctagcgaggccgagatcagccacacccagaaagccaccctcgtgtgcctggctaccggcttctaccccgaccatgtggaactgtcttggtgggtcaacggcaaagaggtgcacagcggcgtgtctaccgacccccagccactgaaagaacagcccgccctgaacgacagccggtactgcctgagcagcagactgagagtgtccgccaccttctggcagaacccccggaaccacttcagatgccaggtgcagttctacggcctgagcgagaacgacgagtggacccaggacagagccaagcccgtgacccagatcgtgtctgccgaagcctggggcagagccgattgcggatccatcggctggctgttgctccaggcccctcggtgggtgttcaaggaggaagaccctattcacctgaggtgtcacagctggaagaacactgctctgcataaggtcacatatttacagaatggcaaaggcaggaagtattttcatcataattctgacttctacattccaaaagccacactcaaagacagcggctcctacttctgcagggggcttgttgggagtaaaaatgtgtcttcagagactgtgaacatcaccatcactcaaggtttggcagtgtcaaccatctcatcattctttccacctggctaccaagtgtccttctgcctggtcatggtgctgctgttcgccgtggataccggcctgtacttcagcgtcaagaccaacatccggtccagcaccagagactggaaggaccacaagttcaagtggcggaaggaccctcaggacaagagggccaagcgatctggatctggagcaacaaacttctcactactcaaacaagcaggtgacgtggaggagaatcccgggcctactagtatggactggatttggcgcatccttttccttgtcggcgctgctaccggcgcgcattccgggcccgaagtgcaactggttgaatccggtggcggcctggtgcaagcaggcggatctctcagacttagctgtgccgcctccggcagaaccttcacaatgggatggtttaggcaggctccagggaaagagagagagttcgtcgccgccatctctctgtctcccacactggcctactacgccgactctgtgaaaggccggttcaccatctccagagataatgccaagaacaccgtggtgctgcaaatgaactctctgaaacccgaggatacagccctgtactattgtgccgctgaccggaagtccgtgatgagcatcagacccgattactggggacagggcacacaagtcacagtgtcctctggatccggcggcggaggatctggcggaggcggatctgggggcggaggctctttcgaacaagttcagcttcaacagcctggcgctgagctggtcaaacctggcgcttctgtgaagatgagctgcaaagccagcggctacgccttcagcagctactggatcaactggatgaagcagaaacccggccagggactcgaatggatcggccaaatctatcccggcgacggcgacaccaactacaacggcaagttcaagggcagagccacactgaccgccgatacctctagcagcacagcctacatgcagctgagcagcctgaccagcgaagatagcgccgtgtacttctgtgcccggtccatcacaacagtcgtgggctgcgctatggactattggggccagggaacaagcgtgaccgtgtctagtacgcgtatccagaaccctgatcctgccgtgtaccagctgcgggatagcaagagcagcgacaagagcgtgtgtctgttcaccgacttcgacagccagaccaacgtgtcccagagcaaggactccgacgtgtacatcaccgataagaccgtgctggacatgcggagcatggacttcaagagcaactccgccgtggcctggtccaacaagtccgatttcgcctgcgccaacgccttcaacaacagcattatccccgaggacacattcttcccaagccccgagagcagctgcggtaccaagtctgtgcgcttttacctggtcgtcagccctgccagtgcctccactcagacatcttggaccccaagggaccttgtgtcctctcagacacagacacagtcctgcgtgccaccaactgctggcgcaagacaggctccagagtctcccagcacaatccccgtcccttctcagccccagaactccacacttaggccaggaccagctgctccaatcgcactggtcccagtgttctgcggactgctggttgccaagtctctggtgctgagcgcactcctcgtttggtggggcgatatttggtggaaaacgatgatggaattgagatccctcgatacgcagaaagccacatgccaccttcagcaagtcacagacttgccttggaccagcgtcagctctcccgtggaacgggaaattctgtatcatacagtggcccgcaccaagatttccgacgatgacgacgagcacacactgcgcgccaagagaagcggatctggcgtgaagcagaccctgaatttcgacctgctgaagctggctggcgacgtggaatccaacccaggcccttctagaggccatatgaccgagtacaagcccacggtgcgcctcgccacccgcgacgacgtccccagggccgtacgcaccctcgccgccgcgttcgccgactaccccgccacgcgccacaccgtcgatccggaccgccacatcgagcgggtcaccgagctgcaagaactcttcctcacgcgcgtcgggctcgacatcggcaaggtgtgggtcgcggacgacggcgccgcggtggcggtctggaccacgccggagagcgtcgaagcgggggcggtgttcgccgagatcggcccgcgcatggccgagttgagcggttcccggctggccgcgcagcaacagatggaaggcctcctggcgccgcaccggcccaaggagcccgcgtggttcctggccaccgtcggcgtctcgcccgaccaccagggcaagggtctgggcagcgccgtcgtgctccccggagtggaggcggccgagcgcgccggggtgcccgccttcctggagacctccgcgccccgcaacctccccttctacgagcggctcggcttcaccgtcaccgccgacgtcgaggtgcccgaaggaccgcgcacctggtgcatgacccgcaagcccggtgcctga

SEQ ID NO: 1754 - DNA, 3234 bp, Artificial Sequence
  Synthetic Polynucleotide
atggccttaccagtgaccgccttgctcctgccgctggccttgctgctccacgccgccaggccggaagtgcagctggttgaatctggcggaggactggttcaggctggcggatctctgagactgtcttgtgccgccagcggcagaacctttagcatgggctggtttagacaggcccctggcaaagagagagagttcgtcgccgccatcacatactctggcggcagcccttactacgccgactctgtgaagggcagattcaccatcagccgggacaacgccaagaacaccgtgtacctccagatgaacagcctgaagcctgaggacaccgccgtgtactactgcgccgccaatccaacatacggcagcgactggaacgccgagaattggggccagggaacccaagtgacagtgtctagcctcgaggacctgaagaacgtgttcccacctgaggtggccgtgttcgagcctagcgaggccgagatcagccacacccagaaagccaccctcgtgtgcctggctaccggcttctaccccgaccatgtggaactgtcttggtgggtcaacggcaaagaggtgcacagcggcgtgtctaccgacccccagccactgaaagaacagcccgccctgaacgacagccggtactgcctgagcagcagactgagagtgtccgccaccttctggcagaacccccggaaccacttcagatgccaggtgcagttctacggcctgagcgagaacgacgagtggacccaggacagagccaagcccgtgacccagatcgtgtctgccgaagcctggggcagagccgattgcggatccatcggctggctgttgctccaggcccctcggtgggtgttcaaggaggaagaccctattcacctgaggtgtcacagctggaagaacactgctctgcataaggtcacatatttacagaatggcaaaggcaggaagtattttcatcataattctgacttctacattccaaaagccacactcaaagacagcggctcctacttctgcagggggcttgttgggagtaaaaatgtgtcttcagagactgtgaacatcaccatcactcaaggtttggcagtgtcaaccatctcatcattctttccacctggctaccaagtgtccttctgcctggtcatggtgctgctgttcgccgtggataccggcctgtacttcagcgtcaagaccaacatccggtccagcaccagagactggaaggaccacaagttcaagtggcggaaggaccctcaggacaagagggccaagcgatctggatctggagcaacaaacttctcactactcaaacaagcaggtgacgtggaggagaatcccgggcctactagtatggactggatttggcgcatccttttccttgtcggcgctgctaccggcgcgcattccgggcccgaagtgcaactggttgaatccggtggcggcctggtgcaagcaggcggatctctcagacttagctgtgccgcctccggcagaaccttcacaatgggatggtttaggcaggctccagggaaagagagagagttcgtcgccgccatctctctgtctcccacactggcctactacgccgactctgtgaaaggccggttcaccatctccagagataatgccaagaacaccgtggtgctgcaaatgaactctctgaaacccgaggatacagccctgtactattgtgccgctgaccggaagtccgtgatgagcatcagacccgattactggggacagggcacacaagtcacagtgtcctctacgcgtatccagaaccctgatcctgccgtgtaccagctgcgggatagcaagagcagcgacaagagcgtgtgtctgttcaccgacttcgacagccagaccaacgtgtcccagagcaaggactccgacgtgtacatcaccgataagaccgtgctggacatgcggagcatggacttcaagagcaactccgccgtggcctggtccaacaagtccgatttcgcctgcgccaacgccttcaacaacagcattatccccgaggacacattcttcccaagccccgagagcagctgcggtaccaagtctgtgcgcttttacctggtcgtcagccctgccagtgcctccactcagacatcttggaccccaagggaccttgtgtcctctcagacacagacacagtcctgcgtgccaccaactgctggcgcaagacaggctccagagtctcccagcacaatccccgtcccttctcagccccagaactccacacttaggccaggaccagctgctccaatcgcactggtcccagtgttctgcggactgctggttgccaagtctctggtgctgagcgcactcctcgtttggtggggcgatatttggtggaaaacgatgatggaattgagatccctcgatacgcagaaagccacatgccaccttcagcaagtcacagacttgccttggaccagcgtcagctctcccgtggaacgggaaattctgtatcatacagtggcccgcaccaagatttccgacgatgacgacgagcacacactgcgcgccaagagaagcggatctggcgtgaagcagaccctgaatttcgacctgctgaagctggctggcgacgtggaatccaacccaggcccttctagaggccatatgaccgagtacaagcccacggtgcgcctcgccacccgcgacgacgtccccagggccgtacgcaccctcgccgccgcgttcgccgactaccccgccacgcgccacaccgtcgatccggaccgccacatcgagcgggtcaccgagctgcaagaactcttcctcacgcgcgtcgggctcgacatcggcaaggtgtgggtcgcggacgacggcgccgcggtggcggtctggaccacgccggagagcgtcgaagcgggggcggtgttcgccgagatcggcccgcgcatggccgagttgagcggttcccggctggccgcgcagcaacagatggaaggcctcctggcgccgcaccggcccaaggagcccgcgtggttcctggccaccgtcggcgtctcgcccgaccaccagggcaagggtctgggcagcgccgtcgtgctccccggagtggaggcggccgagcgcgccggggtgcccgccttcctggagacctccgcgccccgcaacctccccttctacgagcggctcggcttcaccgtcaccgccgacgtcgaggtgcccgaaggaccgcgcacctggtgcatgacccgcaagcccggtgcctga

SEQ ID NO: 1755 - DNA, 1635 bp, Artificial Sequence; identical to SEQ ID NO: 1664
  Synthetic Polynucleotide

SEQ ID NO: 1756 - DNA, 2550 bp, Artificial Sequence
  Synthetic Polynucleotide
atggccttaccagtgaccgccttgctcctgccgctggccttgctgctccacgccgccaggccggacatccagatgacacagagccctagcagcctgtctgccagcgtgggagacagagtgaccatcacatgcaaggccagcgaccacatcaacaactggctggcctggtatcagcagaagcctggacaggcccctaagctgctgatctacggcgctaccacactggaaacaggcgtgcccagcagattttctggcagcggctctggcaccgactacaccctgacaatatccagcctccagcctgaggacttcgccacctactactgtcagcagagctggaacaccccttggacattcggccagggcaccaagctggaaatcaagagactcgagaagagcgtgcggttctacctggtggtgtctcctgcctctgccagcacacagacaagctggaccccacgcgatctggtgtctagccagactcagacccagagctgtgtgcctcctacagctggtgctagacaggcccctgagagcccttctacaatccccgttccaagccagcctcagaacagcacactcagacctggacctgccgctcctattgctctggtgcctgtgttttgtggcctgctggtggctaagagcctggtgctgtctgccctgcttgtttggtggggagacatctggtggaaaaccatgatggaactgcggagcctggacacccagaaggccacctgtcatctccagcaagtgaccgatctgccctggacctctgtgtcaagccccgtggaaagagagatcctgtaccacaccgtggctcggaccaagatcagcgacgacgatgatgagcacacccttagggccaagcgatctggatctggagcaacaaacttctcactactcaaacaagcaggtgacgtggaggagaatcccgggcctactagtatggactggatttggcgcatccttttccttgtcggcgctgctaccggcgcgcattccttcgaacaagttcagcttcaacagcctggcgctgagctggtcaaacctggcgcttctgtgaagatgagctgcaaagccagcggctacgccttcagcagctactggatcaactggatgaagcagaaacccggccagggactcgaatggatcggccaaatctatcccggcgacggcgacaccaactacaacggcaagttcaagggcagagccacactgaccgccgatacctctagcagcacagcctacatgcagctgagcagcctgaccagcgaagatagcgccgtgtacttctgtgcccggtccatcacaacagtcgtgggctgcgctatggactattggggccagggaacaagcgtgaccgtgtctagtacgcgtaagtctgtgcgcttttacctggtcgtcagccctgccagtgcctccactcagacatcttggaccccaagggaccttgtgtcctctcagacacagacacagtcctgcgtgccaccaactgctggcgcaagacaggctccagagtctcccagcacaatccccgtcccttctcagccccagaactccacacttaggccaggaccagctgctccaatcgcactggtcccagtgttctgcggactgctggttgccaagtctctggtgctgagcgcactcctcgtttggtggggcgatatttggtggaaaacgatgatggaattgagatccctcgatacgcagaaagccacatgccaccttcagcaagtcacagacttgccttggaccagcgtcagctctcccgtggaacgggaaattctgtatcatacagtggcccgcaccaagatttccgacgatgacgacgagcacacactgcgcgccaagagaagcggatctggcgtgaagcagaccctgaatttcgacctgctgaagctggctggcgacgtggaatccaacccaggcccttctagaggccatatgaccgagtacaagcccacggtgcgcctcgccacccgcgacgacgtccccagggccgtacgcaccctcgccgccgcgttcgccgactaccccgccacgcgccacaccgtcgatccggaccgccacatcgagcgggtcaccgagctgcaagaactcttcctcacgcgcgtcgggctcgacatcggcaaggtgtgggtcgcggacgacggcgccgcggtggcggtctggaccacgccggagagcgtcgaagcgggggcggtgttcgccgagatcggcccgcgcatggccgagttgagcggttcccggctggccgcgcagcaacagatggaaggcctcctggcgccgcaccggcccaaggagcccgcgtggttcctggccaccgtcggcgtctcgcccgaccaccagggcaagggtctgggcagcgccgtcgtgctccccggagtggaggcggccgagcgcgccggggtgcccgccttcctggagacctccgcgccccgcaacctccccttctacgagcggctcggcttcaccgtcaccgccgacgtcgaggtgcccgaaggaccgcgcacctggtgcatgacccgcaagcccggtgcctga

SEQ ID NO: 1757 - DNA, 2712 bp, Artificial Sequence
  Synthetic Polynucleotide
atggccttaccagtgaccgccttgctcctgccgctggccttgctgctccacgccgccaggccggcatgcgaagtgcagctgcttgaaagtggcggcggactgattcagcctggcggatctctgagactgagctgtgccgccagcggcttcaccttttctagccacgccatgacctgggtccgacaggcacctggaaaagggcttgaatgggtgtccgccatcagcggctctggcgattacacacactacgccgacagcgtgaagggcagattcaccatcagcagagacaacagcaagaacaccgtgtacctccagatgaacagcctgagagccgaggacagcgccgtgtattattgcgccaaggatgaggatggcggcagcctgcttggacacagaggacaaggcaccctggtcaccgtttcttccggtaccggcggaggcggatctggcggcggaggtagcggtggcggaggatctgaattcggatctctcgagaagagcgtgcggttctacctggtggtgtctcctgcctctgccagcacacagacaagctggaccccacgcgatctggtgtctagccagactcagacccagagctgtgtgcctcctacagctggtgctagacaggcccctgagagcccttctacaatccccgttccaagccagcctcagaacagcacactcagacctggacctgccgctcctattgctctggtgcctgtgttttgtggcctgctggtggctaagagcctggtgctgtctgccctgcttgtttggtggggagacatctggtggaaaaccatgatggaactgcggagcctggacacccagaaggccacctgtcatctccagcaagtgaccgatctgccctggacctctgtgtcaagccccgtggaaagagagatcctgtaccacaccgtggctcggaccaagatcagcgacgacgatgatgagcacacccttagggccaagcgatctggatctggagcaacaaacttctcactactcaaacaagcaggtgacgtggaggagaatcccgggcctactagtgccaccatggactggatttggcgcatccttttccttgtcggcgctgctaccggcgcccattccgggcccgaagtgcagctggttgaatctggcggaggactggttcaggctggcggatctctgagactgtcttgtgccgccagcggcagaacctttagcatgggctggtttagacaggcccctggcaaagagagagagttcgtcgccgccatcacatactctggcggcagcccttactacgccgactctgtgaagggcagattcaccatcagccgggacaacgccaagaacaccgtgtacctccagatgaacagcctgaagcctgaggacaccgccgtgtactactgcgccgccaatccaacatacggcagcgactggaacgccgagaattggggccagggaacccaagtgacagtgtctagcggatccggcggcggaggatctggcggaggcggatctgggggcggaggctctttcgaaggcagcacgcgtaagtctgtgcgcttttacctggtcgtcagccctgccagtgcctccactcagacatcttggaccccaagggaccttgtgtcctctcagacacagacacagtcctgcgtgccaccaactgctggcgcaagacaggctccagagtctcccagcacaatccccgtcccttctcagccccagaactccacacttaggccaggaccagctgctccaatcgcactggtcccagtgttctgcggactgctggttgccaagtctctggtgctgagcgcactcctcgtttggtggggcgatatttggtggaaaacgatgatggaattgagatccctcgatacgcagaaagccacatgccaccttcagcaagtcacagacttgccttggaccagcgtcagctctcccgtggaacgggaaattctgtatcatacagtggcccgcaccaagatttccgacgatgacgacgagcacacactgcgcgccaagagaagcggatctggcgtgaagcagaccctgaatttcgacctgctgaagctggctggcgacgtggaatccaacccaggcccttctagaggccatatgaccgagtacaagcccacggtgcgcctcgccacccgcgacgacgtccccagggccgtacgcaccctcgccgccgcgttcgccgactaccccgccacgcgccacaccgtcgatccggaccgccacatcgagcgggtcaccgagctgcaagaactcttcctcacgcgcgtcgggctcgacatcggcaaggtgtgggtcgcggacgacggcgccgcggtggcggtctggaccacgccggagagcgtcgaagcgggggcggtgttcgccgagatcggcccgcgcatggccgagttgagcggttcccggctggccgcgcagcaacagatggaaggcctcctggcgccgcaccggcccaaggagcccgcgtggttcctggccaccgtcggcgtctcgcccgaccaccagggcaagggtctgggcagcgccgtcgtgctccccggagtggaggcggccgagcgcgccggggtgcccgccttcctggagacctccgcgccccgcaacctccccttctacgagcggctcggcttcaccgtcaccgccgacgtcgaggtgcccgaaggaccgcgcacctggtgcatgacccgcaagcccggtgcctga

SEQ ID NO: 1758 - DNA, 3162 bp, Artificial Sequence
  Synthetic Polynucleotide
atggccttaccagtgaccgccttgctcctgccgctggccttgctgctccacgccgccaggccggacatccagatgacacagagccctagcagcctgtctgccagcgtgggagacagagtgaccatcacatgcaaggccagcgaccacatcaacaactggctggcctggtatcagcagaagcctggacaggcccctaagctgctgatctacggcgctaccacactggaaacaggcgtgcccagcagattttctggcagcggctctggcaccgactacaccctgacaatatccagcctccagcctgaggacttcgccacctactactgtcagcagagctggaacaccccttggacattcggccagggcaccaagctggaaatcaagagactcgagggacagcctaaggccaatcctaccgtgacactgttccctccaagcagcgaagaactccaggccaacaaggccacacttgtgtgcctgatctccgacttctaccctggggctgtgacagtggcttggaaggccgatggatctcctgtgaaagccggcgtggaaaccaccaagccatccaagcagagcaacaacaaatacgccgccagctcctacctgagcctgacacctgagcagtggaagtcccacagatcctacagctgccaagtgacccacgaaggcagcaccgtggaaaagacagtggcccctacagagtgcagcggatccaagagcgtgcggttctacctggtggtgtctcctgcctctgccagcacacagacaagctggaccccacgcgatctggtgtctagccagactcagacccagagctgtgtgcctcctacagctggtgctagacaggcccctgagagcccttctacaatccccgttccaagccagcctcagaacagcacactcagacctggacctgccgctcctattgctctggtgcctgtgttttgtggcctgctggtggctaagagcctggtgctgtctgccctgcttgtttggtggggagacatctggtggaaaaccatgatggaactgcggagcctggacacccagaaggccacctgtcatctccagcaagtgaccgatctgccctggacctctgtgtcaagccccgtggaaagagagatcctgtaccacaccgtggctcggaccaagatcagcgacgacgatgatgagcacacccttagggccaagcgatctggatctggagcaacaaacttctcactactcaaacaagcaggtgacgtggaggagaatcccgggcctactagtatggactggatttggcgcatccttttccttgtcggcgctgctaccggcgcgcattccttcgaacaagttcagcttcaacagcctggcgctgagctggtcaaacctggcgcttctgtgaagatgagctgcaaagccagcggctacgccttcagcagctactggatcaactggatgaagcagaaacccggccagggactcgaatggatcggccaaatctatcccggcgacggcgacaccaactacaacggcaagttcaagggcagagccacactgaccgccgatacctctagcagcacagcctacatgcagctgagcagcctgaccagcgaagatagcgccgtgtacttctgtgcccggtccatcacaacagtcgtgggctgcgctatggactattggggccagggaacaagcgtgaccgtgtctagtacgcgtgcctctacaaagggaccctccgtgtttcctctggctcccagcagcaagtctacaagcggaggaacagccgctctgggctgcctggtcaaggattactttcccgagcctgtgaccgtgtcctggaatagcggagcactgacaagcggcgtgcacacctttccagccgtgctgcaaagcagcggcctgtactctctgagcagcgtggtcacagtgcctagctctagcctgggcacccagacctacatctgcaatgtgaaccacaagcctagcaacaccaaggtggacaagagagtggaacccaagagctgtggtaccaagtctgtgcgcttttacctggtcgtcagccctgccagtgcctccactcagacatcttggaccccaagggaccttgtgtcctctcagacacagacacagtcctgcgtgccaccaactgctggcgcaagacaggctccagagtctcccagcacaatccccgtcccttctcagccccagaactccacacttaggccaggaccagctgctccaatcgcactggtcccagtgttctgcggactgctggttgccaagtctctggtgctgagcgcactcctcgtttggtggggcgatatttggtggaaaacgatgatggaattgagatccctcgatacgcagaaagccacatgccaccttcagcaagtcacagacttgccttggaccagcgtcagctctcccgtggaacgggaaattctgtatcatacagtggcccgcaccaagatttccgacgatgacgacgagcacacactgcgcgccaagagaagcggatctggcgtgaagcagaccctgaatttcgacctgctgaagctggctggcgacgtggaatccaacccaggcccttctagaggcgggatccacaccatggctacctacgaggtgctgtgcgaggtggcaagaaagctgggcaccgacgacagagaagtggtgctgttcctgctgaacgtgttcatccctcagcctacactggcccagctgatcggtgcactgagagccctgaaagaggaaggccggctgacctttcctctgctggccgaatgcctgttcagagccggaagaagggatctgctgcgggacctgctgcatctggaccccagatttctggaaagacacctggccggcaccatgagctacttcagcccttaccagctgaccgtgctgcacgttgacggcgaactgtgcgccagagatattcggagcctgatcttcctgagcaaggacaccatcggcagccggtctacccctcagacatttctgcactgggtgtactgcatggaaaacctggacctgctcggccccacagatgtggatgccctgatgtccatgctgagaagcctgagcagagtggacctccagagacaggtgcagacactgatgggactgcacctgagcggacctagccacagccagcactacagacacacccct

SEQ ID NO: 1759 - DNA, 3321 bp, Artificial Sequence
  Synthetic Polynucleotide
atggccttaccagtgaccgccttgctcctgccgctggccttgctgctccacgccgccaggccggacatccagatgacacagagccctagcagcctgtctgccagcgtgggagacagagtgaccatcacatgcaaggccagcgaccacatcaacaactggctggcctggtatcagcagaagcctggacaggcccctaagctgctgatctacggcgctaccacactggaaacaggcgtgcccagcagattttctggcagcggctctggcaccgactacaccctgacaatatccagcctccagcctgaggacttcgccacctactactgtcagcagagctggaacaccccttggacattcggccagggcaccaagctggaaatcaagagactcgagggacagcctaaggccaatcctaccgtgacactgttccctccaagcagcgaagaactccaggccaacaaggccacacttgtgtgcctgatctccgacttctaccctggggctgtgacagtggcttggaaggccgatggatctcctgtgaaagccggcgtggaaaccaccaagccatccaagcagagcaacaacaaatacgccgccagctcctacctgagcctgacacctgagcagtggaagtcccacagatcctacagctgccaagtgacccacgaaggcagcaccgtggaaaagacagtggcccctacagagtgcagcggatccaagagcgtgcggttctacctggtggtgtctcctgcctctgccagcacacagacaagctggaccccacgcgatctggtgtctagccagactcagacccagagctgtgtgcctcctacagctggtgctagacaggcccctgagagcccttctacaatccccgttccaagccagcctcagaacagcacactcagacctggacctgccgctcctattgctctggtgcctgtgttttgtggcctgctggtggctaagagcctggtgctgtctgccctgcttgtttggtggggagacatctggtggaaaaccatgatggaactgcggagcctggacacccagaaggccacctgtcatctccagcaagtgaccgatctgccctggacctctgtgtcaagccccgtggaaagagagatcctgtaccacaccgtggctcggaccaagatcagcgacgacgatgatgagcacacccttagggccaagcgatctggatctggagcaacaaacttctcactactcaaacaagcaggtgacgtggaggagaatcccgggcctactagtatggactggatttggcgcatccttttccttgtcggcgctgctaccggcgcgcattccttcgaacaagttcagcttcaacagcctggcgctgagctggtcaaacctggcgcttctgtgaagatgagctgcaaagccagcggctacgccttcagcagctactggatcaactggatgaagcagaaacccggccagggactcgaatggatcggccaaatctatcccggcgacggcgacaccaactacaacggcaagttcaagggcagagccacactgaccgccgatacctctagcagcacagcctacatgcagctgagcagcctgaccagcgaagatagcgccgtgtacttctgtgcccggtccatcacaacagtcgtgggctgcgctatggactattggggccagggaacaagcgtgaccgtgtctagtacgcgtgcctctacaaagggaccctccgtgtttcctctggctcccagcagcaagtctacaagcggaggaacagccgctctgggctgcctggtcaaggattactttcccgagcctgtgaccgtgtcctggaatagcggagcactgacaagcggcgtgcacacctttccagccgtgctgcaaagcagcggcctgtactctctgagcagcgtggtcacagtgcctagctctagcctgggcacccagacctacatctgcaatgtgaaccacaagcctagcaacaccaaggtggacaagagagtggaacccaagagctgtggtaccaagtctgtgcgcttttacctggtcgtcagccctgccagtgcctccactcagacatcttggaccccaagggaccttgtgtcctctcagacacagacacagtcctgcgtgccaccaactgctggcgcaagacaggctccagagtctcccagcacaatccccgtcccttctcagccccagaactccacacttaggccaggaccagctgctccaatcgcactggtcccagtgttctgcggactgctggttgccaagtctctggtgctgagcgcactcctcgtttggtggggcgatatttggtggaaaacgatgatggaattgagatccctcgatacgcagaaagccacatgccaccttcagcaagtcacagacttgccttggaccagcgtcagctctcccgtggaacgggaaattctgtatcatacagtggcccgcaccaagatttccgacgatgacgacgagcacacactgcgcgccaagagaagcggatctggcgtgaagcagaccctgaatttcgacctgctgaagctggctggcgacgtggaatccaacccaggcccttctagaggcgggatccacaccatgtccgactccaaggaggtccctagccttccatttttgcgacacttgctcgaagagttggacagccatgaggacagcttgctgctgtttctgtgtcacgacgcggccccgggctgcacgacggtcacgcaagctttgtgctcgcttagccaacagcgcaagctgaccctcgcggctctggtcgagatgctctacgtgctgcagcgtatggatcttctcaagagccgcttcgggctcagcaaggagggggccgagcaattgctgggcacaagctttctcacgcgctaccgcaagctcatggtttgcgtgggtgaggagctcgactcgagcgagctacgcgctctacgcttgttcgcgtgcaacctgaatccgagcctgagcacggcgctttctgagagcagccgctttgtcgagcttgtactcgcgcttgaaaacgtaggactcgtctcgccatcgagtgtttccgtgcttgcggacatgttgcgcactcttcggcgcctcgatttgtgccagcagcttgttgagtacgaacaacaagagcaagccaggtaccgttactgttacgcggcctcgccctcattgccagttcgtacgttacgtcgggggcacggcgcgagtgaacacgagcagctgtgcatgcccgtgcaagaatcctctgacagccccgagctgctgcgcacgcccgtacaagaatcctccagcgacagccccgagcaaacgact

SEQ ID NO: 1760 - DNA, 3189 bp, Artificial Sequence
  Synthetic Polynucleotide
atggccttaccagtgaccgccttgctcctgccgctggccttgctgctccacgccgccaggccggacatccagatgacacagagccctagcagcctgtctgccagcgtgggagacagagtgaccatcacatgcaaggccagcgaccacatcaacaactggctggcctggtatcagcagaagcctggacaggcccctaagctgctgatctacggcgctaccacactggaaacaggcgtgcccagcagattttctggcagcggctctggcaccgactacaccctgacaatatccagcctccagcctgaggacttcgccacctactactgtcagcagagctggaacaccccttggacattcggccagggcaccaagctggaaatcaagagactcgagggacagcctaaggccaatcctaccgtgacactgttccctccaagcagcgaagaactccaggccaacaaggccacacttgtgtgcctgatctccgacttctaccctggggctgtgacagtggcttggaaggccgatggatctcctgtgaaagccggcgtggaaaccaccaagccatccaagcagagcaacaacaaatacgccgccagctcctacctgagcctgacacctgagcagtggaagtcccacagatcctacagctgccaagtgacccacgaaggcagcaccgtggaaaagacagtggcccctacagagtgcagcggatccaagagcgtgcggttctacctggtggtgtctcctgcctctgccagcacacagacaagctggaccccacgcgatctggtgtctagccagactcagacccagagctgtgtgcctcctacagctggtgctagacaggcccctgagagcccttctacaatccccgttccaagccagcctcagaacagcacactcagacctggacctgccgctcctattgctctggtgcctgtgttttgtggcctgctggtggctaagagcctggtgctgtctgccctgcttgtttggtggggagacatctggtggaaaaccatgatggaactgcggagcctggacacccagaaggccacctgtcatctccagcaagtgaccgatctgccctggacctctgtgtcaagccccgtggaaagagagatcctgtaccacaccgtggctcggaccaagatcagcgacgacgatgatgagcacacccttagggccaagcgatctggatctggagcaacaaacttctcactactcaaacaagcaggtgacgtggaggagaatcccgggcctactagtatggactggatttggcgcatccttttccttgtcggcgctgctaccggcgcgcattccttcgaacaagttcagcttcaacagcctggcgctgagctggtcaaacctggcgcttctgtgaagatgagctgcaaagccagcggctacgccttcagcagctactggatcaactggatgaagcagaaacccggccagggactcgaatggatcggccaaatctatcccggcgacggcgacaccaactacaacggcaagttcaagggcagagccacactgaccgccgatacctctagcagcacagcctacatgcagctgagcagcctgaccagcgaagatagcgccgtgtacttctgtgcccggtccatcacaacagtcgtgggctgcgctatggactattggggccagggaacaagcgtgaccgtgtctagtacgcgtgcctctacaaagggaccctccgtgtttcctctggctcccagcagcaagtctacaagcggaggaacagccgctctgggctgcctggtcaaggattactttcccgagcctgtgaccgtgtcctggaatagcggagcactgacaagcggcgtgcacacctttccagccgtgctgcaaagcagcggcctgtactctctgagcagcgtggtcacagtgcctagctctagcctgggcacccagacctacatctgcaatgtgaaccacaagcctagcaacaccaaggtggacaagagagtggaacccaagagctgtggtaccaagtctgtgcgcttttacctggtcgtcagccctgccagtgcctccactcagacatcttggaccccaagggaccttgtgtcctctcagacacagacacagtcctgcgtgccaccaactgctggcgcaagacaggctccagagtctcccagcacaatccccgtcccttctcagccccagaactccacacttaggccaggaccagctgctccaatcgcactggtcccagtgttctgcggactgctggttgccaagtctctggtgctgagcgcactcctcgtttggtggggcgatatttggtggaaaacgatgatggaattgagatccctcgatacgcagaaagccacatgccaccttcagcaagtcacagacttgccttggaccagcgtcagctctcccgtggaacgggaaattctgtatcatacagtggcccgcaccaagatttccgacgatgacgacgagcacacactgcgcgccaagagaagcggatctggcgtgaagcagaccctgaatttcgacctgctgaagctggctggcgacgtggaatccaacccaggcccttctagaggccatatgaccgagtacaagcccacggtgcgcctcgccacccgcgacgacgtccccagggccgtacgcaccctcgccgccgcgttcgccgactaccccgccacgcgccacaccgtcgatccggaccgccacatcgagcgggtcaccgagctgcaagaactcttcctcacgcgcgtcgggctcgacatcggcaaggtgtgggtcgcggacgacggcgccgcggtggcggtctggaccacgccggagagcgtcgaagcgggggcggtgttcgccgagatcggcccgcgcatggccgagttgagcggttcccggctggccgcgcagcaacagatggaaggcctcctggcgccgcaccggcccaaggagcccgcgtggttcctggccaccgtcggcgtctcgcccgaccaccagggcaagggtctgggcagcgccgtcgtgctccccggagtggaggcggccgagcgcgccggggtgcccgccttcctggagacctccgcgccccgcaacctccccttctacgagcggctcggcttcaccgtcaccgccgacgtcgaggtgcccgaaggaccgcgcacctggtgcatgacccgcaagcccggtgcctga

SEQ ID NO: 1761 - DNA, 3600 bp, Artificial Sequence
  Synthetic Polynucleotide
atggccttaccagtgaccgccttgctcctgccgctggccttgctgctccacgccgccaggccggaagtgcagctggttgaatctggcggaggactggttcaggctggcggatctctgagactgtcttgtgccgccagcggcagaacctttagcatgggctggtttagacaggcccctggcaaagagagagagttcgtcgccgccatcacatactctggcggcagcccttactacgccgactctgtgaagggcagattcaccatcagccgggacaacgccaagaacaccgtgtacctccagatgaacagcctgaagcctgaggacaccgccgtgtactactgcgccgccaatccaacatacggcagcgactggaacgccgagaattggggccagggaacccaagtgacagtgtctagcggtaccggcggaggcggatctggcggcggaggtagcggtggcggaggatctgaattcgacatccagatgacacagagccctagcagcctgtctgccagcgtgggagacagagtgaccatcacatgcaaggccagcgaccacatcaacaactggctggcctggtatcagcagaagcctggacaggcccctaagctgctgatctacggcgctaccacactggaaacaggcgtgcccagcagattttctggcagcggctctggcaccgactacaccctgacaatatccagcctccagcctgaggacttcgccacctactactgtcagcagagctggaacaccccttggacattcggccagggcaccaagctggaaatcaagagactcgagggacagcctaaggccaatcctaccgtgacactgttccctccaagcagcgaagaactccaggccaacaaggccacacttgtgtgcctgatctccgacttctaccctggggctgtgacagtggcttggaaggccgatggatctcctgtgaaagccggcgtggaaaccaccaagccatccaagcagagcaacaacaaatacgccgccagctcctacctgagcctgacacctgagcagtggaagtcccacagatcctacagctgccaagtgacccacgaaggcagcaccgtggaaaagacagtggcccctacagagtgcagcggatccaagagcgtgcggttctacctggtggtgtctcctgcctctgccagcacacagacaagctggaccccacgcgatctggtgtctagccagactcagacccagagctgtgtgcctcctacagctggtgctagacaggcccctgagagcccttctacaatccccgttccaagccagcctcagaacagcacactcagacctggacctgccgctcctattgctctggtgcctgtgttttgtggcctgctggtggctaagagcctggtgctgtctgccctgcttgtttggtggggagacatctggtggaaaaccatgatggaactgcggagcctggacacccagaaggccacctgtcatctccagcaagtgaccgatctgccctggacctctgtgtcaagccccgtggaaagagagatcctgtaccacaccgtggctcggaccaagatcagcgacgacgatgatgagcacacccttagggccaagcgatctggatctggagcaacaaacttctcactactcaaacaagcaggtgacgtggaggagaatcccgggcctactagtatggactggatttggcgcatccttttccttgtcggcgctgctaccggcgcgcattccttcgaacaagttcagcttcaacagcctggcgctgagctggtcaaacctggcgcttctgtgaagatgagctgcaaagccagcggctacgccttcagcagctactggatcaactggatgaagcagaaacccggccagggactcgaatggatcggccaaatctatcccggcgacggcgacaccaactacaacggcaagttcaagggcagagccacactgaccgccgatacctctagcagcacagcctacatgcagctgagcagcctgaccagcgaagatagcgccgtgtacttctgtgcccggtccatcacaacagtcgtgggctgcgctatggactattggggccagggaacaagcgtgaccgtgtctagtacgcgtgcctctacaaagggaccctccgtgtttcctctggctcccagcagcaagtctacaagcggaggaacagccgctctgggctgcctggtcaaggattactttcccgagcctgtgaccgtgtcctggaatagcggagcactgacaagcggcgtgcacacctttccagccgtgctgcaaagcagcggcctgtactctctgagcagcgtggtcacagtgcctagctctagcctgggcacccagacctacatctgcaatgtgaaccacaagcctagcaacaccaaggtggacaagagagtggaacccaagagctgtggtaccaagtctgtgcgcttttacctggtcgtcagccctgccagtgcctccactcagacatcttggaccccaagggaccttgtgtcctctcagacacagacacagtcctgcgtgccaccaactgctggcgcaagacaggctccagagtctcccagcacaatccccgtcccttctcagccccagaactccacacttaggccaggaccagctgctccaatcgcactggtcccagtgttctgcggactgctggttgccaagtctctggtgctgagcgcactcctcgtttggtggggcgatatttggtggaaaacgatgatggaattgagatccctcgatacgcagaaagccacatgccaccttcagcaagtcacagacttgccttggaccagcgtcagctctcccgtggaacgggaaattctgtatcatacagtggcccgcaccaagatttccgacgatgacgacgagcacacactgcgcgccaagagaagcggatctggcgtgaagcagaccctgaatttcgacctgctgaagctggctggcgacgtggaatccaacccaggcccttctagaggccatatgaccgagtacaagcccacggtgcgcctcgccacccgcgacgacgtccccagggccgtacgcaccctcgccgccgcgttcgccgactaccccgccacgcgccacaccgtcgatccggaccgccacatcgagcgggtcaccgagctgcaagaactcttcctcacgcgcgtcgggctcgacatcggcaaggtgtgggtcgcggacgacggcgccgcggtggcggtctggaccacgccggagagcgtcgaagcgggggcggtgttcgccgagatcggcccgcgcatggccgagttgagcggttcccggctggccgcgcagcaacagatggaaggcctcctggcgccgcaccggcccaaggagcccgcgtggttcctggccaccgtcggcgtctcgcccgaccaccagggcaagggtctgggcagcgccgtcgtgctccccggagtggaggcggccgagcgcgccggggtgcccgccttcctggagacctccgcgccccgcaacctccccttctacgagcggctcggcttcaccgtcaccgccgacgtcgaggtgcccgaaggaccgcgcacctggtgcatgacccgcaagcccggtgcctga

SEQ ID NO: 1762 - DNA, 4011 bp, Artificial Sequence
  Synthetic Polynucleotide
atggccttaccagtgaccgccttgctcctgccgctggccttgctgctccacgccgccaggccggaagtgcagctggttgaatctggcggaggactggttcaggctggcggatctctgagactgtcttgtgccgccagcggcagaacctttagcatgggctggtttagacaggcccctggcaaagagagagagttcgtcgccgccatcacatactctggcggcagcccttactacgccgactctgtgaagggcagattcaccatcagccgggacaacgccaagaacaccgtgtacctccagatgaacagcctgaagcctgaggacaccgccgtgtactactgcgccgccaatccaacatacggcagcgactggaacgccgagaattggggccagggaacccaagtgacagtgtctagcggtaccggcggaggcggatctggcggcggaggtagcggtggcggaggatctgaattcgacatccagatgacacagagccctagcagcctgtctgccagcgtgggagacagagtgaccatcacatgcaaggccagcgaccacatcaacaactggctggcctggtatcagcagaagcctggacaggcccctaagctgctgatctacggcgctaccacactggaaacaggcgtgcccagcagattttctggcagcggctctggcaccgactacaccctgacaatatccagcctccagcctgaggacttcgccacctactactgtcagcagagctggaacaccccttggacattcggccagggcaccaagctggaaatcaagagactcgagggacagcctaaggccaatcctaccgtgacactgttccctccaagcagcgaagaactccaggccaacaaggccacacttgtgtgcctgatctccgacttctaccctggggctgtgacagtggcttggaaggccgatggatctcctgtgaaagccggcgtggaaaccaccaagccatccaagcagagcaacaacaaatacgccgccagctcctacctgagcctgacacctgagcagtggaagtcccacagatcctacagctgccaagtgacccacgaaggcagcaccgtggaaaagacagtggcccctacagagtgcagcggatccaagagcgtgcggttctacctggtggtgtctcctgcctctgccagcacacagacaagctggaccccacgcgatctggtgtctagccagactcagacccagagctgtgtgcctcctacagctggtgctagacaggcccctgagagcccttctacaatccccgttccaagccagcctcagaacagcacactcagacctggacctgccgctcctattgctctggtgcctgtgttttgtggcctgctggtggctaagagcctggtgctgtctgccctgcttgtttggtggggagacatctggtggaaaaccatgatggaactgcggagcctggacacccagaaggccacctgtcatctccagcaagtgaccgatctgccctggacctctgtgtcaagccccgtggaaagagagatcctgtaccacaccgtggctcggaccaagatcagcgacgacgatgatgagcacacccttagggccaagcgatctggatctggagcaacaaacttctcactactcaaacaagcaggtgacgtggaggagaatcccgggcctactagtatggactggatttggcgcatccttttccttgtcggcgctgctaccggcgcgcattccgggcccgaagtgcaactggttgaatccggtggcggcctggtgcaagcaggcggatctctcagacttagctgtgccgcctccggcagaaccttcacaatgggatggtttaggcaggctccagggaaagagagagagttcgtcgccgccatctctctgtctcccacactggcctactacgccgactctgtgaaaggccggttcaccatctccagagataatgccaagaacaccgtggtgctgcaaatgaactctctgaaacccgaggatacagccctgtactattgtgccgctgaccggaagtccgtgatgagcatcagacccgattactggggacagggcacacaagtcacagtgtcctctggatccggcggcggaggatctggcggaggcggatctgggggcggaggctctttcgaacaagttcagcttcaacagcctggcgctgagctggtcaaacctggcgcttctgtgaagatgagctgcaaagccagcggctacgccttcagcagctactggatcaactggatgaagcagaaacccggccagggactcgaatggatcggccaaatctatcccggcgacggcgacaccaactacaacggcaagttcaagggcagagccacactgaccgccgatacctctagcagcacagcctacatgcagctgagcagcctgaccagcgaagatagcgccgtgtacttctgtgcccggtccatcacaacagtcgtgggctgcgctatggactattggggccagggaacaagcgtgaccgtgtctagtacgcgtgcctctacaaagggaccctccgtgtttcctctggctcccagcagcaagtctacaagcggaggaacagccgctctgggctgcctggtcaaggattactttcccgagcctgtgaccgtgtcctggaatagcggagcactgacaagcggcgtgcacacctttccagccgtgctgcaaagcagcggcctgtactctctgagcagcgtggtcacagtgcctagctctagcctgggcacccagacctacatctgcaatgtgaaccacaagcctagcaacaccaaggtggacaagagagtggaacccaagagctgtggtaccaagtctgtgcgcttttacctggtcgtcagccctgccagtgcctccactcagacatcttggaccccaagggaccttgtgtcctctcagacacagacacagtcctgcgtgccaccaactgctggcgcaagacaggctccagagtctcccagcacaatccccgtcccttctcagccccagaactccacacttaggccaggaccagctgctccaatcgcactggtcccagtgttctgcggactgctggttgccaagtctctggtgctgagcgcactcctcgtttggtggggcgatatttggtggaaaacgatgatggaattgagatccctcgatacgcagaaagccacatgccaccttcagcaagtcacagacttgccttggaccagcgtcagctctcccgtggaacgggaaattctgtatcatacagtggcccgcaccaagatttccgacgatgacgacgagcacacactgcgcgccaagagaagcggatctggcgtgaagcagaccctgaatttcgacctgctgaagctggctggcgacgtggaatccaacccaggcccttctagaggccatatgaccgagtacaagcccacggtgcgcctcgccacccgcgacgacgtccccagggccgtacgcaccctcgccgccgcgttcgccgactaccccgccacgcgccacaccgtcgatccggaccgccacatcgagcgggtcaccgagctgcaagaactcttcctcacgcgcgtcgggctcgacatcggcaaggtgtgggtcgcggacgacggcgccgcggtggcggtctggaccacgccggagagcgtcgaagcgggggcggtgttcgccgagatcggcccgcgcatggccgagttgagcggttcccggctggccgcgcagcaacagatggaaggcctcctggcgccgcaccggcccaaggagcccgcgtggttcctggccaccgtcggcgtctcgcccgaccaccagggcaagggtctgggcagcgccgtcgtgctccccggagtggaggcggccgagcgcgccggggtgcccgccttcctggagacctccgcgccccgcaacctccccttctacgagcggctcggcttcaccgtcaccgccgacgtcgaggtgcccgaaggaccgcgcacctggtgcatgacccgcaagcccggtgcctga

SEQ ID NO: 1763 - DNA, 3210 bp, Artificial Sequence
  Synthetic Polynucleotide
atggccttaccagtgaccgccttgctcctgccgctggccttgctgctccacgccgccaggccggaagtgcagctggttgaatctggcggaggactggttcaggctggcggatctctgagactgtcttgtgccgccagcggcagaacctttagcatgggctggtttagacaggcccctggcaaagagagagagttcgtcgccgccatcacatactctggcggcagcccttactacgccgactctgtgaagggcagattcaccatcagccgggacaacgccaagaacaccgtgtacctccagatgaacagcctgaagcctgaggacaccgccgtgtactactgcgccgccaatccaacatacggcagcgactggaacgccgagaattggggccagggaacccaagtgacagtgtctagcctcgagggacagcctaaggccaatcctaccgtgacactgttccctccaagcagcgaagaactccaggccaacaaggccacacttgtgtgcctgatctccgacttctaccctggggctgtgacagtggcttggaaggccgatggatctcctgtgaaagccggcgtggaaaccaccaagccatccaagcagagcaacaacaaatacgccgccagctcctacctgagcctgacacctgagcagtggaagtcccacagatcctacagctgccaagtgacccacgaaggcagcaccgtggaaaagacagtggcccctacagagtgcagcggatccaagagcgtgcggttctacctggtggtgtctcctgcctctgccagcacacagacaagctggaccccacgcgatctggtgtctagccagactcagacccagagctgtgtgcctcctacagctggtgctagacaggcccctgagagcccttctacaatccccgttccaagccagcctcagaacagcacactcagacctggacctgccgctcctattgctctggtgcctgtgttttgtggcctgctggtggctaagagcctggtgctgtctgccctgcttgtttggtggggagacatctggtggaaaaccatgatggaactgcggagcctggacacccagaaggccacctgtcatctccagcaagtgaccgatctgccctggacctctgtgtcaagccccgtggaaagagagatcctgtaccacaccgtggctcggaccaagatcagcgacgacgatgatgagcacacccttagggccaagcgatctggatctggagcaacaaacttctcactactcaaacaagcaggtgacgtggaggagaatcccgggcctactagtatggactggatttggcgcatccttttccttgtcggcgctgctaccggcgcgcattccgggcccgaagtgcaactggttgaatccggtggcggcctggtgcaagcaggcggatctctcagacttagctgtgccgcctccggcagaaccttcacaatgggatggtttaggcaggctccagggaaagagagagagttcgtcgccgccatctctctgtctcccacactggcctactacgccgactctgtgaaaggccggttcaccatctccagagataatgccaagaacaccgtggtgctgcaaatgaactctctgaaacccgaggatacagccctgtactattgtgccgctgaccggaagtccgtgatgagcatcagacccgattactggggacagggcacacaagtcacagtgtcctctacgcgtgcctctacaaagggaccctccgtgtttcctctggctcccagcagcaagtctacaagcggaggaacagccgctctgggctgcctggtcaaggattactttcccgagcctgtgaccgtgtcctggaatagcggagcactgacaagcggcgtgcacacctttccagccgtgctgcaaagcagcggcctgtactctctgagcagcgtggtcacagtgcctagctctagcctgggcacccagacctacatctgcaatgtgaaccacaagcctagcaacaccaaggtggacaagagagtggaacccaagagctgtggtaccaagtctgtgcgcttttacctggtcgtcagccctgccagtgcctccactcagacatcttggaccccaagggaccttgtgtcctctcagacacagacacagtcctgcgtgccaccaactgctggcgcaagacaggctccagagtctcccagcacaatccccgtcccttctcagccccagaactccacacttaggccaggaccagctgctccaatcgcactggtcccagtgttctgcggactgctggttgccaagtctctggtgctgagcgcactcctcgtttggtggggcgatatttggtggaaaacgatgatggaattgagatccctcgatacgcagaaagccacatgccaccttcagcaagtcacagacttgccttggaccagcgtcagctctcccgtggaacgggaaattctgtatcatacagtggcccgcaccaagatttccgacgatgacgacgagcacacactgcgcgccaagagaagcggatctggcgtgaagcagaccctgaatttcgacctgctgaagctggctggcgacgtggaatccaacccaggcccttctagaggccatatgaccgagtacaagcccacggtgcgcctcgccacccgcgacgacgtccccagggccgtacgcaccctcgccgccgcgttcgccgactaccccgccacgcgccacaccgtcgatccggaccgccacatcgagcgggtcaccgagctgcaagaactcttcctcacgcgcgtcgggctcgacatcggcaaggtgtgggtcgcggacgacggcgccgcggtggcggtctggaccacgccggagagcgtcgaagcgggggcggtgttcgccgagatcggcccgcgcatggccgagttgagcggttcccggctggccgcgcagcaacagatggaaggcctcctggcgccgcaccggcccaaggagcccgcgtggttcctggccaccgtcggcgtctcgcccgaccaccagggcaagggtctgggcagcgccgtcgtgctccccggagtggaggcggccgagcgcgccggggtgcccgccttcctggagacctccgcgccccgcaacctccccttctacgagcggctcggcttcaccgtcaccgccgacgtcgaggtgcccgaaggaccgcgcacctggtgcatgacccgcaagcccggtgcctga

SEQ ID NO: 1764 - DNA, 3234 bp, Artificial Sequence
  Synthetic Polynucleotide
atggccttaccagtgaccgccttgctcctgccgctggccttgctgctccacgccgccaggccggacatccagatgacacagagccctagcagcctgtctgccagcgtgggagacagagtgaccatcacatgcaaggccagcgaccacatcaacaactggctggcctggtatcagcagaagcctggacaggcccctaagctgctgatctacggcgctaccacactggaaacaggcgtgcccagcagattttctggcagcggctctggcaccgactacaccctgacaatatccagcctccagcctgaggacttcgccacctactactgtcagcagagctggaacaccccttggacattcggccagggcaccaagctggaaatcaagagactcgaggacctgaagaacgtgttcccacctgaggtggccgtgttcgagcctagcgaggccgagatcagccacacccagaaagccaccctcgtgtgcctggctaccggcttctaccccgaccatgtggaactgtcttggtgggtcaacggcaaagaggtgcacagcggcgtgtctaccgacccccagccactgaaagaacagcccgccctgaacgacagccggtactgcctgagcagcagactgagagtgtccgccaccttctggcagaacccccggaaccacttcagatgccaggtgcagttctacggcctgagcgagaacgacgagtggacccaggacagagccaagcccgtgacccagatcgtgtctgccgaagcctggggcagagccgattgcggatccaagagcgtgcggttctacctggtggtgtctcctgcctctgccagcacacagacaagctggaccccacgcgatctggtgtctagccagactcagacccagagctgtgtgcctcctacagctggtgctagacaggcccctgagagcccttctacaatccccgttccaagccagcctcagaacagcacactcagacctggacctgccgctcctattgctctggtgcctgtgttttgtggcctgctggtggctaagagcctggtgctgtctgccctgcttgtttggtggggagacatctggtggaaaaccatgatggaactgcggagcctggacacccagaaggccacctgtcatctccagcaagtgaccgatctgccctggacctctgtgtcaagccccgtggaaagagagatcctgtaccacaccgtggctcggaccaagatcagcgacgacgatgatgagcacacccttagggccaagcgatctggatctggagcaacaaacttctcactactcaaacaagcaggtgacgtggaggagaatcccgggcctactagtatggactggatttggcgcatccttttccttgtcggcgctgctaccggcgcgcattccttcgaacaagttcagcttcaacagcctggcgctgagctggtcaaacctggcgcttctgtgaagatgagctgcaaagccagcggctacgccttcagcagctactggatcaactggatgaagcagaaacccggccagggactcgaatggatcggccaaatctatcccggcgacggcgacaccaactacaacggcaagttcaagggcagagccacactgaccgccgatacctctagcagcacagcctacatgcagctgagcagcctgaccagcgaagatagcgccgtgtacttctgtgcccggtccatcacaacagtcgtgggctgcgctatggactattggggccagggaacaagcgtgaccgtgtctagtacgcgtatccagaaccctgatcctgccgtgtaccagctgcgggatagcaagagcagcgacaagagcgtgtgtctgttcaccgacttcgacagccagaccaacgtgtcccagagcaaggactccgacgtgtacatcaccgataagaccgtgctggacatgcggagcatggacttcaagagcaactccgccgtggcctggtccaacaagtccgatttcgcctgcgccaacgccttcaacaacagcattatccccgaggacacattcttcccaagccccgagagcagctgcggtaccaagtctgtgcgcttttacctggtcgtcagccctgccagtgcctccactcagacatcttggaccccaagggaccttgtgtcctctcagacacagacacagtcctgcgtgccaccaactgctggcgcaagacaggctccagagtctcccagcacaatccccgtcccttctcagccccagaactccacacttaggccaggaccagctgctccaatcgcactggtcccagtgttctgcggactgctggttgccaagtctctggtgctgagcgcactcctcgtttggtggggcgatatttggtggaaaacgatgatggaattgagatccctcgatacgcagaaagccacatgccaccttcagcaagtcacagacttgccttggaccagcgtcagctctcccgtggaacgggaaattctgtatcatacagtggcccgcaccaagatttccgacgatgacgacgagcacacactgcgcgccaagagaagcggatctggcgtgaagcagaccctgaatttcgacctgctgaagctggctggcgacgtggaatccaacccaggcccttctagaggccatatgaccgagtacaagcccacggtgcgcctcgccacccgcgacgacgtccccagggccgtacgcaccctcgccgccgcgttcgccgactaccccgccacgcgccacaccgtcgatccggaccgccacatcgagcgggtcaccgagctgcaagaactcttcctcacgcgcgtcgggctcgacatcggcaaggtgtgggtcgcggacgacggcgccgcggtggcggtctggaccacgccggagagcgtcgaagcgggggcggtgttcgccgagatcggcccgcgcatggccgagttgagcggttcccggctggccgcgcagcaacagatggaaggcctcctggcgccgcaccggcccaaggagcccgcgtggttcctggccaccgtcggcgtctcgcccgaccaccagggcaagggtctgggcagcgccgtcgtgctccccggagtggaggcggccgagcgcgccggggtgcccgccttcctggagacctccgcgccccgcaacctccccttctacgagcggctcggcttcaccgtcaccgccgacgtcgaggtgcccgaaggaccgcgcacctggtgcatgacccgcaagcccggtgcctga

SEQ ID NO: 1765 - DNA, 3645 bp, Artificial Sequence
  Synthetic Polynucleotide
atggccttaccagtgaccgccttgctcctgccgctggccttgctgctccacgccgccaggccggaagtgcagctggttgaatctggcggaggactggttcaggctggcggatctctgagactgtcttgtgccgccagcggcagaacctttagcatgggctggtttagacaggcccctggcaaagagagagagttcgtcgccgccatcacatactctggcggcagcccttactacgccgactctgtgaagggcagattcaccatcagccgggacaacgccaagaacaccgtgtacctccagatgaacagcctgaagcctgaggacaccgccgtgtactactgcgccgccaatccaacatacggcagcgactggaacgccgagaattggggccagggaacccaagtgacagtgtctagcggtaccggcggaggcggatctggcggcggaggtagcggtggcggaggatctgaattcgacatccagatgacacagagccctagcagcctgtctgccagcgtgggagacagagtgaccatcacatgcaaggccagcgaccacatcaacaactggctggcctggtatcagcagaagcctggacaggcccctaagctgctgatctacggcgctaccacactggaaacaggcgtgcccagcagattttctggcagcggctctggcaccgactacaccctgacaatatccagcctccagcctgaggacttcgccacctactactgtcagcagagctggaacaccccttggacattcggccagggcaccaagctggaaatcaagagactcgaggacctgaagaacgtgttcccacctgaggtggccgtgttcgagcctagcgaggccgagatcagccacacccagaaagccaccctcgtgtgcctggctaccggcttctaccccgaccatgtggaactgtcttggtgggtcaacggcaaagaggtgcacagcggcgtgtctaccgacccccagccactgaaagaacagcccgccctgaacgacagccggtactgcctgagcagcagactgagagtgtccgccaccttctggcagaacccccggaaccacttcagatgccaggtgcagttctacggcctgagcgagaacgacgagtggacccaggacagagccaagcccgtgacccagatcgtgtctgccgaagcctggggcagagccgattgcggatccaagagcgtgcggttctacctggtggtgtctcctgcctctgccagcacacagacaagctggaccccacgcgatctggtgtctagccagactcagacccagagctgtgtgcctcctacagctggtgctagacaggcccctgagagcccttctacaatccccgttccaagccagcctcagaacagcacactcagacctggacctgccgctcctattgctctggtgcctgtgttttgtggcctgctggtggctaagagcctggtgctgtctgccctgcttgtttggtggggagacatctggtggaaaaccatgatggaactgcggagcctggacacccagaaggccacctgtcatctccagcaagtgaccgatctgccctggacctctgtgtcaagccccgtggaaagagagatcctgtaccacaccgtggctcggaccaagatcagcgacgacgatgatgagcacacccttagggccaagcgatctggatctggagcaacaaacttctcactactcaaacaagcaggtgacgtggaggagaatcccgggcctactagtatggactggatttggcgcatccttttccttgtcggcgctgctaccggcgcgcattccttcgaacaagttcagcttcaacagcctggcgctgagctggtcaaacctggcgcttctgtgaagatgagctgcaaagccagcggctacgccttcagcagctactggatcaactggatgaagcagaaacccggccagggactcgaatggatcggccaaatctatcccggcgacggcgacaccaactacaacggcaagttcaagggcagagccacactgaccgccgatacctctagcagcacagcctacatgcagctgagcagcctgaccagcgaagatagcgccgtgtacttctgtgcccggtccatcacaacagtcgtgggctgcgctatggactattggggccagggaacaagcgtgaccgtgtctagtacgcgtatccagaaccctgatcctgccgtgtaccagctgcgggatagcaagagcagcgacaagagcgtgtgtctgttcaccgacttcgacagccagaccaacgtgtcccagagcaaggactccgacgtgtacatcaccgataagaccgtgctggacatgcggagcatggacttcaagagcaactccgccgtggcctggtccaacaagtccgatttcgcctgcgccaacgccttcaacaacagcattatccccgaggacacattcttcccaagccccgagagcagctgcggtaccaagtctgtgcgcttttacctggtcgtcagccctgccagtgcctccactcagacatcttggaccccaagggaccttgtgtcctctcagacacagacacagtcctgcgtgccaccaactgctggcgcaagacaggctccagagtctcccagcacaatccccgtcccttctcagccccagaactccacacttaggccaggaccagctgctccaatcgcactggtcccagtgttctgcggactgctggttgccaagtctctggtgctgagcgcactcctcgtttggtggggcgatatttggtggaaaacgatgatggaattgagatccctcgatacgcagaaagccacatgccaccttcagcaagtcacagacttgccttggaccagcgtcagctctcccgtggaacgggaaattctgtatcatacagtggcccgcaccaagatttccgacgatgacgacgagcacacactgcgcgccaagagaagcggatctggcgtgaagcagaccctgaatttcgacctgctgaagctggctggcgacgtggaatccaacccaggcccttctagaggccatatgaccgagtacaagcccacggtgcgcctcgccacccgcgacgacgtccccagggccgtacgcaccctcgccgccgcgttcgccgactaccccgccacgcgccacaccgtcgatccggaccgccacatcgagcgggtcaccgagctgcaagaactcttcctcacgcgcgtcgggctcgacatcggcaaggtgtgggtcgcggacgacggcgccgcggtggcggtctggaccacgccggagagcgtcgaagcgggggcggtgttcgccgagatcggcccgcgcatggccgagttgagcggttcccggctggccgcgcagcaacagatggaaggcctcctggcgccgcaccggcccaaggagcccgcgtggttcctggccaccgtcggcgtctcgcccgaccaccagggcaagggtctgggcagcgccgtcgtgctccccggagtggaggcggccgagcgcgccggggtgcccgccttcctggagacctccgcgccccgcaacctccccttctacgagcggctcggcttcaccgtcaccgccgacgtcgaggtgcccgaaggaccgcgcacctggtgcatgacccgcaagcccggtgcctga

SEQ ID NO: 1766 - DNA, 4056 bp, Artificial Sequence
  Synthetic Polynucleotide
atggccttaccagtgaccgccttgctcctgccgctggccttgctgctccacgccgccaggccggaagtgcagctggttgaatctggcggaggactggttcaggctggcggatctctgagactgtcttgtgccgccagcggcagaacctttagcatgggctggtttagacaggcccctggcaaagagagagagttcgtcgccgccatcacatactctggcggcagcccttactacgccgactctgtgaagggcagattcaccatcagccgggacaacgccaagaacaccgtgtacctccagatgaacagcctgaagcctgaggacaccgccgtgtactactgcgccgccaatccaacatacggcagcgactggaacgccgagaattggggccagggaacccaagtgacagtgtctagcggtaccggcggaggcggatctggcggcggaggtagcggtggcggaggatctgaattcgacatccagatgacacagagccctagcagcctgtctgccagcgtgggagacagagtgaccatcacatgcaaggccagcgaccacatcaacaactggctggcctggtatcagcagaagcctggacaggcccctaagctgctgatctacggcgctaccacactggaaacaggcgtgcccagcagattttctggcagcggctctggcaccgactacaccctgacaatatccagcctccagcctgaggacttcgccacctactactgtcagcagagctggaacaccccttggacattcggccagggcaccaagctggaaatcaagagactcgaggacctgaagaacgtgttcccacctgaggtggccgtgttcgagcctagcgaggccgagatcagccacacccagaaagccaccctcgtgtgcctggctaccggcttctaccccgaccatgtggaactgtcttggtgggtcaacggcaaagaggtgcacagcggcgtgtctaccgacccccagccactgaaagaacagcccgccctgaacgacagccggtactgcctgagcagcagactgagagtgtccgccaccttctggcagaacccccggaaccacttcagatgccaggtgcagttctacggcctgagcgagaacgacgagtggacccaggacagagccaagcccgtgacccagatcgtgtctgccgaagcctggggcagagccgattgcggatccaagagcgtgcggttctacctggtggtgtctcctgcctctgccagcacacagacaagctggaccccacgcgatctggtgtctagccagactcagacccagagctgtgtgcctcctacagctggtgctagacaggcccctgagagcccttctacaatccccgttccaagccagcctcagaacagcacactcagacctggacctgccgctcctattgctctggtgcctgtgttttgtggcctgctggtggctaagagcctggtgctgtctgccctgcttgtttggtggggagacatctggtggaaaaccatgatggaactgcggagcctggacacccagaaggccacctgtcatctccagcaagtgaccgatctgccctggacctctgtgtcaagccccgtggaaagagagatcctgtaccacaccgtggctcggaccaagatcagcgacgacgatgatgagcacacccttagggccaagcgatctggatctggagcaacaaacttctcactactcaaacaagcaggtgacgtggaggagaatcccgggcctactagtatggactggatttggcgcatccttttccttgtcggcgctgctaccggcgcgcattccgggcccgaagtgcaactggttgaatccggtggcggcctggtgcaagcaggcggatctctcagacttagctgtgccgcctccggcagaaccttcacaatgggatggtttaggcaggctccagggaaagagagagagttcgtcgccgccatctctctgtctcccacactggcctactacgccgactctgtgaaaggccggttcaccatctccagagataatgccaagaacaccgtggtgctgcaaatgaactctctgaaacccgaggatacagccctgtactattgtgccgctgaccggaagtccgtgatgagcatcagacccgattactggggacagggcacacaagtcacagtgtcctctggatccggcggcggaggatctggcggaggcggatctgggggcggaggctctttcgaacaagttcagcttcaacagcctggcgctgagctggtcaaacctggcgcttctgtgaagatgagctgcaaagccagcggctacgccttcagcagctactggatcaactggatgaagcagaaacccggccagggactcgaatggatcggccaaatctatcccggcgacggcgacaccaactacaacggcaagttcaagggcagagccacactgaccgccgatacctctagcagcacagcctacatgcagctgagcagcctgaccagcgaagatagcgccgtgtacttctgtgcccggtccatcacaacagtcgtgggctgcgctatggactattggggccagggaacaagcgtgaccgtgtctagtacgcgtatccagaaccctgatcctgccgtgtaccagctgcgggatagcaagagcagcgacaagagcgtgtgtctgttcaccgacttcgacagccagaccaacgtgtcccagagcaaggactccgacgtgtacatcaccgataagaccgtgctggacatgcggagcatggacttcaagagcaactccgccgtggcctggtccaacaagtccgatttcgcctgcgccaacgccttcaacaacagcattatccccgaggacacattcttcccaagccccgagagcagctgcggtaccaagtctgtgcgcttttacctggtcgtcagccctgccagtgcctccactcagacatcttggaccccaagggaccttgtgtcctctcagacacagacacagtcctgcgtgccaccaactgctggcgcaagacaggctccagagtctcccagcacaatccccgtcccttctcagccccagaactccacacttaggccaggaccagctgctccaatcgcactggtcccagtgttctgcggactgctggttgccaagtctctggtgctgagcgcactcctcgtttggtggggcgatatttggtggaaaacgatgatggaattgagatccctcgatacgcagaaagccacatgccaccttcagcaagtcacagacttgccttggaccagcgtcagctctcccgtggaacgggaaattctgtatcatacagtggcccgcaccaagatttccgacgatgacgacgagcacacactgcgcgccaagagaagcggatctggcgtgaagcagaccctgaatttcgacctgctgaagctggctggcgacgtggaatccaacccaggcccttctagaggccatatgaccgagtacaagcccacggtgcgcctcgccacccgcgacgacgtccccagggccgtacgcaccctcgccgccgcgttcgccgactaccccgccacgcgccacaccgtcgatccggaccgccacatcgagcgggtcaccgagctgcaagaactcttcctcacgcgcgtcgggctcgacatcggcaaggtgtgggtcgcggacgacggcgccgcggtggcggtctggaccacgccggagagcgtcgaagcgggggcggtgttcgccgagatcggcccgcgcatggccgagttgagcggttcccggctggccgcgcagcaacagatggaaggcctcctggcgccgcaccggcccaaggagcccgcgtggttcctggccaccgtcggcgtctcgcccgaccaccagggcaagggtctgggcagcgccgtcgtgctccccggagtggaggcggccgagcgcgccggggtgcccgccttcctggagacctccgcgccccgcaacctccccttctacgagcggctcggcttcaccgtcaccgccgacgtcgaggtgcccgaaggaccgcgcacctggtgcatgacccgcaagcccggtgcctga

SEQ ID NO: 1767 - DNA, 3255 bp, Artificial Sequence
  Synthetic Polynucleotide
atggccttaccagtgaccgccttgctcctgccgctggccttgctgctccacgccgccaggccggaagtgcagctggttgaatctggcggaggactggttcaggctggcggatctctgagactgtcttgtgccgccagcggcagaacctttagcatgggctggtttagacaggcccctggcaaagagagagagttcgtcgccgccatcacatactctggcggcagcccttactacgccgactctgtgaagggcagattcaccatcagccgggacaacgccaagaacaccgtgtacctccagatgaacagcctgaagcctgaggacaccgccgtgtactactgcgccgccaatccaacatacggcagcgactggaacgccgagaattggggccagggaacccaagtgacagtgtctagcctcgaggacctgaagaacgtgttcccacctgaggtggccgtgttcgagcctagcgaggccgagatcagccacacccagaaagccaccctcgtgtgcctggctaccggcttctaccccgaccatgtggaactgtcttggtgggtcaacggcaaagaggtgcacagcggcgtgtctaccgacccccagccactgaaagaacagcccgccctgaacgacagccggtactgcctgagcagcagactgagagtgtccgccaccttctggcagaacccccggaaccacttcagatgccaggtgcagttctacggcctgagcgagaacgacgagtggacccaggacagagccaagcccgtgacccagatcgtgtctgccgaagcctggggcagagccgattgcggatccaagagcgtgcggttctacctggtggtgtctcctgcctctgccagcacacagacaagctggaccccacgcgatctggtgtctagccagactcagacccagagctgtgtgcctcctacagctggtgctagacaggcccctgagagcccttctacaatccccgttccaagccagcctcagaacagcacactcagacctggacctgccgctcctattgctctggtgcctgtgttttgtggcctgctggtggctaagagcctggtgctgtctgccctgcttgtttggtggggagacatctggtggaaaaccatgatggaactgcggagcctggacacccagaaggccacctgtcatctccagcaagtgaccgatctgccctggacctctgtgtcaagccccgtggaaagagagatcctgtaccacaccgtggctcggaccaagatcagcgacgacgatgatgagcacacccttagggccaagcgatctggatctggagcaacaaacttctcactactcaaacaagcaggtgacgtggaggagaatcccgggcctactagtatggactggatttggcgcatccttttccttgtcggcgctgctaccggcgcgcattccgggcccgaagtgcaactggttgaatccggtggcggcctggtgcaagcaggcggatctctcagacttagctgtgccgcctccggcagaaccttcacaatgggatggtttaggcaggctccagggaaagagagagagttcgtcgccgccatctctctgtctcccacactggcctactacgccgactctgtgaaaggccggttcaccatctccagagataatgccaagaacaccgtggtgctgcaaatgaactctctgaaacccgaggatacagccctgtactattgtgccgctgaccggaagtccgtgatgagcatcagacccgattactggggacagggcacacaagtcacagtgtcctctacgcgtatccagaaccctgatcctgccgtgtaccagctgcgggatagcaagagcagcgacaagagcgtgtgtctgttcaccgacttcgacagccagaccaacgtgtcccagagcaaggactccgacgtgtacatcaccgataagaccgtgctggacatgcggagcatggacttcaagagcaactccgccgtggcctggtccaacaagtccgatttcgcctgcgccaacgccttcaacaacagcattatccccgaggacacattcttcccaagccccgagagcagctgcggtaccaagtctgtgcgcttttacctggtcgtcagccctgccagtgcctccactcagacatcttggaccccaagggaccttgtgtcctctcagacacagacacagtcctgcgtgccaccaactgctggcgcaagacaggctccagagtctcccagcacaatccccgtcccttctcagccccagaactccacacttaggccaggaccagctgctccaatcgcactggtcccagtgttctgcggactgctggttgccaagtctctggtgctgagcgcactcctcgtttggtggggcgatatttggtggaaaacgatgatggaattgagatccctcgatacgcagaaagccacatgccaccttcagcaagtcacagacttgccttggaccagcgtcagctctcccgtggaacgggaaattctgtatcatacagtggcccgcaccaagatttccgacgatgacgacgagcacacactgcgcgccaagagaagcggatctggcgtgaagcagaccctgaatttcgacctgctgaagctggctggcgacgtggaatccaacccaggcccttctagaggccatatgaccgagtacaagcccacggtgcgcctcgccacccgcgacgacgtccccagggccgtacgcaccctcgccgccgcgttcgccgactaccccgccacgcgccacaccgtcgatccggaccgccacatcgagcgggtcaccgagctgcaagaactcttcctcacgcgcgtcgggctcgacatcggcaaggtgtgggtcgcggacgacggcgccgcggtggcggtctggaccacgccggagagcgtcgaagcgggggcggtgttcgccgagatcggcccgcgcatggccgagttgagcggttcccggctggccgcgcagcaacagatggaaggcctcctggcgccgcaccggcccaaggagcccgcgtggttcctggccaccgtcggcgtctcgcccgaccaccagggcaagggtctgggcagcgccgtcgtgctccccggagtggaggcggccgagcgcgccggggtgcccgccttcctggagacctccgcgccccgcaacctccccttctacgagcggctcggcttcaccgtcaccgccgacgtcgaggtgcccgaaggaccgcgcacctggtgcatgacccgcaagcccggtgcctga

SEQ ID NO: 1768 - DNA, 1656 bp, Artificial Sequence
  Synthetic Polynucleotide
atggccttaccagtgaccgccttgctcctgccgctggccttgctgctccacgccgccaggccggcatgcgaagtgcagctgcttgaaagtggcggcggactgattcagcctggcggatctctgagactgagctgtgccgccagcggcttcaccttttctagccacgccatgacctgggtccgacaggcacctggaaaagggcttgaatgggtgtccgccatcagcggctctggcgattacacacactacgccgacagcgtgaagggcagattcaccatcagcagagacaacagcaagaacaccgtgtacctccagatgaacagcctgagagccgaggacagcgccgtgtattattgcgccaaggatgaggatggcggcagcctgcttggacacagaggacaaggcaccctggtcaccgtttcttccggtaccggcggaggcggatctggcggcggaggtagcggtggcggaggatctgaattcggatctctcgagaagagcgtgcggttctacctggtggtgtctcctgcctctgccagcacacagacaagctggaccccacgcgatctggtgtctagccagactcagacccagagctgtgtgcctcctacagctggtgctagacaggcccctgagagcccttctacaatccccgttccaagccagcctcagaacagcacactcagacctggacctgccgctcctattgctctggtgcctgtgttttgtggcctgctggtggctaagagcctggtgctgtctgccctgcttgtttggtggggagacatctggtggaaaaccatgatggaactgcggagcctggacacccagaaggccacctgtcatctccagcaagtgaccgatctgccctggacctctgtgtcaagccccgtggaaagagagatcctgtaccacaccgtggctcggaccaagatcagcgacgacgatgatgagcacacccttagggccaagcgatctggatctggagcaacaaacttctcactactcaaacaagcaggtgacgtggaggagaatcccgggcctactagaggccatatgaccgagtacaagcccacggtgcgcctcgccacccgcgacgacgtccccagggccgtacgcaccctcgccgccgcgttcgccgactaccccgccacgcgccacaccgtcgatccggaccgccacatcgagcgggtcaccgagctgcaagaactcttcctcacgcgcgtcgggctcgacatcggcaaggtgtgggtcgcggacgacggcgccgcggtggcggtctggaccacgccggagagcgtcgaagcgggggcggtgttcgccgagatcggcccgcgcatggccgagttgagcggttcccggctggccgcgcagcaacagatggaaggcctcctggcgccgcaccggcccaaggagcccgcgtggttcctggccaccgtcggcgtctcgcccgaccaccagggcaagggtctgggcagcgccgtcgtgctccccggagtggaggcggccgagcgcgccggggtgcccgccttcctggagacctccgcgccccgcaacctccccttctacgagcggctcggcttcaccgtcaccgccgacgtcgaggtgcccgaaggaccgcgcacctggtgcatgacccgcaagcccggtgcctga

SEQ ID NO: 1769 - DNA, 2910 bp, Artificial Sequence
  Synthetic Polynucleotide
atggccttaccagtgaccgccttgctcctgccgctggccttgctgctccacgccgccaggccggacatccagatgacacagagccctagcagcctgtctgccagcgtgggagacagagtgaccatcacatgcaaggccagcgaccacatcaacaactggctggcctggtatcagcagaagcctggacaggcccctaagctgctgatctacggcgctaccacactggaaacaggcgtgcccagcagattttctggcagcggctctggcaccgactacaccctgacaatatccagcctccagcctgaggacttcgccacctactactgtcagcagagctggaacaccccttggacattcggccagggcaccaagctggaaatcaagagactcgagatcggctggctgttgctccaggcccctcggtgggtgttcaaggaggaagaccctattcacctgaggtgtcacagctggaagaacactgctctgcataaggtcacatatttacagaatggcaaaggcaggaagtattttcatcataattctgacttctacattccaaaagccacactcaaagacagcggctcctacttctgcagggggcttgttgggagtaaaaatgtgtcttcagagactgtgaacatcaccatcactcaaggtttggcagtgtcaaccatctcatcattctttccacctggctaccaagtgtccttctgcctggtcatggtgctgctgttcgccgtggataccggcctgtacttcagcgtcaagaccaacatccggtccagcaccagagactggaaggaccacaagttcaagtggcggaaggaccctcaggacaagagggccaagcgatctggatctggagcaacaaacttctcactactcaaacaagcaggtgacgtggaggagaatcccgggcctactagtatggactggatttggcgcatccttttccttgtcggcgctgctaccggcgcgcattccttcgaacaagttcagcttcaacagcctggcgctgagctggtcaaacctggcgcttctgtgaagatgagctgcaaagccagcggctacgccttcagcagctactggatcaactggatgaagcagaaacccggccagggactcgaatggatcggccaaatctatcccggcgacggcgacaccaactacaacggcaagttcaagggcagagccacactgaccgccgatacctctagcagcacagcctacatgcagctgagcagcctgaccagcgaagatagcgccgtgtacttctgtgcccggtccatcacaacagtcgtgggctgcgctatggactattggggccagggaacaagcgtgaccgtgtctagtacgcgtcaacaacagaccctgcctaaaccattcatctgggctgaaccccactttatggttccgaaagagaaacaagtcacgatttgttgccaagggaattacggggccgtcgagtatcagctccactttgagggctccctgtttgctgtggatcggcccaagccacctgaaagaatcaacaaagtccaattctatattcctgatatgaactcccgcatggcaggccagtattcatgtatctaccgcgtgggagaactttggagtgaaccctctaacctgctggacctcgtcgtgacagagatgtatgatacacccacactgtctgtgcaccctgggccagaagttatcagcggagaaaaagttaccttttattgccgcctcgataccgctacctctatgttcctcttgctgaaagagggccgcagctctcacgtgcagcgaggctacggaaaggtccaagctgagtttcctctcggccccgtgaccaccgctcacaggggcacatatagatgttttggctcttataacaatcatgcctggtcattcccatccgagcctgtgaaactgctggtcacaggcgatattgagaatacctctctggccccagaagatcctacattccccgccgacacatggggaacatatctgctgacaaccgaaaccgggctgcaaaaggaccatgctctgtgggatcataccgctcagaatctgcttcggatggggcttgcattcctggtcctggtggctcttgtctggtttctggtcgaggactggctgtcccggaagagaaccagagaaagagcttccagggccagcacctgggaaggcagacgcagactgaatactcagaccctgcgcgccaagagaagcggatctggcgtgaagcagaccctgaatttcgacctgctgaagctggctggcgacgtggaatccaacccaggcccttctagaggccatatgaccgagtacaagcccacggtgcgcctcgccacccgcgacgacgtccccagggccgtacgcaccctcgccgccgcgttcgccgactaccccgccacgcgccacaccgtcgatccggaccgccacatcgagcgggtcaccgagctgcaagaactcttcctcacgcgcgtcgggctcgacatcggcaaggtgtgggtcgcggacgacggcgccgcggtggcggtctggaccacgccggagagcgtcgaagcgggggcggtgttcgccgagatcggcccgcgcatggccgagttgagcggttcccggctggccgcgcagcaacagatggaaggcctcctggcgccgcaccggcccaaggagcccgcgtggttcctggccaccgtcggcgtctcgcccgaccaccagggcaagggtctgggcagcgccgtcgtgctccccggagtggaggcggccgagcgcgccggggtgcccgccttcctggagacctccgcgccccgcaacctccccttctacgagcggctcggcttcaccgtcaccgccgacgtcgaggtgcccgaaggaccgcgcacctggtgcatgacccgcaagcccggtgcctga

SEQ ID NO: 1770 - DNA, 3072 bp, Artificial Sequence
  Synthetic Polynucleotide
atggccttaccagtgaccgccttgctcctgccgctggccttgctgctccacgccgccaggccggcatgcgaagtgcagctgcttgaaagtggcggcggactgattcagcctggcggatctctgagactgagctgtgccgccagcggcttcaccttttctagccacgccatgacctgggtccgacaggcacctggaaaagggcttgaatgggtgtccgccatcagcggctctggcgattacacacactacgccgacagcgtgaagggcagattcaccatcagcagagacaacagcaagaacaccgtgtacctccagatgaacagcctgagagccgaggacagcgccgtgtattattgcgccaaggatgaggatggcggcagcctgcttggacacagaggacaaggcaccctggtcaccgtttcttccggtaccggcggaggcggatctggcggcggaggtagcggtggcggaggatctgaattcggatctctcgagatcggctggctgttgctccaggcccctcggtgggtgttcaaggaggaagaccctattcacctgaggtgtcacagctggaagaacactgctctgcataaggtcacatatttacagaatggcaaaggcaggaagtattttcatcataattctgacttctacattccaaaagccacactcaaagacagcggctcctacttctgcagggggcttgttgggagtaaaaatgtgtcttcagagactgtgaacatcaccatcactcaaggtttggcagtgtcaaccatctcatcattctttccacctggctaccaagtgtccttctgcctggtcatggtgctgctgttcgccgtggataccggcctgtacttcagcgtcaagaccaacatccggtccagcaccagagactggaaggaccacaagttcaagtggcggaaggaccctcaggacaagagggccaagcgatctggatctggagcaacaaacttctcactactcaaacaagcaggtgacgtggaggagaatcccgggcctactagtgccaccatggactggatttggcgcatccttttccttgtcggcgctgctaccggcgcccattccgggcccgaagtgcagctggttgaatctggcggaggactggttcaggctggcggatctctgagactgtcttgtgccgccagcggcagaacctttagcatgggctggtttagacaggcccctggcaaagagagagagttcgtcgccgccatcacatactctggcggcagcccttactacgccgactctgtgaagggcagattcaccatcagccgggacaacgccaagaacaccgtgtacctccagatgaacagcctgaagcctgaggacaccgccgtgtactactgcgccgccaatccaacatacggcagcgactggaacgccgagaattggggccagggaacccaagtgacagtgtctagcggatccggcggcggaggatctggcggaggcggatctgggggcggaggctctttcgaaggcagcacgcgtcaacaacagaccctgcctaaaccattcatctgggctgaaccccactttatggttccgaaagagaaacaagtcacgatttgttgccaagggaattacggggccgtcgagtatcagctccactttgagggctccctgtttgctgtggatcggcccaagccacctgaaagaatcaacaaagtccaattctatattcctgatatgaactcccgcatggcaggccagtattcatgtatctaccgcgtgggagaactttggagtgaaccctctaacctgctggacctcgtcgtgacagagatgtatgatacacccacactgtctgtgcaccctgggccagaagttatcagcggagaaaaagttaccttttattgccgcctcgataccgctacctctatgttcctcttgctgaaagagggccgcagctctcacgtgcagcgaggctacggaaaggtccaagctgagtttcctctcggccccgtgaccaccgctcacaggggcacatatagatgttttggctcttataacaatcatgcctggtcattcccatccgagcctgtgaaactgctggtcacaggcgatattgagaatacctctctggccccagaagatcctacattccccgccgacacatggggaacatatctgctgacaaccgaaaccgggctgcaaaaggaccatgctctgtgggatcataccgctcagaatctgcttcggatggggcttgcattcctggtcctggtggctcttgtctggtttctggtcgaggactggctgtcccggaagagaaccagagaaagagcttccagggccagcacctgggaaggcagacgcagactgaatactcagaccctgcgcgccaagagaagcggatctggcgtgaagcagaccctgaatttcgacctgctgaagctggctggcgacgtggaatccaacccaggcccttctagaggccatatgaccgagtacaagcccacggtgcgcctcgccacccgcgacgacgtccccagggccgtacgcaccctcgccgccgcgttcgccgactaccccgccacgcgccacaccgtcgatccggaccgccacatcgagcgggtcaccgagctgcaagaactcttcctcacgcgcgtcgggctcgacatcggcaaggtgtgggtcgcggacgacggcgccgcggtggcggtctggaccacgccggagagcgtcgaagcgggggcggtgttcgccgagatcggcccgcgcatggccgagttgagcggttcccggctggccgcgcagcaacagatggaaggcctcctggcgccgcaccggcccaaggagcccgcgtggttcctggccaccgtcggcgtctcgcccgaccaccagggcaagggtctgggcagcgccgtcgtgctccccggagtggaggcggccgagcgcgccggggtgcccgccttcctggagacctccgcgccccgcaacctccccttctacgagcggctcggcttcaccgtcaccgccgacgtcgaggtgcccgaaggaccgcgcacctggtgcatgacccgcaagcccggtgcctga

SEQ ID NO: 1771 - DNA, 3522 bp, Artificial Sequence
  Synthetic Polynucleotide
atggccttaccagtgaccgccttgctcctgccgctggccttgctgctccacgccgccaggccggacatccagatgacacagagccctagcagcctgtctgccagcgtgggagacagagtgaccatcacatgcaaggccagcgaccacatcaacaactggctggcctggtatcagcagaagcctggacaggcccctaagctgctgatctacggcgctaccacactggaaacaggcgtgcccagcagattttctggcagcggctctggcaccgactacaccctgacaatatccagcctccagcctgaggacttcgccacctactactgtcagcagagctggaacaccccttggacattcggccagggcaccaagctggaaatcaagagactcgagggacagcctaaggccaatcctaccgtgacactgttccctccaagcagcgaagaactccaggccaacaaggccacacttgtgtgcctgatctccgacttctaccctggggctgtgacagtggcttggaaggccgatggatctcctgtgaaagccggcgtggaaaccaccaagccatccaagcagagcaacaacaaatacgccgccagctcctacctgagcctgacacctgagcagtggaagtcccacagatcctacagctgccaagtgacccacgaaggcagcaccgtggaaaagacagtggcccctacagagtgcagcggatccatcggctggctgttgctccaggcccctcggtgggtgttcaaggaggaagaccctattcacctgaggtgtcacagctggaagaacactgctctgcataaggtcacatatttacagaatggcaaaggcaggaagtattttcatcataattctgacttctacattccaaaagccacactcaaagacagcggctcctacttctgcagggggcttgttgggagtaaaaatgtgtcttcagagactgtgaacatcaccatcactcaaggtttggcagtgtcaaccatctcatcattctttccacctggctaccaagtgtccttctgcctggtcatggtgctgctgttcgccgtggataccggcctgtacttcagcgtcaagaccaacatccggtccagcaccagagactggaaggaccacaagttcaagtggcggaaggaccctcaggacaagagggccaagcgatctggatctggagcaacaaacttctcactactcaaacaagcaggtgacgtggaggagaatcccgggcctactagtatggactggatttggcgcatccttttccttgtcggcgctgctaccggcgcgcattccttcgaacaagttcagcttcaacagcctggcgctgagctggtcaaacctggcgcttctgtgaagatgagctgcaaagccagcggctacgccttcagcagctactggatcaactggatgaagcagaaacccggccagggactcgaatggatcggccaaatctatcccggcgacggcgacaccaactacaacggcaagttcaagggcagagccacactgaccgccgatacctctagcagcacagcctacatgcagctgagcagcctgaccagcgaagatagcgccgtgtacttctgtgcccggtccatcacaacagtcgtgggctgcgctatggactattggggccagggaacaagcgtgaccgtgtctagtacgcgtgcctctacaaagggaccctccgtgtttcctctggctcccagcagcaagtctacaagcggaggaacagccgctctgggctgcctggtcaaggattactttcccgagcctgtgaccgtgtcctggaatagcggagcactgacaagcggcgtgcacacctttccagccgtgctgcaaagcagcggcctgtactctctgagcagcgtggtcacagtgcctagctctagcctgggcacccagacctacatctgcaatgtgaaccacaagcctagcaacaccaaggtggacaagagagtggaacccaagagctgtggtacccaacaacagaccctgcctaaaccattcatctgggctgaaccccactttatggttccgaaagagaaacaagtcacgatttgttgccaagggaattacggggccgtcgagtatcagctccactttgagggctccctgtttgctgtggatcggcccaagccacctgaaagaatcaacaaagtccaattctatattcctgatatgaactcccgcatggcaggccagtattcatgtatctaccgcgtgggagaactttggagtgaaccctctaacctgctggacctcgtcgtgacagagatgtatgatacacccacactgtctgtgcaccctgggccagaagttatcagcggagaaaaagttaccttttattgccgcctcgataccgctacctctatgttcctcttgctgaaagagggccgcagctctcacgtgcagcgaggctacggaaaggtccaagctgagtttcctctcggccccgtgaccaccgctcacaggggcacatatagatgttttggctcttataacaatcatgcctggtcattcccatccgagcctgtgaaactgctggtcacaggcgatattgagaatacctctctggccccagaagatcctacattccccgccgacacatggggaacatatctgctgacaaccgaaaccgggctgcaaaaggaccatgctctgtgggatcataccgctcagaatctgcttcggatggggcttgcattcctggtcctggtggctcttgtctggtttctggtcgaggactggctgtcccggaagagaaccagagaaagagcttccagggccagcacctgggaaggcagacgcagactgaatactcagaccctgcgcgccaagagaagcggatctggcgtgaagcagaccctgaatttcgacctgctgaagctggctggcgacgtggaatccaacccaggcccttctagaggcgggatccacaccatggctacctacgaggtgctgtgcgaggtggcaagaaagctgggcaccgacgacagagaagtggtgctgttcctgctgaacgtgttcatccctcagcctacactggcccagctgatcggtgcactgagagccctgaaagaggaaggccggctgacctttcctctgctggccgaatgcctgttcagagccggaagaagggatctgctgcgggacctgctgcatctggaccccagatttctggaaagacacctggccggcaccatgagctacttcagcccttaccagctgaccgtgctgcacgttgacggcgaactgtgcgccagagatattcggagcctgatcttcctgagcaaggacaccatcggcagccggtctacccctcagacatttctgcactgggtgtactgcatggaaaacctggacctgctcggccccacagatgtggatgccctgatgtccatgctgagaagcctgagcagagtggacctccagagacaggtgcagacactgatgggactgcacctgagcggacctagccacagccagcactacagacacacccct

SEQ ID NO: 1772 - DNA, 3681 bp, Artificial Sequence
  Synthetic Polynucleotide
atggccttaccagtgaccgccttgctcctgccgctggccttgctgctccacgccgccaggccggacatccagatgacacagagccctagcagcctgtctgccagcgtgggagacagagtgaccatcacatgcaaggccagcgaccacatcaacaactggctggcctggtatcagcagaagcctggacaggcccctaagctgctgatctacggcgctaccacactggaaacaggcgtgcccagcagattttctggcagcggctctggcaccgactacaccctgacaatatccagcctccagcctgaggacttcgccacctactactgtcagcagagctggaacaccccttggacattcggccagggcaccaagctggaaatcaagagactcgagggacagcctaaggccaatcctaccgtgacactgttccctccaagcagcgaagaactccaggccaacaaggccacacttgtgtgcctgatctccgacttctaccctggggctgtgacagtggcttggaaggccgatggatctcctgtgaaagccggcgtggaaaccaccaagccatccaagcagagcaacaacaaatacgccgccagctcctacctgagcctgacacctgagcagtggaagtcccacagatcctacagctgccaagtgacccacgaaggcagcaccgtggaaaagacagtggcccctacagagtgcagcggatccatcggctggctgttgctccaggcccctcggtgggtgttcaaggaggaagaccctattcacctgaggtgtcacagctggaagaacactgctctgcataaggtcacatatttacagaatggcaaaggcaggaagtattttcatcataattctgacttctacattccaaaagccacactcaaagacagcggctcctacttctgcagggggcttgttgggagtaaaaatgtgtcttcagagactgtgaacatcaccatcactcaaggtttggcagtgtcaaccatctcatcattctttccacctggctaccaagtgtccttctgcctggtcatggtgctgctgttcgccgtggataccggcctgtacttcagcgtcaagaccaacatccggtccagcaccagagactggaaggaccacaagttcaagtggcggaaggaccctcaggacaagagggccaagcgatctggatctggagcaacaaacttctcactactcaaacaagcaggtgacgtggaggagaatcccgggcctactagtatggactggatttggcgcatccttttccttgtcggcgctgctaccggcgcgcattccttcgaacaagttcagcttcaacagcctggcgctgagctggtcaaacctggcgcttctgtgaagatgagctgcaaagccagcggctacgccttcagcagctactggatcaactggatgaagcagaaacccggccagggactcgaatggatcggccaaatctatcccggcgacggcgacaccaactacaacggcaagttcaagggcagagccacactgaccgccgatacctctagcagcacagcctacatgcagctgagcagcctgaccagcgaagatagcgccgtgtacttctgtgcccggtccatcacaacagtcgtgggctgcgctatggactattggggccagggaacaagcgtgaccgtgtctagtacgcgtgcctctacaaagggaccctccgtgtttcctctggctcccagcagcaagtctacaagcggaggaacagccgctctgggctgcctggtcaaggattactttcccgagcctgtgaccgtgtcctggaatagcggagcactgacaagcggcgtgcacacctttccagccgtgctgcaaagcagcggcctgtactctctgagcagcgtggtcacagtgcctagctctagcctgggcacccagacctacatctgcaatgtgaaccacaagcctagcaacaccaaggtggacaagagagtggaacccaagagctgtggtacccaacaacagaccctgcctaaaccattcatctgggctgaaccccactttatggttccgaaagagaaacaagtcacgatttgttgccaagggaattacggggccgtcgagtatcagctccactttgagggctccctgtttgctgtggatcggcccaagccacctgaaagaatcaacaaagtccaattctatattcctgatatgaactcccgcatggcaggccagtattcatgtatctaccgcgtgggagaactttggagtgaaccctctaacctgctggacctcgtcgtgacagagatgtatgatacacccacactgtctgtgcaccctgggccagaagttatcagcggagaaaaagttaccttttattgccgcctcgataccgctacctctatgttcctcttgctgaaagagggccgcagctctcacgtgcagcgaggctacggaaaggtccaagctgagtttcctctcggccccgtgaccaccgctcacaggggcacatatagatgttttggctcttataacaatcatgcctggtcattcccatccgagcctgtgaaactgctggtcacaggcgatattgagaatacctctctggccccagaagatcctacattccccgccgacacatggggaacatatctgctgacaaccgaaaccgggctgcaaaaggaccatgctctgtgggatcataccgctcagaatctgcttcggatggggcttgcattcctggtcctggtggctcttgtctggtttctggtcgaggactggctgtcccggaagagaaccagagaaagagcttccagggccagcacctgggaaggcagacgcagactgaatactcagaccctgcgcgccaagagaagcggatctggcgtgaagcagaccctgaatttcgacctgctgaagctggctggcgacgtggaatccaacccaggcccttctagaggcgggatccacaccatgtccgactccaaggaggtccctagccttccatttttgcgacacttgctcgaagagttggacagccatgaggacagcttgctgctgtttctgtgtcacgacgcggccccgggctgcacgacggtcacgcaagctttgtgctcgcttagccaacagcgcaagctgaccctcgcggctctggtcgagatgctctacgtgctgcagcgtatggatcttctcaagagccgcttcgggctcagcaaggagggggccgagcaattgctgggcacaagctttctcacgcgctaccgcaagctcatggtttgcgtgggtgaggagctcgactcgagcgagctacgcgctctacgcttgttcgcgtgcaacctgaatccgagcctgagcacggcgctttctgagagcagccgctttgtcgagcttgtactcgcgcttgaaaacgtaggactcgtctcgccatcgagtgtttccgtgcttgcggacatgttgcgcactcttcggcgcctcgatttgtgccagcagcttgttgagtacgaacaacaagagcaagccaggtaccgttactgttacgcggcctcgccctcattgccagttcgtacgttacgtcgggggcacggcgcgagtgaacacgagcagctgtgcatgcccgtgcaagaatcctctgacagccccgagctgctgcgcacgcccgtacaagaatcctccagcgacagccccgagcaaacgact

SEQ ID NO: 1773 - DNA, 3549 bp, Artificial Sequence
  Synthetic Polynucleotide
atggccttaccagtgaccgccttgctcctgccgctggccttgctgctccacgccgccaggccggacatccagatgacacagagccctagcagcctgtctgccagcgtgggagacagagtgaccatcacatgcaaggccagcgaccacatcaacaactggctggcctggtatcagcagaagcctggacaggcccctaagctgctgatctacggcgctaccacactggaaacaggcgtgcccagcagattttctggcagcggctctggcaccgactacaccctgacaatatccagcctccagcctgaggacttcgccacctactactgtcagcagagctggaacaccccttggacattcggccagggcaccaagctggaaatcaagagactcgagggacagcctaaggccaatcctaccgtgacactgttccctccaagcagcgaagaactccaggccaacaaggccacacttgtgtgcctgatctccgacttctaccctggggctgtgacagtggcttggaaggccgatggatctcctgtgaaagccggcgtggaaaccaccaagccatccaagcagagcaacaacaaatacgccgccagctcctacctgagcctgacacctgagcagtggaagtcccacagatcctacagctgccaagtgacccacgaaggcagcaccgtggaaaagacagtggcccctacagagtgcagcggatccatcggctggctgttgctccaggcccctcggtgggtgttcaaggaggaagaccctattcacctgaggtgtcacagctggaagaacactgctctgcataaggtcacatatttacagaatggcaaaggcaggaagtattttcatcataattctgacttctacattccaaaagccacactcaaagacagcggctcctacttctgcagggggcttgttgggagtaaaaatgtgtcttcagagactgtgaacatcaccatcactcaaggtttggcagtgtcaaccatctcatcattctttccacctggctaccaagtgtccttctgcctggtcatggtgctgctgttcgccgtggataccggcctgtacttcagcgtcaagaccaacatccggtccagcaccagagactggaaggaccacaagttcaagtggcggaaggaccctcaggacaagagggccaagcgatctggatctggagcaacaaacttctcactactcaaacaagcaggtgacgtggaggagaatcccgggcctactagtatggactggatttggcgcatccttttccttgtcggcgctgctaccggcgcgcattccttcgaacaagttcagcttcaacagcctggcgctgagctggtcaaacctggcgcttctgtgaagatgagctgcaaagccagcggctacgccttcagcagctactggatcaactggatgaagcagaaacccggccagggactcgaatggatcggccaaatctatcccggcgacggcgacaccaactacaacggcaagttcaagggcagagccacactgaccgccgatacctctagcagcacagcctacatgcagctgagcagcctgaccagcgaagatagcgccgtgtacttctgtgcccggtccatcacaacagtcgtgggctgcgctatggactattggggccagggaacaagcgtgaccgtgtctagtacgcgtgcctctacaaagggaccctccgtgtttcctctggctcccagcagcaagtctacaagcggaggaacagccgctctgggctgcctggtcaaggattactttcccgagcctgtgaccgtgtcctggaatagcggagcactgacaagcggcgtgcacacctttccagccgtgctgcaaagcagcggcctgtactctctgagcagcgtggtcacagtgcctagctctagcctgggcacccagacctacatctgcaatgtgaaccacaagcctagcaacaccaaggtggacaagagagtggaacccaagagctgtggtacccaacaacagaccctgcctaaaccattcatctgggctgaaccccactttatggttccgaaagagaaacaagtcacgatttgttgccaagggaattacggggccgtcgagtatcagctccactttgagggctccctgtttgctgtggatcggcccaagccacctgaaagaatcaacaaagtccaattctatattcctgatatgaactcccgcatggcaggccagtattcatgtatctaccgcgtgggagaactttggagtgaaccctctaacctgctggacctcgtcgtgacagagatgtatgatacacccacactgtctgtgcaccctgggccagaagttatcagcggagaaaaagttaccttttattgccgcctcgataccgctacctctatgttcctcttgctgaaagagggccgcagctctcacgtgcagcgaggctacggaaaggtccaagctgagtttcctctcggccccgtgaccaccgctcacaggggcacatatagatgttttggctcttataacaatcatgcctggtcattcccatccgagcctgtgaaactgctggtcacaggcgatattgagaatacctctctggccccagaagatcctacattccccgccgacacatggggaacatatctgctgacaaccgaaaccgggctgcaaaaggaccatgctctgtgggatcataccgctcagaatctgcttcggatggggcttgcattcctggtcctggtggctcttgtctggtttctggtcgaggactggctgtcccggaagagaaccagagaaagagcttccagggccagcacctgggaaggcagacgcagactgaatactcagaccctgcgcgccaagagaagcggatctggcgtgaagcagaccctgaatttcgacctgctgaagctggctggcgacgtggaatccaacccaggcccttctagaggccatatgaccgagtacaagcccacggtgcgcctcgccacccgcgacgacgtccccagggccgtacgcaccctcgccgccgcgttcgccgactaccccgccacgcgccacaccgtcgatccggaccgccacatcgagcgggtcaccgagctgcaagaactcttcctcacgcgcgtcgggctcgacatcggcaaggtgtgggtcgcggacgacggcgccgcggtggcggtctggaccacgccggagagcgtcgaagcgggggcggtgttcgccgagatcggcccgcgcatggccgagttgagcggttcccggctggccgcgcagcaacagatggaaggcctcctggcgccgcaccggcccaaggagcccgcgtggttcctggccaccgtcggcgtctcgcccgaccaccagggcaagggtctgggcagcgccgtcgtgctccccggagtggaggcggccgagcgcgccggggtgcccgccttcctggagacctccgcgccccgcaacctccccttctacgagcggctcggcttcaccgtcaccgccgacgtcgaggtgcccgaaggaccgcgcacctggtgcatgacccgcaagcccggtgcctga

SEQ ID NO: 1774 - DNA, 3960 bp, Artificial Sequence
  Synthetic Polynucleotide
atggccttaccagtgaccgccttgctcctgccgctggccttgctgctccacgccgccaggccggaagtgcagctggttgaatctggcggaggactggttcaggctggcggatctctgagactgtcttgtgccgccagcggcagaacctttagcatgggctggtttagacaggcccctggcaaagagagagagttcgtcgccgccatcacatactctggcggcagcccttactacgccgactctgtgaagggcagattcaccatcagccgggacaacgccaagaacaccgtgtacctccagatgaacagcctgaagcctgaggacaccgccgtgtactactgcgccgccaatccaacatacggcagcgactggaacgccgagaattggggccagggaacccaagtgacagtgtctagcggtaccggcggaggcggatctggcggcggaggtagcggtggcggaggatctgaattcgacatccagatgacacagagccctagcagcctgtctgccagcgtgggagacagagtgaccatcacatgcaaggccagcgaccacatcaacaactggctggcctggtatcagcagaagcctggacaggcccctaagctgctgatctacggcgctaccacactggaaacaggcgtgcccagcagattttctggcagcggctctggcaccgactacaccctgacaatatccagcctccagcctgaggacttcgccacctactactgtcagcagagctggaacaccccttggacattcggccagggcaccaagctggaaatcaagagactcgagggacagcctaaggccaatcctaccgtgacactgttccctccaagcagcgaagaactccaggccaacaaggccacacttgtgtgcctgatctccgacttctaccctggggctgtgacagtggcttggaaggccgatggatctcctgtgaaagccggcgtggaaaccaccaagccatccaagcagagcaacaacaaatacgccgccagctcctacctgagcctgacacctgagcagtggaagtcccacagatcctacagctgccaagtgacccacgaaggcagcaccgtggaaaagacagtggcccctacagagtgcagcggatccatcggctggctgttgctccaggcccctcggtgggtgttcaaggaggaagaccctattcacctgaggtgtcacagctggaagaacactgctctgcataaggtcacatatttacagaatggcaaaggcaggaagtattttcatcataattctgacttctacattccaaaagccacactcaaagacagcggctcctacttctgcagggggcttgttgggagtaaaaatgtgtcttcagagactgtgaacatcaccatcactcaaggtttggcagtgtcaaccatctcatcattctttccacctggctaccaagtgtccttctgcctggtcatggtgctgctgttcgccgtggataccggcctgtacttcagcgtcaagaccaacatccggtccagcaccagagactggaaggaccacaagttcaagtggcggaaggaccctcaggacaagagggccaagcgatctggatctggagcaacaaacttctcactactcaaacaagcaggtgacgtggaggagaatcccgggcctactagtatggactggatttggcgcatccttttccttgtcggcgctgctaccggcgcgcattccttcgaacaagttcagcttcaacagcctggcgctgagctggtcaaacctggcgcttctgtgaagatgagctgcaaagccagcggctacgccttcagcagctactggatcaactggatgaagcagaaacccggccagggactcgaatggatcggccaaatctatcccggcgacggcgacaccaactacaacggcaagttcaagggcagagccacactgaccgccgatacctctagcagcacagcctacatgcagctgagcagcctgaccagcgaagatagcgccgtgtacttctgtgcccggtccatcacaacagtcgtgggctgcgctatggactattggggccagggaacaagcgtgaccgtgtctagtacgcgtgcctctacaaagggaccctccgtgtttcctctggctcccagcagcaagtctacaagcggaggaacagccgctctgggctgcctggtcaaggattactttcccgagcctgtgaccgtgtcctggaatagcggagcactgacaagcggcgtgcacacctttccagccgtgctgcaaagcagcggcctgtactctctgagcagcgtggtcacagtgcctagctctagcctgggcacccagacctacatctgcaatgtgaaccacaagcctagcaacaccaaggtggacaagagagtggaacccaagagctgtggtacccaacaacagaccctgcctaaaccattcatctgggctgaaccccactttatggttccgaaagagaaacaagtcacgatttgttgccaagggaattacggggccgtcgagtatcagctccactttgagggctccctgtttgctgtggatcggcccaagccacctgaaagaatcaacaaagtccaattctatattcctgatatgaactcccgcatggcaggccagtattcatgtatctaccgcgtgggagaactttggagtgaaccctctaacctgctggacctcgtcgtgacagagatgtatgatacacccacactgtctgtgcaccctgggccagaagttatcagcggagaaaaagttaccttttattgccgcctcgataccgctacctctatgttcctcttgctgaaagagggccgcagctctcacgtgcagcgaggctacggaaaggtccaagctgagtttcctctcggccccgtgaccaccgctcacaggggcacatatagatgttttggctcttataacaatcatgcctggtcattcccatccgagcctgtgaaactgctggtcacaggcgatattgagaatacctctctggccccagaagatcctacattccccgccgacacatggggaacatatctgctgacaaccgaaaccgggctgcaaaaggaccatgctctgtgggatcataccgctcagaatctgcttcggatggggcttgcattcctggtcctggtggctcttgtctggtttctggtcgaggactggctgtcccggaagagaaccagagaaagagcttccagggccagcacctgggaaggcagacgcagactgaatactcagaccctgcgcgccaagagaagcggatctggcgtgaagcagaccctgaatttcgacctgctgaagctggctggcgacgtggaatccaacccaggcccttctagaggccatatgaccgagtacaagcccacggtgcgcctcgccacccgcgacgacgtccccagggccgtacgcaccctcgccgccgcgttcgccgactaccccgccacgcgccacaccgtcgatccggaccgccacatcgagcgggtcaccgagctgcaagaactcttcctcacgcgcgtcgggctcgacatcggcaaggtgtgggtcgcggacgacggcgccgcggtggcggtctggaccacgccggagagcgtcgaagcgggggcggtgttcgccgagatcggcccgcgcatggccgagttgagcggttcccggctggccgcgcagcaacagatggaaggcctcctggcgccgcaccggcccaaggagcccgcgtggttcctggccaccgtcggcgtctcgcccgaccaccagggcaagggtctgggcagcgccgtcgtgctccccggagtggaggcggccgagcgcgccggggtgcccgccttcctggagacctccgcgccccgcaacctccccttctacgagcggctcggcttcaccgtcaccgccgacgtcgaggtgcccgaaggaccgcgcacctggtgcatgacccgcaagcccggtgcctga

SEQ ID NO: 1775 - DNA, 4371 bp, Artificial Sequence
  Synthetic Polynucleotide
atggccttaccagtgaccgccttgctcctgccgctggccttgctgctccacgccgccaggccggaagtgcagctggttgaatctggcggaggactggttcaggctggcggatctctgagactgtcttgtgccgccagcggcagaacctttagcatgggctggtttagacaggcccctggcaaagagagagagttcgtcgccgccatcacatactctggcggcagcccttactacgccgactctgtgaagggcagattcaccatcagccgggacaacgccaagaacaccgtgtacctccagatgaacagcctgaagcctgaggacaccgccgtgtactactgcgccgccaatccaacatacggcagcgactggaacgccgagaattggggccagggaacccaagtgacagtgtctagcggtaccggcggaggcggatctggcggcggaggtagcggtggcggaggatctgaattcgacatccagatgacacagagccctagcagcctgtctgccagcgtgggagacagagtgaccatcacatgcaaggccagcgaccacatcaacaactggctggcctggtatcagcagaagcctggacaggcccctaagctgctgatctacggcgctaccacactggaaacaggcgtgcccagcagattttctggcagcggctctggcaccgactacaccctgacaatatccagcctccagcctgaggacttcgccacctactactgtcagcagagctggaacaccccttggacattcggccagggcaccaagctggaaatcaagagactcgagggacagcctaaggccaatcctaccgtgacactgttccctccaagcagcgaagaactccaggccaacaaggccacacttgtgtgcctgatctccgacttctaccctggggctgtgacagtggcttggaaggccgatggatctcctgtgaaagccggcgtggaaaccaccaagccatccaagcagagcaacaacaaatacgccgccagctcctacctgagcctgacacctgagcagtggaagtcccacagatcctacagctgccaagtgacccacgaaggcagcaccgtggaaaagacagtggcccctacagagtgcagcggatccatcggctggctgttgctccaggcccctcggtgggtgttcaaggaggaagaccctattcacctgaggtgtcacagctggaagaacactgctctgcataaggtcacatatttacagaatggcaaaggcaggaagtattttcatcataattctgacttctacattccaaaagccacactcaaagacagcggctcctacttctgcagggggcttgttgggagtaaaaatgtgtcttcagagactgtgaacatcaccatcactcaaggtttggcagtgtcaaccatctcatcattctttccacctggctaccaagtgtccttctgcctggtcatggtgctgctgttcgccgtggataccggcctgtacttcagcgtcaagaccaacatccggtccagcaccagagactggaaggaccacaagttcaagtggcggaaggaccctcaggacaagagggccaagcgatctggatctggagcaacaaacttctcactactcaaacaagcaggtgacgtggaggagaatcccgggcctactagtatggactggatttggcgcatccttttccttgtcggcgctgctaccggcgcgcattccgggcccgaagtgcaactggttgaatccggtggcggcctggtgcaagcaggcggatctctcagacttagctgtgccgcctccggcagaaccttcacaatgggatggtttaggcaggctccagggaaagagagagagttcgtcgccgccatctctctgtctcccacactggcctactacgccgactctgtgaaaggccggttcaccatctccagagataatgccaagaacaccgtggtgctgcaaatgaactctctgaaacccgaggatacagccctgtactattgtgccgctgaccggaagtccgtgatgagcatcagacccgattactggggacagggcacacaagtcacagtgtcctctggatccggcggcggaggatctggcggaggcggatctgggggcggaggctctttcgaacaagttcagcttcaacagcctggcgctgagctggtcaaacctggcgcttctgtgaagatgagctgcaaagccagcggctacgccttcagcagctactggatcaactggatgaagcagaaacccggccagggactcgaatggatcggccaaatctatcccggcgacggcgacaccaactacaacggcaagttcaagggcagagccacactgaccgccgatacctctagcagcacagcctacatgcagctgagcagcctgaccagcgaagatagcgccgtgtacttctgtgcccggtccatcacaacagtcgtgggctgcgctatggactattggggccagggaacaagcgtgaccgtgtctagtacgcgtgcctctacaaagggaccctccgtgtttcctctggctcccagcagcaagtctacaagcggaggaacagccgctctgggctgcctggtcaaggattactttcccgagcctgtgaccgtgtcctggaatagcggagcactgacaagcggcgtgcacacctttccagccgtgctgcaaagcagcggcctgtactctctgagcagcgtggtcacagtgcctagctctagcctgggcacccagacctacatctgcaatgtgaaccacaagcctagcaacaccaaggtggacaagagagtggaacccaagagctgtggtacccaacaacagaccctgcctaaaccattcatctgggctgaaccccactttatggttccgaaagagaaacaagtcacgatttgttgccaagggaattacggggccgtcgagtatcagctccactttgagggctccctgtttgctgtggatcggcccaagccacctgaaagaatcaacaaagtccaattctatattcctgatatgaactcccgcatggcaggccagtattcatgtatctaccgcgtgggagaactttggagtgaaccctctaacctgctggacctcgtcgtgacagagatgtatgatacacccacactgtctgtgcaccctgggccagaagttatcagcggagaaaaagttaccttttattgccgcctcgataccgctacctctatgttcctcttgctgaaagagggccgcagctctcacgtgcagcgaggctacggaaaggtccaagctgagtttcctctcggccccgtgaccaccgctcacaggggcacatatagatgttttggctcttataacaatcatgcctggtcattcccatccgagcctgtgaaactgctggtcacaggcgatattgagaatacctctctggccccagaagatcctacattccccgccgacacatggggaacatatctgctgacaaccgaaaccgggctgcaaaaggaccatgctctgtgggatcataccgctcagaatctgcttcggatggggcttgcattcctggtcctggtggctcttgtctggtttctggtcgaggactggctgtcccggaagagaaccagagaaagagcttccagggccagcacctgggaaggcagacgcagactgaatactcagaccctgcgcgccaagagaagcggatctggcgtgaagcagaccctgaatttcgacctgctgaagctggctggcgacgtggaatccaacccaggcccttctagaggccatatgaccgagtacaagcccacggtgcgcctcgccacccgcgacgacgtccccagggccgtacgcaccctcgccgccgcgttcgccgactaccccgccacgcgccacaccgtcgatccggaccgccacatcgagcgggtcaccgagctgcaagaactcttcctcacgcgcgtcgggctcgacatcggcaaggtgtgggtcgcggacgacggcgccgcggtggcggtctggaccacgccggagagcgtcgaagcgggggcggtgttcgccgagatcggcccgcgcatggccgagttgagcggttcccggctggccgcgcagcaacagatggaaggcctcctggcgccgcaccggcccaaggagcccgcgtggttcctggccaccgtcggcgtctcgcccgaccaccagggcaagggtctgggcagcgccgtcgtgctccccggagtggaggcggccgagcgcgccggggtgcccgccttcctggagacctccgcgccccgcaacctccccttctacgagcggctcggcttcaccgtcaccgccgacgtcgaggtgcccgaaggaccgcgcacctggtgcatgacccgcaagcccggtgcctga

SEQ ID NO: 1776 - DNA, 3570 bp, Artificial Sequence
  Synthetic Polynucleotide
atggccttaccagtgaccgccttgctcctgccgctggccttgctgctccacgccgccaggccggaagtgcagctggttgaatctggcggaggactggttcaggctggcggatctctgagactgtcttgtgccgccagcggcagaacctttagcatgggctggtttagacaggcccctggcaaagagagagagttcgtcgccgccatcacatactctggcggcagcccttactacgccgactctgtgaagggcagattcaccatcagccgggacaacgccaagaacaccgtgtacctccagatgaacagcctgaagcctgaggacaccgccgtgtactactgcgccgccaatccaacatacggcagcgactggaacgccgagaattggggccagggaacccaagtgacagtgtctagcctcgagggacagcctaaggccaatcctaccgtgacactgttccctccaagcagcgaagaactccaggccaacaaggccacacttgtgtgcctgatctccgacttctaccctggggctgtgacagtggcttggaaggccgatggatctcctgtgaaagccggcgtggaaaccaccaagccatccaagcagagcaacaacaaatacgccgccagctcctacctgagcctgacacctgagcagtggaagtcccacagatcctacagctgccaagtgacccacgaaggcagcaccgtggaaaagacagtggcccctacagagtgcagcggatccatcggctggctgttgctccaggcccctcggtgggtgttcaaggaggaagaccctattcacctgaggtgtcacagctggaagaacactgctctgcataaggtcacatatttacagaatggcaaaggcaggaagtattttcatcataattctgacttctacattccaaaagccacactcaaagacagcggctcctacttctgcagggggcttgttgggagtaaaaatgtgtcttcagagactgtgaacatcaccatcactcaaggtttggcagtgtcaaccatctcatcattctttccacctggctaccaagtgtccttctgcctggtcatggtgctgctgttcgccgtggataccggcctgtacttcagcgtcaagaccaacatccggtccagcaccagagactggaaggaccacaagttcaagtggcggaaggaccctcaggacaagagggccaagcgatctggatctggagcaacaaacttctcactactcaaacaagcaggtgacgtggaggagaatcccgggcctactagtatggactggatttggcgcatccttttccttgtcggcgctgctaccggcgcgcattccgggcccgaagtgcaactggttgaatccggtggcggcctggtgcaagcaggcggatctctcagacttagctgtgccgcctccggcagaaccttcacaatgggatggtttaggcaggctccagggaaagagagagagttcgtcgccgccatctctctgtctcccacactggcctactacgccgactctgtgaaaggccggttcaccatctccagagataatgccaagaacaccgtggtgctgcaaatgaactctctgaaacccgaggatacagccctgtactattgtgccgctgaccggaagtccgtgatgagcatcagacccgattactggggacagggcacacaagtcacagtgtcctctacgcgtgcctctacaaagggaccctccgtgtttcctctggctcccagcagcaagtctacaagcggaggaacagccgctctgggctgcctggtcaaggattactttcccgagcctgtgaccgtgtcctggaatagcggagcactgacaagcggcgtgcacacctttccagccgtgctgcaaagcagcggcctgtactctctgagcagcgtggtcacagtgcctagctctagcctgggcacccagacctacatctgcaatgtgaaccacaagcctagcaacaccaaggtggacaagagagtggaacccaagagctgtggtacccaacaacagaccctgcctaaaccattcatctgggctgaaccccactttatggttccgaaagagaaacaagtcacgatttgttgccaagggaattacggggccgtcgagtatcagctccactttgagggctccctgtttgctgtggatcggcccaagccacctgaaagaatcaacaaagtccaattctatattcctgatatgaactcccgcatggcaggccagtattcatgtatctaccgcgtgggagaactttggagtgaaccctctaacctgctggacctcgtcgtgacagagatgtatgatacacccacactgtctgtgcaccctgggccagaagttatcagcggagaaaaagttaccttttattgccgcctcgataccgctacctctatgttcctcttgctgaaagagggccgcagctctcacgtgcagcgaggctacggaaaggtccaagctgagtttcctctcggccccgtgaccaccgctcacaggggcacatatagatgttttggctcttataacaatcatgcctggtcattcccatccgagcctgtgaaactgctggtcacaggcgatattgagaatacctctctggccccagaagatcctacattccccgccgacacatggggaacatatctgctgacaaccgaaaccgggctgcaaaaggaccatgctctgtgggatcataccgctcagaatctgcttcggatggggcttgcattcctggtcctggtggctcttgtctggtttctggtcgaggactggctgtcccggaagagaaccagagaaagagcttccagggccagcacctgggaaggcagacgcagactgaatactcagaccctgcgcgccaagagaagcggatctggcgtgaagcagaccctgaatttcgacctgctgaagctggctggcgacgtggaatccaacccaggcccttctagaggccatatgaccgagtacaagcccacggtgcgcctcgccacccgcgacgacgtccccagggccgtacgcaccctcgccgccgcgttcgccgactaccccgccacgcgccacaccgtcgatccggaccgccacatcgagcgggtcaccgagctgcaagaactcttcctcacgcgcgtcgggctcgacatcggcaaggtgtgggtcgcggacgacggcgccgcggtggcggtctggaccacgccggagagcgtcgaagcgggggcggtgttcgccgagatcggcccgcgcatggccgagttgagcggttcccggctggccgcgcagcaacagatggaaggcctcctggcgccgcaccggcccaaggagcccgcgtggttcctggccaccgtcggcgtctcgcccgaccaccagggcaagggtctgggcagcgccgtcgtgctccccggagtggaggcggccgagcgcgccggggtgcccgccttcctggagacctccgcgccccgcaacctccccttctacgagcggctcggcttcaccgtcaccgccgacgtcgaggtgcccgaaggaccgcgcacctggtgcatgacccgcaagcccggtgcctga

SEQ ID NO: 1777 - DNA, 3594 bp, Artificial Sequence
  Synthetic Polynucleotide
atggccttaccagtgaccgccttgctcctgccgctggccttgctgctccacgccgccaggccggacatccagatgacacagagccctagcagcctgtctgccagcgtgggagacagagtgaccatcacatgcaaggccagcgaccacatcaacaactggctggcctggtatcagcagaagcctggacaggcccctaagctgctgatctacggcgctaccacactggaaacaggcgtgcccagcagattttctggcagcggctctggcaccgactacaccctgacaatatccagcctccagcctgaggacttcgccacctactactgtcagcagagctggaacaccccttggacattcggccagggcaccaagctggaaatcaagagactcgaggacctgaagaacgtgttcccacctgaggtggccgtgttcgagcctagcgaggccgagatcagccacacccagaaagccaccctcgtgtgcctggctaccggcttctaccccgaccatgtggaactgtcttggtgggtcaacggcaaagaggtgcacagcggcgtgtctaccgacccccagccactgaaagaacagcccgccctgaacgacagccggtactgcctgagcagcagactgagagtgtccgccaccttctggcagaacccccggaaccacttcagatgccaggtgcagttctacggcctgagcgagaacgacgagtggacccaggacagagccaagcccgtgacccagatcgtgtctgccgaagcctggggcagagccgattgcggatccatcggctggctgttgctccaggcccctcggtgggtgttcaaggaggaagaccctattcacctgaggtgtcacagctggaagaacactgctctgcataaggtcacatatttacagaatggcaaaggcaggaagtattttcatcataattctgacttctacattccaaaagccacactcaaagacagcggctcctacttctgcagggggcttgttgggagtaaaaatgtgtcttcagagactgtgaacatcaccatcactcaaggtttggcagtgtcaaccatctcatcattctttccacctggctaccaagtgtccttctgcctggtcatggtgctgctgttcgccgtggataccggcctgtacttcagcgtcaagaccaacatccggtccagcaccagagactggaaggaccacaagttcaagtggcggaaggaccctcaggacaagagggccaagcgatctggatctggagcaacaaacttctcactactcaaacaagcaggtgacgtggaggagaatcccgggcctactagtatggactggatttggcgcatccttttccttgtcggcgctgctaccggcgcgcattccttcgaacaagttcagcttcaacagcctggcgctgagctggtcaaacctggcgcttctgtgaagatgagctgcaaagccagcggctacgccttcagcagctactggatcaactggatgaagcagaaacccggccagggactcgaatggatcggccaaatctatcccggcgacggcgacaccaactacaacggcaagttcaagggcagagccacactgaccgccgatacctctagcagcacagcctacatgcagctgagcagcctgaccagcgaagatagcgccgtgtacttctgtgcccggtccatcacaacagtcgtgggctgcgctatggactattggggccagggaacaagcgtgaccgtgtctagtacgcgtatccagaaccctgatcctgccgtgtaccagctgcgggatagcaagagcagcgacaagagcgtgtgtctgttcaccgacttcgacagccagaccaacgtgtcccagagcaaggactccgacgtgtacatcaccgataagaccgtgctggacatgcggagcatggacttcaagagcaactccgccgtggcctggtccaacaagtccgatttcgcctgcgccaacgccttcaacaacagcattatccccgaggacacattcttcccaagccccgagagcagctgcggtacccaacaacagaccctgcctaaaccattcatctgggctgaaccccactttatggttccgaaagagaaacaagtcacgatttgttgccaagggaattacggggccgtcgagtatcagctccactttgagggctccctgtttgctgtggatcggcccaagccacctgaaagaatcaacaaagtccaattctatattcctgatatgaactcccgcatggcaggccagtattcatgtatctaccgcgtgggagaactttggagtgaaccctctaacctgctggacctcgtcgtgacagagatgtatgatacacccacactgtctgtgcaccctgggccagaagttatcagcggagaaaaagttaccttttattgccgcctcgataccgctacctctatgttcctcttgctgaaagagggccgcagctctcacgtgcagcgaggctacggaaaggtccaagctgagtttcctctcggccccgtgaccaccgctcacaggggcacatatagatgttttggctcttataacaatcatgcctggtcattcccatccgagcctgtgaaactgctggtcacaggcgatattgagaatacctctctggccccagaagatcctacattccccgccgacacatggggaacatatctgctgacaaccgaaaccgggctgcaaaaggaccatgctctgtgggatcataccgctcagaatctgcttcggatggggcttgcattcctggtcctggtggctcttgtctggtttctggtcgaggactggctgtcccggaagagaaccagagaaagagcttccagggccagcacctgggaaggcagacgcagactgaatactcagaccctgcgcgccaagagaagcggatctggcgtgaagcagaccctgaatttcgacctgctgaagctggctggcgacgtggaatccaacccaggcccttctagaggccatatgaccgagtacaagcccacggtgcgcctcgccacccgcgacgacgtccccagggccgtacgcaccctcgccgccgcgttcgccgactaccccgccacgcgccacaccgtcgatccggaccgccacatcgagcgggtcaccgagctgcaagaactcttcctcacgcgcgtcgggctcgacatcggcaaggtgtgggtcgcggacgacggcgccgcggtggcggtctggaccacgccggagagcgtcgaagcgggggcggtgttcgccgagatcggcccgcgcatggccgagttgagcggttcccggctggccgcgcagcaacagatggaaggcctcctggcgccgcaccggcccaaggagcccgcgtggttcctggccaccgtcggcgtctcgcccgaccaccagggcaagggtctgggcagcgccgtcgtgctccccggagtggaggcggccgagcgcgccggggtgcccgccttcctggagacctccgcgccccgcaacctccccttctacgagcggctcggcttcaccgtcaccgccgacgtcgaggtgcccgaaggaccgcgcacctggtgcatgacccgcaagcccggtgcctga

SEQ ID NO: 1778 - DNA, 4005 bp, Artificial Sequence
  Synthetic Polynucleotide
atggccttaccagtgaccgccttgctcctgccgctggccttgctgctccacgccgccaggccggaagtgcagctggttgaatctggcggaggactggttcaggctggcggatctctgagactgtcttgtgccgccagcggcagaacctttagcatgggctggtttagacaggcccctggcaaagagagagagttcgtcgccgccatcacatactctggcggcagcccttactacgccgactctgtgaagggcagattcaccatcagccgggacaacgccaagaacaccgtgtacctccagatgaacagcctgaagcctgaggacaccgccgtgtactactgcgccgccaatccaacatacggcagcgactggaacgccgagaattggggccagggaacccaagtgacagtgtctagcggtaccggcggaggcggatctggcggcggaggtagcggtggcggaggatctgaattcgacatccagatgacacagagccctagcagcctgtctgccagcgtgggagacagagtgaccatcacatgcaaggccagcgaccacatcaacaactggctggcctggtatcagcagaagcctggacaggcccctaagctgctgatctacggcgctaccacactggaaacaggcgtgcccagcagattttctggcagcggctctggcaccgactacaccctgacaatatccagcctccagcctgaggacttcgccacctactactgtcagcagagctggaacaccccttggacattcggccagggcaccaagctggaaatcaagagactcgaggacctgaagaacgtgttcccacctgaggtggccgtgttcgagcctagcgaggccgagatcagccacacccagaaagccaccctcgtgtgcctggctaccggcttctaccccgaccatgtggaactgtcttggtgggtcaacggcaaagaggtgcacagcggcgtgtctaccgacccccagccactgaaagaacagcccgccctgaacgacagccggtactgcctgagcagcagactgagagtgtccgccaccttctggcagaacccccggaaccacttcagatgccaggtgcagttctacggcctgagcgagaacgacgagtggacccaggacagagccaagcccgtgacccagatcgtgtctgccgaagcctggggcagagccgattgcggatccatcggctggctgttgctccaggcccctcggtgggtgttcaaggaggaagaccctattcacctgaggtgtcacagctggaagaacactgctctgcataaggtcacatatttacagaatggcaaaggcaggaagtattttcatcataattctgacttctacattccaaaagccacactcaaagacagcggctcctacttctgcagggggcttgttgggagtaaaaatgtgtcttcagagactgtgaacatcaccatcactcaaggtttggcagtgtcaaccatctcatcattctttccacctggctaccaagtgtccttctgcctggtcatggtgctgctgttcgccgtggataccggcctgtacttcagcgtcaagaccaacatccggtccagcaccagagactggaaggaccacaagttcaagtggcggaaggaccctcaggacaagagggccaagcgatctggatctggagcaacaaacttctcactactcaaacaagcaggtgacgtggaggagaatcccgggcctactagtatggactggatttggcgcatccttttccttgtcggcgctgctaccggcgcgcattccttcgaacaagttcagcttcaacagcctggcgctgagctggtcaaacctggcgcttctgtgaagatgagctgcaaagccagcggctacgccttcagcagctactggatcaactggatgaagcagaaacccggccagggactcgaatggatcggccaaatctatcccggcgacggcgacaccaactacaacggcaagttcaagggcagagccacactgaccgccgatacctctagcagcacagcctacatgcagctgagcagcctgaccagcgaagatagcgccgtgtacttctgtgcccggtccatcacaacagtcgtgggctgcgctatggactattggggccagggaacaagcgtgaccgtgtctagtacgcgtatccagaaccctgatcctgccgtgtaccagctgcgggatagcaagagcagcgacaagagcgtgtgtctgttcaccgacttcgacagccagaccaacgtgtcccagagcaaggactccgacgtgtacatcaccgataagaccgtgctggacatgcggagcatggacttcaagagcaactccgccgtggcctggtccaacaagtccgatttcgcctgcgccaacgccttcaacaacagcattatccccgaggacacattcttcccaagccccgagagcagctgcggtacccaacaacagaccctgcctaaaccattcatctgggctgaaccccactttatggttccgaaagagaaacaagtcacgatttgttgccaagggaattacggggccgtcgagtatcagctccactttgagggctccctgtttgctgtggatcggcccaagccacctgaaagaatcaacaaagtccaattctatattcctgatatgaactcccgcatggcaggccagtattcatgtatctaccgcgtgggagaactttggagtgaaccctctaacctgctggacctcgtcgtgacagagatgtatgatacacccacactgtctgtgcaccctgggccagaagttatcagcggagaaaaagttaccttttattgccgcctcgataccgctacctctatgttcctcttgctgaaagagggccgcagctctcacgtgcagcgaggctacggaaaggtccaagctgagtttcctctcggccccgtgaccaccgctcacaggggcacatatagatgttttggctcttataacaatcatgcctggtcattcccatccgagcctgtgaaactgctggtcacaggcgatattgagaatacctctctggccccagaagatcctacattccccgccgacacatggggaacatatctgctgacaaccgaaaccgggctgcaaaaggaccatgctctgtgggatcataccgctcagaatctgcttcggatggggcttgcattcctggtcctggtggctcttgtctggtttctggtcgaggactggctgtcccggaagagaaccagagaaagagcttccagggccagcacctgggaaggcagacgcagactgaatactcagaccctgcgcgccaagagaagcggatctggcgtgaagcagaccctgaatttcgacctgctgaagctggctggcgacgtggaatccaacccaggcccttctagaggccatatgaccgagtacaagcccacggtgcgcctcgccacccgcgacgacgtccccagggccgtacgcaccctcgccgccgcgttcgccgactaccccgccacgcgccacaccgtcgatccggaccgccacatcgagcgggtcaccgagctgcaagaactcttcctcacgcgcgtcgggctcgacatcggcaaggtgtgggtcgcggacgacggcgccgcggtggcggtctggaccacgccggagagcgtcgaagcgggggcggtgttcgccgagatcggcccgcgcatggccgagttgagcggttcccggctggccgcgcagcaacagatggaaggcctcctggcgccgcaccggcccaaggagcccgcgtggttcctggccaccgtcggcgtctcgcccgaccaccagggcaagggtctgggcagcgccgtcgtgctccccggagtggaggcggccgagcgcgccggggtgcccgccttcctggagacctccgcgccccgcaacctccccttctacgagcggctcggcttcaccgtcaccgccgacgtcgaggtgcccgaaggaccgcgcacctggtgcatgacccgcaagcccggtgcctga

SEQ ID NO: 1779 - DNA, 4416 bp, Artificial Sequence
  Synthetic Polynucleotide
atggccttaccagtgaccgccttgctcctgccgctggccttgctgctccacgccgccaggccggaagtgcagctggttgaatctggcggaggactggttcaggctggcggatctctgagactgtcttgtgccgccagcggcagaacctttagcatgggctggtttagacaggcccctggcaaagagagagagttcgtcgccgccatcacatactctggcggcagcccttactacgccgactctgtgaagggcagattcaccatcagccgggacaacgccaagaacaccgtgtacctccagatgaacagcctgaagcctgaggacaccgccgtgtactactgcgccgccaatccaacatacggcagcgactggaacgccgagaattggggccagggaacccaagtgacagtgtctagcggtaccggcggaggcggatctggcggcggaggtagcggtggcggaggatctgaattcgacatccagatgacacagagccctagcagcctgtctgccagcgtgggagacagagtgaccatcacatgcaaggccagcgaccacatcaacaactggctggcctggtatcagcagaagcctggacaggcccctaagctgctgatctacggcgctaccacactggaaacaggcgtgcccagcagattttctggcagcggctctggcaccgactacaccctgacaatatccagcctccagcctgaggacttcgccacctactactgtcagcagagctggaacaccccttggacattcggccagggcaccaagctggaaatcaagagactcgaggacctgaagaacgtgttcccacctgaggtggccgtgttcgagcctagcgaggccgagatcagccacacccagaaagccaccctcgtgtgcctggctaccggcttctaccccgaccatgtggaactgtcttggtgggtcaacggcaaagaggtgcacagcggcgtgtctaccgacccccagccactgaaagaacagcccgccctgaacgacagccggtactgcctgagcagcagactgagagtgtccgccaccttctggcagaacccccggaaccacttcagatgccaggtgcagttctacggcctgagcgagaacgacgagtggacccaggacagagccaagcccgtgacccagatcgtgtctgccgaagcctggggcagagccgattgcggatccatcggctggctgttgctccaggcccctcggtgggtgttcaaggaggaagaccctattcacctgaggtgtcacagctggaagaacactgctctgcataaggtcacatatttacagaatggcaaaggcaggaagtattttcatcataattctgacttctacattccaaaagccacactcaaagacagcggctcctacttctgcagggggcttgttgggagtaaaaatgtgtcttcagagactgtgaacatcaccatcactcaaggtttggcagtgtcaaccatctcatcattctttccacctggctaccaagtgtccttctgcctggtcatggtgctgctgttcgccgtggataccggcctgtacttcagcgtcaagaccaacatccggtccagcaccagagactggaaggaccacaagttcaagtggcggaaggaccctcaggacaagagggccaagcgatctggatctggagcaacaaacttctcactactcaaacaagcaggtgacgtggaggagaatcccgggcctactagtatggactggatttggcgcatccttttccttgtcggcgctgctaccggcgcgcattccgggcccgaagtgcaactggttgaatccggtggcggcctggtgcaagcaggcggatctctcagacttagctgtgccgcctccggcagaaccttcacaatgggatggtttaggcaggctccagggaaagagagagagttcgtcgccgccatctctctgtctcccacactggcctactacgccgactctgtgaaaggccggttcaccatctccagagataatgccaagaacaccgtggtgctgcaaatgaactctctgaaacccgaggatacagccctgtactattgtgccgctgaccggaagtccgtgatgagcatcagacccgattactggggacagggcacacaagtcacagtgtcctctggatccggcggcggaggatctggcggaggcggatctgggggcggaggctctttcgaacaagttcagcttcaacagcctggcgctgagctggtcaaacctggcgcttctgtgaagatgagctgcaaagccagcggctacgccttcagcagctactggatcaactggatgaagcagaaacccggccagggactcgaatggatcggccaaatctatcccggcgacggcgacaccaactacaacggcaagttcaagggcagagccacactgaccgccgatacctctagcagcacagcctacatgcagctgagcagcctgaccagcgaagatagcgccgtgtacttctgtgcccggtccatcacaacagtcgtgggctgcgctatggactattggggccagggaacaagcgtgaccgtgtctagtacgcgtatccagaaccctgatcctgccgtgtaccagctgcgggatagcaagagcagcgacaagagcgtgtgtctgttcaccgacttcgacagccagaccaacgtgtcccagagcaaggactccgacgtgtacatcaccgataagaccgtgctggacatgcggagcatggacttcaagagcaactccgccgtggcctggtccaacaagtccgatttcgcctgcgccaacgccttcaacaacagcattatccccgaggacacattcttcccaagccccgagagcagctgcggtacccaacaacagaccctgcctaaaccattcatctgggctgaaccccactttatggttccgaaagagaaacaagtcacgatttgttgccaagggaattacggggccgtcgagtatcagctccactttgagggctccctgtttgctgtggatcggcccaagccacctgaaagaatcaacaaagtccaattctatattcctgatatgaactcccgcatggcaggccagtattcatgtatctaccgcgtgggagaactttggagtgaaccctctaacctgctggacctcgtcgtgacagagatgtatgatacacccacactgtctgtgcaccctgggccagaagttatcagcggagaaaaagttaccttttattgccgcctcgataccgctacctctatgttcctcttgctgaaagagggccgcagctctcacgtgcagcgaggctacggaaaggtccaagctgagtttcctctcggccccgtgaccaccgctcacaggggcacatatagatgttttggctcttataacaatcatgcctggtcattcccatccgagcctgtgaaactgctggtcacaggcgatattgagaatacctctctggccccagaagatcctacattccccgccgacacatggggaacatatctgctgacaaccgaaaccgggctgcaaaaggaccatgctctgtgggatcataccgctcagaatctgcttcggatggggcttgcattcctggtcctggtggctcttgtctggtttctggtcgaggactggctgtcccggaagagaaccagagaaagagcttccagggccagcacctgggaaggcagacgcagactgaatactcagaccctgcgcgccaagagaagcggatctggcgtgaagcagaccctgaatttcgacctgctgaagctggctggcgacgtggaatccaacccaggcccttctagaggccatatgaccgagtacaagcccacggtgcgcctcgccacccgcgacgacgtccccagggccgtacgcaccctcgccgccgcgttcgccgactaccccgccacgcgccacaccgtcgatccggaccgccacatcgagcgggtcaccgagctgcaagaactcttcctcacgcgcgtcgggctcgacatcggcaaggtgtgggtcgcggacgacggcgccgcggtggcggtctggaccacgccggagagcgtcgaagcgggggcggtgttcgccgagatcggcccgcgcatggccgagttgagcggttcccggctggccgcgcagcaacagatggaaggcctcctggcgccgcaccggcccaaggagcccgcgtggttcctggccaccgtcggcgtctcgcccgaccaccagggcaagggtctgggcagcgccgtcgtgctccccggagtggaggcggccgagcgcgccggggtgcccgccttcctggagacctccgcgccccgcaacctccccttctacgagcggctcggcttcaccgtcaccgccgacgtcgaggtgcccgaaggaccgcgcacctggtgcatgacccgcaagcccggtgcctga

SEQ ID NO: 1780 - DNA, 3615 bp, Artificial Sequence
  Synthetic Polynucleotide
atggccttaccagtgaccgccttgctcctgccgctggccttgctgctccacgccgccaggccggaagtgcagctggttgaatctggcggaggactggttcaggctggcggatctctgagactgtcttgtgccgccagcggcagaacctttagcatgggctggtttagacaggcccctggcaaagagagagagttcgtcgccgccatcacatactctggcggcagcccttactacgccgactctgtgaagggcagattcaccatcagccgggacaacgccaagaacaccgtgtacctccagatgaacagcctgaagcctgaggacaccgccgtgtactactgcgccgccaatccaacatacggcagcgactggaacgccgagaattggggccagggaacccaagtgacagtgtctagcctcgaggacctgaagaacgtgttcccacctgaggtggccgtgttcgagcctagcgaggccgagatcagccacacccagaaagccaccctcgtgtgcctggctaccggcttctaccccgaccatgtggaactgtcttggtgggtcaacggcaaagaggtgcacagcggcgtgtctaccgacccccagccactgaaagaacagcccgccctgaacgacagccggtactgcctgagcagcagactgagagtgtccgccaccttctggcagaacccccggaaccacttcagatgccaggtgcagttctacggcctgagcgagaacgacgagtggacccaggacagagccaagcccgtgacccagatcgtgtctgccgaagcctggggcagagccgattgcggatccatcggctggctgttgctccaggcccctcggtgggtgttcaaggaggaagaccctattcacctgaggtgtcacagctggaagaacactgctctgcataaggtcacatatttacagaatggcaaaggcaggaagtattttcatcataattctgacttctacattccaaaagccacactcaaagacagcggctcctacttctgcagggggcttgttgggagtaaaaatgtgtcttcagagactgtgaacatcaccatcactcaaggtttggcagtgtcaaccatctcatcattctttccacctggctaccaagtgtccttctgcctggtcatggtgctgctgttcgccgtggataccggcctgtacttcagcgtcaagaccaacatccggtccagcaccagagactggaaggaccacaagttcaagtggcggaaggaccctcaggacaagagggccaagcgatctggatctggagcaacaaacttctcactactcaaacaagcaggtgacgtggaggagaatcccgggcctactagtatggactggatttggcgcatccttttccttgtcggcgctgctaccggcgcgcattccgggcccgaagtgcaactggttgaatccggtggcggcctggtgcaagcaggcggatctctcagacttagctgtgccgcctccggcagaaccttcacaatgggatggtttaggcaggctccagggaaagagagagagttcgtcgccgccatctctctgtctcccacactggcctactacgccgactctgtgaaaggccggttcaccatctccagagataatgccaagaacaccgtggtgctgcaaatgaactctctgaaacccgaggatacagccctgtactattgtgccgctgaccggaagtccgtgatgagcatcagacccgattactggggacagggcacacaagtcacagtgtcctctacgcgtatccagaaccctgatcctgccgtgtaccagctgcgggatagcaagagcagcgacaagagcgtgtgtctgttcaccgacttcgacagccagaccaacgtgtcccagagcaaggactccgacgtgtacatcaccgataagaccgtgctggacatgcggagcatggacttcaagagcaactccgccgtggcctggtccaacaagtccgatttcgcctgcgccaacgccttcaacaacagcattatccccgaggacacattcttcccaagccccgagagcagctgcggtacccaacaacagaccctgcctaaaccattcatctgggctgaaccccactttatggttccgaaagagaaacaagtcacgatttgttgccaagggaattacggggccgtcgagtatcagctccactttgagggctccctgtttgctgtggatcggcccaagccacctgaaagaatcaacaaagtccaattctatattcctgatatgaactcccgcatggcaggccagtattcatgtatctaccgcgtgggagaactttggagtgaaccctctaacctgctggacctcgtcgtgacagagatgtatgatacacccacactgtctgtgcaccctgggccagaagttatcagcggagaaaaagttaccttttattgccgcctcgataccgctacctctatgttcctcttgctgaaagagggccgcagctctcacgtgcagcgaggctacggaaaggtccaagctgagtttcctctcggccccgtgaccaccgctcacaggggcacatatagatgttttggctcttataacaatcatgcctggtcattcccatccgagcctgtgaaactgctggtcacaggcgatattgagaatacctctctggccccagaagatcctacattccccgccgacacatggggaacatatctgctgacaaccgaaaccgggctgcaaaaggaccatgctctgtgggatcataccgctcagaatctgcttcggatggggcttgcattcctggtcctggtggctcttgtctggtttctggtcgaggactggctgtcccggaagagaaccagagaaagagcttccagggccagcacctgggaaggcagacgcagactgaatactcagaccctgcgcgccaagagaagcggatctggcgtgaagcagaccctgaatttcgacctgctgaagctggctggcgacgtggaatccaacccaggcccttctagaggccatatgaccgagtacaagcccacggtgcgcctcgccacccgcgacgacgtccccagggccgtacgcaccctcgccgccgcgttcgccgactaccccgccacgcgccacaccgtcgatccggaccgccacatcgagcgggtcaccgagctgcaagaactcttcctcacgcgcgtcgggctcgacatcggcaaggtgtgggtcgcggacgacggcgccgcggtggcggtctggaccacgccggagagcgtcgaagcgggggcggtgttcgccgagatcggcccgcgcatggccgagttgagcggttcccggctggccgcgcagcaacagatggaaggcctcctggcgccgcaccggcccaaggagcccgcgtggttcctggccaccgtcggcgtctcgcccgaccaccagggcaagggtctgggcagcgccgtcgtgctccccggagtggaggcggccgagcgcgccggggtgcccgccttcctggagacctccgcgccccgcaacctccccttctacgagcggctcggcttcaccgtcaccgccgacgtcgaggtgcccgaaggaccgcgcacctggtgcatgacccgcaagcccggtgcctga

SEQ ID NO: 1781 - DNA, 1635 bp, Artificial Sequence; identical to SEQ ID NO: 1664
  Synthetic Polynucleotide

SEQ ID NO: 1782 - DNA, 3312 bp, Artificial Sequence
  Synthetic Polynucleotide
atggccttaccagtgaccgccttgctcctgccgctggccttgctgctccacgccgccaggccggacatccagatgacacagagccctagcagcctgtctgccagcgtgggagacagagtgaccatcacatgcaaggccagcgaccacatcaacaactggctggcctggtatcagcagaagcctggacaggcccctaagctgctgatctacggcgctaccacactggaaacaggcgtgcccagcagattttctggcagcggctctggcaccgactacaccctgacaatatccagcctccagcctgaggacttcgccacctactactgtcagcagagctggaacaccccttggacattcggccagggcaccaagctggaaatcaagagactcgagcagcagcagacactgcccaagcctttcatttgggccgagcctcacttcatggtgcccaaagaaaagcaagtgaccatctgctgccagggcaactacggcgctgtggaataccagctgcacttcgagggaagcctgttcgccgtggacagacctaagcctcctgagcggatcaacaaggtgcagttctacatccccgacatgaacagccggatggccggacagtacagctgcatctatagagtgggcgagctttggagcgagcccagcaatctgctggatctggtggtcaccgagatgtacgacacccctacactgagcgtgcaccccggacctgaagtgatctctggcgagaaagtgaccttctactgtcggctggataccgccaccagcatgtttctgctgctcaaagaaggccggtccagccacgtgcagcgcggatatggaaaagtgcaggccgagtttcccctgggacctgtgacaacagcccacagaggcacctacagatgcttcggcagctacaacaaccacgcttggagcttccctagcgagcccgtgaagttgcttgtgaccggcgacatcgagaacaccagtctggcccctgaggaccctacctttcctgccgatacctggggcacctacctgctgaccacagagacaggactccagaaagatcacgccctgtgggaccacacagcccagaacctgctgagaatgggcctcgcctttctggtgctggttgccctcgtgtggttcctggtggaagattggctgagccggaagcggacaagagagagagccagcagagcctctacctgggagggaagaagaaggctgaacacccagacacttagggccaagcgatctggatctggagcaacaaacttctcactactcaaacaagcaggtgacgtggaggagaatcccgggcctactagtatggactggatttggcgcatccttttccttgtcggcgctgctaccggcgcgcattccttcgaacaagttcagcttcaacagcctggcgctgagctggtcaaacctggcgcttctgtgaagatgagctgcaaagccagcggctacgccttcagcagctactggatcaactggatgaagcagaaacccggccagggactcgaatggatcggccaaatctatcccggcgacggcgacaccaactacaacggcaagttcaagggcagagccacactgaccgccgatacctctagcagcacagcctacatgcagctgagcagcctgaccagcgaagatagcgccgtgtacttctgtgcccggtccatcacaacagtcgtgggctgcgctatggactattggggccagggaacaagcgtgaccgtgtctagtacgcgtcaacaacagaccctgcctaaaccattcatctgggctgaaccccactttatggttccgaaagagaaacaagtcacgatttgttgccaagggaattacggggccgtcgagtatcagctccactttgagggctccctgtttgctgtggatcggcccaagccacctgaaagaatcaacaaagtccaattctatattcctgatatgaactcccgcatggcaggccagtattcatgtatctaccgcgtgggagaactttggagtgaaccctctaacctgctggacctcgtcgtgacagagatgtatgatacacccacactgtctgtgcaccctgggccagaagttatcagcggagaaaaagttaccttttattgccgcctcgataccgctacctctatgttcctcttgctgaaagagggccgcagctctcacgtgcagcgaggctacggaaaggtccaagctgagtttcctctcggccccgtgaccaccgctcacaggggcacatatagatgttttggctcttataacaatcatgcctggtcattcccatccgagcctgtgaaactgctggtcacaggcgatattgagaatacctctctggccccagaagatcctacattccccgccgacacatggggaacatatctgctgacaaccgaaaccgggctgcaaaaggaccatgctctgtgggatcataccgctcagaatctgcttcggatggggcttgcattcctggtcctggtggctcttgtctggtttctggtcgaggactggctgtcccggaagagaaccagagaaagagcttccagggccagcacctgggaaggcagacgcagactgaatactcagaccctgcgcgccaagagaagcggatctggcgtgaagcagaccctgaatttcgacctgctgaagctggctggcgacgtggaatccaacccaggcccttctagaggccatatgaccgagtacaagcccacggtgcgcctcgccacccgcgacgacgtccccagggccgtacgcaccctcgccgccgcgttcgccgactaccccgccacgcgccacaccgtcgatccggaccgccacatcgagcgggtcaccgagctgcaagaactcttcctcacgcgcgtcgggctcgacatcggcaaggtgtgggtcgcggacgacggcgccgcggtggcggtctggaccacgccggagagcgtcgaagcgggggcggtgttcgccgagatcggcccgcgcatggccgagttgagcggttcccggctggccgcgcagcaacagatggaaggcctcctggcgccgcaccggcccaaggagcccgcgtggttcctggccaccgtcggcgtctcgcccgaccaccagggcaagggtctgggcagcgccgtcgtgctccccggagtggaggcggccgagcgcgccggggtgcccgccttcctggagacctccgcgccccgcaacctccccttctacgagcggctcggcttcaccgtcaccgccgacgtcgaggtgcccgaaggaccgcgcacctggtgcatgacccgcaagcccggtgcctga

SEQ ID NO: 1783 - DNA, 3474 bp, Artificial Sequence
  Synthetic Polynucleotide
atggccttaccagtgaccgccttgctcctgccgctggccttgctgctccacgccgccaggccggcatgcgaagtgcagctgcttgaaagtggcggcggactgattcagcctggcggatctctgagactgagctgtgccgccagcggcttcaccttttctagccacgccatgacctgggtccgacaggcacctggaaaagggcttgaatgggtgtccgccatcagcggctctggcgattacacacactacgccgacagcgtgaagggcagattcaccatcagcagagacaacagcaagaacaccgtgtacctccagatgaacagcctgagagccgaggacagcgccgtgtattattgcgccaaggatgaggatggcggcagcctgcttggacacagaggacaaggcaccctggtcaccgtttcttccggtaccggcggaggcggatctggcggcggaggtagcggtggcggaggatctgaattcggatctctcgagcagcagcagacactgcccaagcctttcatttgggccgagcctcacttcatggtgcccaaagaaaagcaagtgaccatctgctgccagggcaactacggcgctgtggaataccagctgcacttcgagggaagcctgttcgccgtggacagacctaagcctcctgagcggatcaacaaggtgcagttctacatccccgacatgaacagccggatggccggacagtacagctgcatctatagagtgggcgagctttggagcgagcccagcaatctgctggatctggtggtcaccgagatgtacgacacccctacactgagcgtgcaccccggacctgaagtgatctctggcgagaaagtgaccttctactgtcggctggataccgccaccagcatgtttctgctgctcaaagaaggccggtccagccacgtgcagcgcggatatggaaaagtgcaggccgagtttcccctgggacctgtgacaacagcccacagaggcacctacagatgcttcggcagctacaacaaccacgcttggagcttccctagcgagcccgtgaagttgcttgtgaccggcgacatcgagaacaccagtctggcccctgaggaccctacctttcctgccgatacctggggcacctacctgctgaccacagagacaggactccagaaagatcacgccctgtgggaccacacagcccagaacctgctgagaatgggcctcgcctttctggtgctggttgccctcgtgtggttcctggtggaagattggctgagccggaagcggacaagagagagagccagcagagcctctacctgggagggaagaagaaggctgaacacccagacacttagggccaagcgatctggatctggagcaacaaacttctcactactcaaacaagcaggtgacgtggaggagaatcccgggcctactagtgccaccatggactggatttggcgcatccttttccttgtcggcgctgctaccggcgcccattccgggcccgaagtgcagctggttgaatctggcggaggactggttcaggctggcggatctctgagactgtcttgtgccgccagcggcagaacctttagcatgggctggtttagacaggcccctggcaaagagagagagttcgtcgccgccatcacatactctggcggcagcccttactacgccgactctgtgaagggcagattcaccatcagccgggacaacgccaagaacaccgtgtacctccagatgaacagcctgaagcctgaggacaccgccgtgtactactgcgccgccaatccaacatacggcagcgactggaacgccgagaattggggccagggaacccaagtgacagtgtctagcggatccggcggcggaggatctggcggaggcggatctgggggcggaggctctttcgaaggcagcacgcgtcaacaacagaccctgcctaaaccattcatctgggctgaaccccactttatggttccgaaagagaaacaagtcacgatttgttgccaagggaattacggggccgtcgagtatcagctccactttgagggctccctgtttgctgtggatcggcccaagccacctgaaagaatcaacaaagtccaattctatattcctgatatgaactcccgcatggcaggccagtattcatgtatctaccgcgtgggagaactttggagtgaaccctctaacctgctggacctcgtcgtgacagagatgtatgatacacccacactgtctgtgcaccctgggccagaagttatcagcggagaaaaagttaccttttattgccgcctcgataccgctacctctatgttcctcttgctgaaagagggccgcagctctcacgtgcagcgaggctacggaaaggtccaagctgagtttcctctcggccccgtgaccaccgctcacaggggcacatatagatgttttggctcttataacaatcatgcctggtcattcccatccgagcctgtgaaactgctggtcacaggcgatattgagaatacctctctggccccagaagatcctacattccccgccgacacatggggaacatatctgctgacaaccgaaaccgggctgcaaaaggaccatgctctgtgggatcataccgctcagaatctgcttcggatggggcttgcattcctggtcctggtggctcttgtctggtttctggtcgaggactggctgtcccggaagagaaccagagaaagagcttccagggccagcacctgggaaggcagacgcagactgaatactcagaccctgcgcgccaagagaagcggatctggcgtgaagcagaccctgaatttcgacctgctgaagctggctggcgacgtggaatccaacccaggcccttctagaggccatatgaccgagtacaagcccacggtgcgcctcgccacccgcgacgacgtccccagggccgtacgcaccctcgccgccgcgttcgccgactaccccgccacgcgccacaccgtcgatccggaccgccacatcgagcgggtcaccgagctgcaagaactcttcctcacgcgcgtcgggctcgacatcggcaaggtgtgggtcgcggacgacggcgccgcggtggcggtctggaccacgccggagagcgtcgaagcgggggcggtgttcgccgagatcggcccgcgcatggccgagttgagcggttcccggctggccgcgcagcaacagatggaaggcctcctggcgccgcaccggcccaaggagcccgcgtggttcctggccaccgtcggcgtctcgcccgaccaccagggcaagggtctgggcagcgccgtcgtgctccccggagtggaggcggccgagcgcgccggggtgcccgccttcctggagacctccgcgccccgcaacctccccttctacgagcggctcggcttcaccgtcaccgccgacgtcgaggtgcccgaaggaccgcgcacctggtgcatgacccgcaagcccggtgcctga

SEQ ID NO: 1784 - DNA, 3924 bp, Artificial Sequence
  Synthetic Polynucleotide
atggccttaccagtgaccgccttgctcctgccgctggccttgctgctccacgccgccaggccggacatccagatgacacagagccctagcagcctgtctgccagcgtgggagacagagtgaccatcacatgcaaggccagcgaccacatcaacaactggctggcctggtatcagcagaagcctggacaggcccctaagctgctgatctacggcgctaccacactggaaacaggcgtgcccagcagattttctggcagcggctctggcaccgactacaccctgacaatatccagcctccagcctgaggacttcgccacctactactgtcagcagagctggaacaccccttggacattcggccagggcaccaagctggaaatcaagagactcgagggacagcctaaggccaatcctaccgtgacactgttccctccaagcagcgaagaactccaggccaacaaggccacacttgtgtgcctgatctccgacttctaccctggggctgtgacagtggcttggaaggccgatggatctcctgtgaaagccggcgtggaaaccaccaagccatccaagcagagcaacaacaaatacgccgccagctcctacctgagcctgacacctgagcagtggaagtcccacagatcctacagctgccaagtgacccacgaaggcagcaccgtggaaaagacagtggcccctacagagtgcagcggatcccagcagcagacactgcccaagcctttcatttgggccgagcctcacttcatggtgcccaaagaaaagcaagtgaccatctgctgccagggcaactacggcgctgtggaataccagctgcacttcgagggaagcctgttcgccgtggacagacctaagcctcctgagcggatcaacaaggtgcagttctacatccccgacatgaacagccggatggccggacagtacagctgcatctatagagtgggcgagctttggagcgagcccagcaatctgctggatctggtggtcaccgagatgtacgacacccctacactgagcgtgcaccccggacctgaagtgatctctggcgagaaagtgaccttctactgtcggctggataccgccaccagcatgtttctgctgctcaaagaaggccggtccagccacgtgcagcgcggatatggaaaagtgcaggccgagtttcccctgggacctgtgacaacagcccacagaggcacctacagatgcttcggcagctacaacaaccacgcttggagcttccctagcgagcccgtgaagttgcttgtgaccggcgacatcgagaacaccagtctggcccctgaggaccctacctttcctgccgatacctggggcacctacctgctgaccacagagacaggactccagaaagatcacgccctgtgggaccacacagcccagaacctgctgagaatgggcctcgcctttctggtgctggttgccctcgtgtggttcctggtggaagattggctgagccggaagcggacaagagagagagccagcagagcctctacctgggagggaagaagaaggctgaacacccagacacttagggccaagcgatctggatctggagcaacaaacttctcactactcaaacaagcaggtgacgtggaggagaatcccgggcctactagtatggactggatttggcgcatccttttccttgtcggcgctgctaccggcgcgcattccttcgaacaagttcagcttcaacagcctggcgctgagctggtcaaacctggcgcttctgtgaagatgagctgcaaagccagcggctacgccttcagcagctactggatcaactggatgaagcagaaacccggccagggactcgaatggatcggccaaatctatcccggcgacggcgacaccaactacaacggcaagttcaagggcagagccacactgaccgccgatacctctagcagcacagcctacatgcagctgagcagcctgaccagcgaagatagcgccgtgtacttctgtgcccggtccatcacaacagtcgtgggctgcgctatggactattggggccagggaacaagcgtgaccgtgtctagtacgcgtgcctctacaaagggaccctccgtgtttcctctggctcccagcagcaagtctacaagcggaggaacagccgctctgggctgcctggtcaaggattactttcccgagcctgtgaccgtgtcctggaatagcggagcactgacaagcggcgtgcacacctttccagccgtgctgcaaagcagcggcctgtactctctgagcagcgtggtcacagtgcctagctctagcctgggcacccagacctacatctgcaatgtgaaccacaagcctagcaacaccaaggtggacaagagagtggaacccaagagctgtggtacccaacaacagaccctgcctaaaccattcatctgggctgaaccccactttatggttccgaaagagaaacaagtcacgatttgttgccaagggaattacggggccgtcgagtatcagctccactttgagggctccctgtttgctgtggatcggcccaagccacctgaaagaatcaacaaagtccaattctatattcctgatatgaactcccgcatggcaggccagtattcatgtatctaccgcgtgggagaactttggagtgaaccctctaacctgctggacctcgtcgtgacagagatgtatgatacacccacactgtctgtgcaccctgggccagaagttatcagcggagaaaaagttaccttttattgccgcctcgataccgctacctctatgttcctcttgctgaaagagggccgcagctctcacgtgcagcgaggctacggaaaggtccaagctgagtttcctctcggccccgtgaccaccgctcacaggggcacatatagatgttttggctcttataacaatcatgcctggtcattcccatccgagcctgtgaaactgctggtcacaggcgatattgagaatacctctctggccccagaagatcctacattccccgccgacacatggggaacatatctgctgacaaccgaaaccgggctgcaaaaggaccatgctctgtgggatcataccgctcagaatctgcttcggatggggcttgcattcctggtcctggtggctcttgtctggtttctggtcgaggactggctgtcccggaagagaaccagagaaagagcttccagggccagcacctgggaaggcagacgcagactgaatactcagaccctgcgcgccaagagaagcggatctggcgtgaagcagaccctgaatttcgacctgctgaagctggctggcgacgtggaatccaacccaggcccttctagaggcgggatccacaccatggctacctacgaggtgctgtgcgaggtggcaagaaagctgggcaccgacgacagagaagtggtgctgttcctgctgaacgtgttcatccctcagcctacactggcccagctgatcggtgcactgagagccctgaaagaggaaggccggctgacctttcctctgctggccgaatgcctgttcagagccggaagaagggatctgctgcgggacctgctgcatctggaccccagatttctggaaagacacctggccggcaccatgagctacttcagcccttaccagctgaccgtgctgcacgttgacggcgaactgtgcgccagagatattcggagcctgatcttcctgagcaaggacaccatcggcagccggtctacccctcagacatttctgcactgggtgtactgcatggaaaacctggacctgctcggccccacagatgtggatgccctgatgtccatgctgagaagcctgagcagagtggacctccagagacaggtgcagacactgatgggactgcacctgagcggacctagccacagccagcactacagacacacccct

SEQ ID NO: 1785 - DNA, 4083 bp, Artificial Sequence
  Synthetic Polynucleotide
atggccttaccagtgaccgccttgctcctgccgctggccttgctgctccacgccgccaggccggacatccagatgacacagagccctagcagcctgtctgccagcgtgggagacagagtgaccatcacatgcaaggccagcgaccacatcaacaactggctggcctggtatcagcagaagcctggacaggcccctaagctgctgatctacggcgctaccacactggaaacaggcgtgcccagcagattttctggcagcggctctggcaccgactacaccctgacaatatccagcctccagcctgaggacttcgccacctactactgtcagcagagctggaacaccccttggacattcggccagggcaccaagctggaaatcaagagactcgagggacagcctaaggccaatcctaccgtgacactgttccctccaagcagcgaagaactccaggccaacaaggccacacttgtgtgcctgatctccgacttctaccctggggctgtgacagtggcttggaaggccgatggatctcctgtgaaagccggcgtggaaaccaccaagccatccaagcagagcaacaacaaatacgccgccagctcctacctgagcctgacacctgagcagtggaagtcccacagatcctacagctgccaagtgacccacgaaggcagcaccgtggaaaagacagtggcccctacagagtgcagcggatcccagcagcagacactgcccaagcctttcatttgggccgagcctcacttcatggtgcccaaagaaaagcaagtgaccatctgctgccagggcaactacggcgctgtggaataccagctgcacttcgagggaagcctgttcgccgtggacagacctaagcctcctgagcggatcaacaaggtgcagttctacatccccgacatgaacagccggatggccggacagtacagctgcatctatagagtgggcgagctttggagcgagcccagcaatctgctggatctggtggtcaccgagatgtacgacacccctacactgagcgtgcaccccggacctgaagtgatctctggcgagaaagtgaccttctactgtcggctggataccgccaccagcatgtttctgctgctcaaagaaggccggtccagccacgtgcagcgcggatatggaaaagtgcaggccgagtttcccctgggacctgtgacaacagcccacagaggcacctacagatgcttcggcagctacaacaaccacgcttggagcttccctagcgagcccgtgaagttgcttgtgaccggcgacatcgagaacaccagtctggcccctgaggaccctacctttcctgccgatacctggggcacctacctgctgaccacagagacaggactccagaaagatcacgccctgtgggaccacacagcccagaacctgctgagaatgggcctcgcctttctggtgctggttgccctcgtgtggttcctggtggaagattggctgagccggaagcggacaagagagagagccagcagagcctctacctgggagggaagaagaaggctgaacacccagacacttagggccaagcgatctggatctggagcaacaaacttctcactactcaaacaagcaggtgacgtggaggagaatcccgggcctactagtatggactggatttggcgcatccttttccttgtcggcgctgctaccggcgcgcattccttcgaacaagttcagcttcaacagcctggcgctgagctggtcaaacctggcgcttctgtgaagatgagctgcaaagccagcggctacgccttcagcagctactggatcaactggatgaagcagaaacccggccagggactcgaatggatcggccaaatctatcccggcgacggcgacaccaactacaacggcaagttcaagggcagagccacactgaccgccgatacctctagcagcacagcctacatgcagctgagcagcctgaccagcgaagatagcgccgtgtacttctgtgcccggtccatcacaacagtcgtgggctgcgctatggactattggggccagggaacaagcgtgaccgtgtctagtacgcgtgcctctacaaagggaccctccgtgtttcctctggctcccagcagcaagtctacaagcggaggaacagccgctctgggctgcctggtcaaggattactttcccgagcctgtgaccgtgtcctggaatagcggagcactgacaagcggcgtgcacacctttccagccgtgctgcaaagcagcggcctgtactctctgagcagcgtggtcacagtgcctagctctagcctgggcacccagacctacatctgcaatgtgaaccacaagcctagcaacaccaaggtggacaagagagtggaacccaagagctgtggtacccaacaacagaccctgcctaaaccattcatctgggctgaaccccactttatggttccgaaagagaaacaagtcacgatttgttgccaagggaattacggggccgtcgagtatcagctccactttgagggctccctgtttgctgtggatcggcccaagccacctgaaagaatcaacaaagtccaattctatattcctgatatgaactcccgcatggcaggccagtattcatgtatctaccgcgtgggagaactttggagtgaaccctctaacctgctggacctcgtcgtgacagagatgtatgatacacccacactgtctgtgcaccctgggccagaagttatcagcggagaaaaagttaccttttattgccgcctcgataccgctacctctatgttcctcttgctgaaagagggccgcagctctcacgtgcagcgaggctacggaaaggtccaagctgagtttcctctcggccccgtgaccaccgctcacaggggcacatatagatgttttggctcttataacaatcatgcctggtcattcccatccgagcctgtgaaactgctggtcacaggcgatattgagaatacctctctggccccagaagatcctacattccccgccgacacatggggaacatatctgctgacaaccgaaaccgggctgcaaaaggaccatgctctgtgggatcataccgctcagaatctgcttcggatggggcttgcattcctggtcctggtggctcttgtctggtttctggtcgaggactggctgtcccggaagagaaccagagaaagagcttccagggccagcacctgggaaggcagacgcagactgaatactcagaccctgcgcgccaagagaagcggatctggcgtgaagcagaccctgaatttcgacctgctgaagctggctggcgacgtggaatccaacccaggcccttctagaggcgggatccacaccatgtccgactccaaggaggtccctagccttccatttttgcgacacttgctcgaagagttggacagccatgaggacagcttgctgctgtttctgtgtcacgacgcggccccgggctgcacgacggtcacgcaagctttgtgctcgcttagccaacagcgcaagctgaccctcgcggctctggtcgagatgctctacgtgctgcagcgtatggatcttctcaagagccgcttcgggctcagcaaggagggggccgagcaattgctgggcacaagctttctcacgcgctaccgcaagctcatggtttgcgtgggtgaggagctcgactcgagcgagctacgcgctctacgcttgttcgcgtgcaacctgaatccgagcctgagcacggcgctttctgagagcagccgctttgtcgagcttgtactcgcgcttgaaaacgtaggactcgtctcgccatcgagtgtttccgtgcttgcggacatgttgcgcactcttcggcgcctcgatttgtgccagcagcttgttgagtacgaacaacaagagcaagccaggtaccgttactgttacgcggcctcgccctcattgccagttcgtacgttacgtcgggggcacggcgcgagtgaacacgagcagctgtgcatgcccgtgcaagaatcctctgacagccccgagctgctgcgcacgcccgtacaagaatcctccagcgacagccccgagcaaacgact

SEQ ID NO: 1786 - DNA, 3951 bp, Artificial Sequence
  Synthetic Polynucleotide
atggccttaccagtgaccgccttgctcctgccgctggccttgctgctccacgccgccaggccggacatccagatgacacagagccctagcagcctgtctgccagcgtgggagacagagtgaccatcacatgcaaggccagcgaccacatcaacaactggctggcctggtatcagcagaagcctggacaggcccctaagctgctgatctacggcgctaccacactggaaacaggcgtgcccagcagattttctggcagcggctctggcaccgactacaccctgacaatatccagcctccagcctgaggacttcgccacctactactgtcagcagagctggaacaccccttggacattcggccagggcaccaagctggaaatcaagagactcgagggacagcctaaggccaatcctaccgtgacactgttccctccaagcagcgaagaactccaggccaacaaggccacacttgtgtgcctgatctccgacttctaccctggggctgtgacagtggcttggaaggccgatggatctcctgtgaaagccggcgtggaaaccaccaagccatccaagcagagcaacaacaaatacgccgccagctcctacctgagcctgacacctgagcagtggaagtcccacagatcctacagctgccaagtgacccacgaaggcagcaccgtggaaaagacagtggcccctacagagtgcagcggatcccagcagcagacactgcccaagcctttcatttgggccgagcctcacttcatggtgcccaaagaaaagcaagtgaccatctgctgccagggcaactacggcgctgtggaataccagctgcacttcgagggaagcctgttcgccgtggacagacctaagcctcctgagcggatcaacaaggtgcagttctacatccccgacatgaacagccggatggccggacagtacagctgcatctatagagtgggcgagctttggagcgagcccagcaatctgctggatctggtggtcaccgagatgtacgacacccctacactgagcgtgcaccccggacctgaagtgatctctggcgagaaagtgaccttctactgtcggctggataccgccaccagcatgtttctgctgctcaaagaaggccggtccagccacgtgcagcgcggatatggaaaagtgcaggccgagtttcccctgggacctgtgacaacagcccacagaggcacctacagatgcttcggcagctacaacaaccacgcttggagcttccctagcgagcccgtgaagttgcttgtgaccggcgacatcgagaacaccagtctggcccctgaggaccctacctttcctgccgatacctggggcacctacctgctgaccacagagacaggactccagaaagatcacgccctgtgggaccacacagcccagaacctgctgagaatgggcctcgcctttctggtgctggttgccctcgtgtggttcctggtggaagattggctgagccggaagcggacaagagagagagccagcagagcctctacctgggagggaagaagaaggctgaacacccagacacttagggccaagcgatctggatctggagcaacaaacttctcactactcaaacaagcaggtgacgtggaggagaatcccgggcctactagtatggactggatttggcgcatccttttccttgtcggcgctgctaccggcgcgcattccttcgaacaagttcagcttcaacagcctggcgctgagctggtcaaacctggcgcttctgtgaagatgagctgcaaagccagcggctacgccttcagcagctactggatcaactggatgaagcagaaacccggccagggactcgaatggatcggccaaatctatcccggcgacggcgacaccaactacaacggcaagttcaagggcagagccacactgaccgccgatacctctagcagcacagcctacatgcagctgagcagcctgaccagcgaagatagcgccgtgtacttctgtgcccggtccatcacaacagtcgtgggctgcgctatggactattggggccagggaacaagcgtgaccgtgtctagtacgcgtgcctctacaaagggaccctccgtgtttcctctggctcccagcagcaagtctacaagcggaggaacagccgctctgggctgcctggtcaaggattactttcccgagcctgtgaccgtgtcctggaatagcggagcactgacaagcggcgtgcacacctttccagccgtgctgcaaagcagcggcctgtactctctgagcagcgtggtcacagtgcctagctctagcctgggcacccagacctacatctgcaatgtgaaccacaagcctagcaacaccaaggtggacaagagagtggaacccaagagctgtggtacccaacaacagaccctgcctaaaccattcatctgggctgaaccccactttatggttccgaaagagaaacaagtcacgatttgttgccaagggaattacggggccgtcgagtatcagctccactttgagggctccctgtttgctgtggatcggcccaagccacctgaaagaatcaacaaagtccaattctatattcctgatatgaactcccgcatggcaggccagtattcatgtatctaccgcgtgggagaactttggagtgaaccctctaacctgctggacctcgtcgtgacagagatgtatgatacacccacactgtctgtgcaccctgggccagaagttatcagcggagaaaaagttaccttttattgccgcctcgataccgctacctctatgttcctcttgctgaaagagggccgcagctctcacgtgcagcgaggctacggaaaggtccaagctgagtttcctctcggccccgtgaccaccgctcacaggggcacatatagatgttttggctcttataacaatcatgcctggtcattcccatccgagcctgtgaaactgctggtcacaggcgatattgagaatacctctctggccccagaagatcctacattccccgccgacacatggggaacatatctgctgacaaccgaaaccgggctgcaaaaggaccatgctctgtgggatcataccgctcagaatctgcttcggatggggcttgcattcctggtcctggtggctcttgtctggtttctggtcgaggactggctgtcccggaagagaaccagagaaagagcttccagggccagcacctgggaaggcagacgcagactgaatactcagaccctgcgcgccaagagaagcggatctggcgtgaagcagaccctgaatttcgacctgctgaagctggctggcgacgtggaatccaacccaggcccttctagaggccatatgaccgagtacaagcccacggtgcgcctcgccacccgcgacgacgtccccagggccgtacgcaccctcgccgccgcgttcgccgactaccccgccacgcgccacaccgtcgatccggaccgccacatcgagcgggtcaccgagctgcaagaactcttcctcacgcgcgtcgggctcgacatcggcaaggtgtgggtcgcggacgacggcgccgcggtggcggtctggaccacgccggagagcgtcgaagcgggggcggtgttcgccgagatcggcccgcgcatggccgagttgagcggttcccggctggccgcgcagcaacagatggaaggcctcctggcgccgcaccggcccaaggagcccgcgtggttcctggccaccgtcggcgtctcgcccgaccaccagggcaagggtctgggcagcgccgtcgtgctccccggagtggaggcggccgagcgcgccggggtgcccgccttcctggagacctccgcgccccgcaacctccccttctacgagcggctcggcttcaccgtcaccgccgacgtcgaggtgcccgaaggaccgcgcacctggtgcatgacccgcaagcccggtgcctga

SEQ ID NO: 1787 - DNA, 4362 bp, Artificial Sequence
  Synthetic Polynucleotide
atggccttaccagtgaccgccttgctcctgccgctggccttgctgctccacgccgccaggccggaagtgcagctggttgaatctggcggaggactggttcaggctggcggatctctgagactgtcttgtgccgccagcggcagaacctttagcatgggctggtttagacaggcccctggcaaagagagagagttcgtcgccgccatcacatactctggcggcagcccttactacgccgactctgtgaagggcagattcaccatcagccgggacaacgccaagaacaccgtgtacctccagatgaacagcctgaagcctgaggacaccgccgtgtactactgcgccgccaatccaacatacggcagcgactggaacgccgagaattggggccagggaacccaagtgacagtgtctagcggtaccggcggaggcggatctggcggcggaggtagcggtggcggaggatctgaattcgacatccagatgacacagagccctagcagcctgtctgccagcgtgggagacagagtgaccatcacatgcaaggccagcgaccacatcaacaactggctggcctggtatcagcagaagcctggacaggcccctaagctgctgatctacggcgctaccacactggaaacaggcgtgcccagcagattttctggcagcggctctggcaccgactacaccctgacaatatccagcctccagcctgaggacttcgccacctactactgtcagcagagctggaacaccccttggacattcggccagggcaccaagctggaaatcaagagactcgagggacagcctaaggccaatcctaccgtgacactgttccctccaagcagcgaagaactccaggccaacaaggccacacttgtgtgcctgatctccgacttctaccctggggctgtgacagtggcttggaaggccgatggatctcctgtgaaagccggcgtggaaaccaccaagccatccaagcagagcaacaacaaatacgccgccagctcctacctgagcctgacacctgagcagtggaagtcccacagatcctacagctgccaagtgacccacgaaggcagcaccgtggaaaagacagtggcccctacagagtgcagcggatcccagcagcagacactgcccaagcctttcatttgggccgagcctcacttcatggtgcccaaagaaaagcaagtgaccatctgctgccagggcaactacggcgctgtggaataccagctgcacttcgagggaagcctgttcgccgtggacagacctaagcctcctgagcggatcaacaaggtgcagttctacatccccgacatgaacagccggatggccggacagtacagctgcatctatagagtgggcgagctttggagcgagcccagcaatctgctggatctggtggtcaccgagatgtacgacacccctacactgagcgtgcaccccggacctgaagtgatctctggcgagaaagtgaccttctactgtcggctggataccgccaccagcatgtttctgctgctcaaagaaggccggtccagccacgtgcagcgcggatatggaaaagtgcaggccgagtttcccctgggacctgtgacaacagcccacagaggcacctacagatgcttcggcagctacaacaaccacgcttggagcttccctagcgagcccgtgaagttgcttgtgaccggcgacatcgagaacaccagtctggcccctgaggaccctacctttcctgccgatacctggggcacctacctgctgaccacagagacaggactccagaaagatcacgccctgtgggaccacacagcccagaacctgctgagaatgggcctcgcctttctggtgctggttgccctcgtgtggttcctggtggaagattggctgagccggaagcggacaagagagagagccagcagagcctctacctgggagggaagaagaaggctgaacacccagacacttagggccaagcgatctggatctggagcaacaaacttctcactactcaaacaagcaggtgacgtggaggagaatcccgggcctactagtatggactggatttggcgcatccttttccttgtcggcgctgctaccggcgcgcattccttcgaacaagttcagcttcaacagcctggcgctgagctggtcaaacctggcgcttctgtgaagatgagctgcaaagccagcggctacgccttcagcagctactggatcaactggatgaagcagaaacccggccagggactcgaatggatcggccaaatctatcccggcgacggcgacaccaactacaacggcaagttcaagggcagagccacactgaccgccgatacctctagcagcacagcctacatgcagctgagcagcctgaccagcgaagatagcgccgtgtacttctgtgcccggtccatcacaacagtcgtgggctgcgctatggactattggggccagggaacaagcgtgaccgtgtctagtacgcgtgcctctacaaagggaccctccgtgtttcctctggctcccagcagcaagtctacaagcggaggaacagccgctctgggctgcctggtcaaggattactttcccgagcctgtgaccgtgtcctggaatagcggagcactgacaagcggcgtgcacacctttccagccgtgctgcaaagcagcggcctgtactctctgagcagcgtggtcacagtgcctagctctagcctgggcacccagacctacatctgcaatgtgaaccacaagcctagcaacaccaaggtggacaagagagtggaacccaagagctgtggtacccaacaacagaccctgcctaaaccattcatctgggctgaaccccactttatggttccgaaagagaaacaagtcacgatttgttgccaagggaattacggggccgtcgagtatcagctccactttgagggctccctgtttgctgtggatcggcccaagccacctgaaagaatcaacaaagtccaattctatattcctgatatgaactcccgcatggcaggccagtattcatgtatctaccgcgtgggagaactttggagtgaaccctctaacctgctggacctcgtcgtgacagagatgtatgatacacccacactgtctgtgcaccctgggccagaagttatcagcggagaaaaagttaccttttattgccgcctcgataccgctacctctatgttcctcttgctgaaagagggccgcagctctcacgtgcagcgaggctacggaaaggtccaagctgagtttcctctcggccccgtgaccaccgctcacaggggcacatatagatgttttggctcttataacaatcatgcctggtcattcccatccgagcctgtgaaactgctggtcacaggcgatattgagaatacctctctggccccagaagatcctacattccccgccgacacatggggaacatatctgctgacaaccgaaaccgggctgcaaaaggaccatgctctgtgggatcataccgctcagaatctgcttcggatggggcttgcattcctggtcctggtggctcttgtctggtttctggtcgaggactggctgtcccggaagagaaccagagaaagagcttccagggccagcacctgggaaggcagacgcagactgaatactcagaccctgcgcgccaagagaagcggatctggcgtgaagcagaccctgaatttcgacctgctgaagctggctggcgacgtggaatccaacccaggcccttctagaggccatatgaccgagtacaagcccacggtgcgcctcgccacccgcgacgacgtccccagggccgtacgcaccctcgccgccgcgttcgccgactaccccgccacgcgccacaccgtcgatccggaccgccacatcgagcgggtcaccgagctgcaagaactcttcctcacgcgcgtcgggctcgacatcggcaaggtgtgggtcgcggacgacggcgccgcggtggcggtctggaccacgccggagagcgtcgaagcgggggcggtgttcgccgagatcggcccgcgcatggccgagttgagcggttcccggctggccgcgcagcaacagatggaaggcctcctggcgccgcaccggcccaaggagcccgcgtggttcctggccaccgtcggcgtctcgcccgaccaccagggcaagggtctgggcagcgccgtcgtgctccccggagtggaggcggccgagcgcgccggggtgcccgccttcctggagacctccgcgccccgcaacctccccttctacgagcggctcggcttcaccgtcaccgccgacgtcgaggtgcccgaaggaccgcgcacctggtgcatgacccgcaagcccggtgcctga

SEQ ID NO: 1788 - DNA, 4773 bp, Artificial Sequence
  Synthetic Polynucleotide
atggccttaccagtgaccgccttgctcctgccgctggccttgctgctccacgccgccaggccggaagtgcagctggttgaatctggcggaggactggttcaggctggcggatctctgagactgtcttgtgccgccagcggcagaacctttagcatgggctggtttagacaggcccctggcaaagagagagagttcgtcgccgccatcacatactctggcggcagcccttactacgccgactctgtgaagggcagattcaccatcagccgggacaacgccaagaacaccgtgtacctccagatgaacagcctgaagcctgaggacaccgccgtgtactactgcgccgccaatccaacatacggcagcgactggaacgccgagaattggggccagggaacccaagtgacagtgtctagcggtaccggcggaggcggatctggcggcggaggtagcggtggcggaggatctgaattcgacatccagatgacacagagccctagcagcctgtctgccagcgtgggagacagagtgaccatcacatgcaaggccagcgaccacatcaacaactggctggcctggtatcagcagaagcctggacaggcccctaagctgctgatctacggcgctaccacactggaaacaggcgtgcccagcagattttctggcagcggctctggcaccgactacaccctgacaatatccagcctccagcctgaggacttcgccacctactactgtcagcagagctggaacaccccttggacattcggccagggcaccaagctggaaatcaagagactcgagggacagcctaaggccaatcctaccgtgacactgttccctccaagcagcgaagaactccaggccaacaaggccacacttgtgtgcctgatctccgacttctaccctggggctgtgacagtggcttggaaggccgatggatctcctgtgaaagccggcgtggaaaccaccaagccatccaagcagagcaacaacaaatacgccgccagctcctacctgagcctgacacctgagcagtggaagtcccacagatcctacagctgccaagtgacccacgaaggcagcaccgtggaaaagacagtggcccctacagagtgcagcggatcccagcagcagacactgcccaagcctttcatttgggccgagcctcacttcatggtgcccaaagaaaagcaagtgaccatctgctgccagggcaactacggcgctgtggaataccagctgcacttcgagggaagcctgttcgccgtggacagacctaagcctcctgagcggatcaacaaggtgcagttctacatccccgacatgaacagccggatggccggacagtacagctgcatctatagagtgggcgagctttggagcgagcccagcaatctgctggatctggtggtcaccgagatgtacgacacccctacactgagcgtgcaccccggacctgaagtgatctctggcgagaaagtgaccttctactgtcggctggataccgccaccagcatgtttctgctgctcaaagaaggccggtccagccacgtgcagcgcggatatggaaaagtgcaggccgagtttcccctgggacctgtgacaacagcccacagaggcacctacagatgcttcggcagctacaacaaccacgcttggagcttccctagcgagcccgtgaagttgcttgtgaccggcgacatcgagaacaccagtctggcccctgaggaccctacctttcctgccgatacctggggcacctacctgctgaccacagagacaggactccagaaagatcacgccctgtgggaccacacagcccagaacctgctgagaatgggcctcgcctttctggtgctggttgccctcgtgtggttcctggtggaagattggctgagccggaagcggacaagagagagagccagcagagcctctacctgggagggaagaagaaggctgaacacccagacacttagggccaagcgatctggatctggagcaacaaacttctcactactcaaacaagcaggtgacgtggaggagaatcccgggcctactagtatggactggatttggcgcatccttttccttgtcggcgctgctaccggcgcgcattccgggcccgaagtgcaactggttgaatccggtggcggcctggtgcaagcaggcggatctctcagacttagctgtgccgcctccggcagaaccttcacaatgggatggtttaggcaggctccagggaaagagagagagttcgtcgccgccatctctctgtctcccacactggcctactacgccgactctgtgaaaggccggttcaccatctccagagataatgccaagaacaccgtggtgctgcaaatgaactctctgaaacccgaggatacagccctgtactattgtgccgctgaccggaagtccgtgatgagcatcagacccgattactggggacagggcacacaagtcacagtgtcctctggatccggcggcggaggatctggcggaggcggatctgggggcggaggctctttcgaacaagttcagcttcaacagcctggcgctgagctggtcaaacctggcgcttctgtgaagatgagctgcaaagccagcggctacgccttcagcagctactggatcaactggatgaagcagaaacccggccagggactcgaatggatcggccaaatctatcccggcgacggcgacaccaactacaacggcaagttcaagggcagagccacactgaccgccgatacctctagcagcacagcctacatgcagctgagcagcctgaccagcgaagatagcgccgtgtacttctgtgcccggtccatcacaacagtcgtgggctgcgctatggactattggggccagggaacaagcgtgaccgtgtctagtacgcgtgcctctacaaagggaccctccgtgtttcctctggctcccagcagcaagtctacaagcggaggaacagccgctctgggctgcctggtcaaggattactttcccgagcctgtgaccgtgtcctggaatagcggagcactgacaagcggcgtgcacacctttccagccgtgctgcaaagcagcggcctgtactctctgagcagcgtggtcacagtgcctagctctagcctgggcacccagacctacatctgcaatgtgaaccacaagcctagcaacaccaaggtggacaagagagtggaacccaagagctgtggtacccaacaacagaccctgcctaaaccattcatctgggctgaaccccactttatggttccgaaagagaaacaagtcacgatttgttgccaagggaattacggggccgtcgagtatcagctccactttgagggctccctgtttgctgtggatcggcccaagccacctgaaagaatcaacaaagtccaattctatattcctgatatgaactcccgcatggcaggccagtattcatgtatctaccgcgtgggagaactttggagtgaaccctctaacctgctggacctcgtcgtgacagagatgtatgatacacccacactgtctgtgcaccctgggccagaagttatcagcggagaaaaagttaccttttattgccgcctcgataccgctacctctatgttcctcttgctgaaagagggccgcagctctcacgtgcagcgaggctacggaaaggtccaagctgagtttcctctcggccccgtgaccaccgctcacaggggcacatatagatgttttggctcttataacaatcatgcctggtcattcccatccgagcctgtgaaactgctggtcacaggcgatattgagaatacctctctggccccagaagatcctacattccccgccgacacatggggaacatatctgctgacaaccgaaaccgggctgcaaaaggaccatgctctgtgggatcataccgctcagaatctgcttcggatggggcttgcattcctggtcctggtggctcttgtctggtttctggtcgaggactggctgtcccggaagagaaccagagaaagagcttccagggccagcacctgggaaggcagacgcagactgaatactcagaccctgcgcgccaagagaagcggatctggcgtgaagcagaccctgaatttcgacctgctgaagctggctggcgacgtggaatccaacccaggcccttctagaggccatatgaccgagtacaagcccacggtgcgcctcgccacccgcgacgacgtccccagggccgtacgcaccctcgccgccgcgttcgccgactaccccgccacgcgccacaccgtcgatccggaccgccacatcgagcgggtcaccgagctgcaagaactcttcctcacgcgcgtcgggctcgacatcggcaaggtgtgggtcgcggacgacggcgccgcggtggcggtctggaccacgccggagagcgtcgaagcgggggcggtgttcgccgagatcggcccgcgcatggccgagttgagcggttcccggctggccgcgcagcaacagatggaaggcctcctggcgccgcaccggcccaaggagcccgcgtggttcctggccaccgtcggcgtctcgcccgaccaccagggcaagggtctgggcagcgccgtcgtgctccccggagtggaggcggccgagcgcgccggggtgcccgccttcctggagacctccgcgccccgcaacctccccttctacgagcggctcggcttcaccgtcaccgccgacgtcgaggtgcccgaaggaccgcgcacctggtgcatgacccgcaagcccggtgcctga

SEQ ID NO: 1789 - DNA, 3972 bp, Artificial Sequence
  Synthetic Polynucleotide
atggccttaccagtgaccgccttgctcctgccgctggccttgctgctccacgccgccaggccggaagtgcagctggttgaatctggcggaggactggttcaggctggcggatctctgagactgtcttgtgccgccagcggcagaacctttagcatgggctggtttagacaggcccctggcaaagagagagagttcgtcgccgccatcacatactctggcggcagcccttactacgccgactctgtgaagggcagattcaccatcagccgggacaacgccaagaacaccgtgtacctccagatgaacagcctgaagcctgaggacaccgccgtgtactactgcgccgccaatccaacatacggcagcgactggaacgccgagaattggggccagggaacccaagtgacagtgtctagcctcgagggacagcctaaggccaatcctaccgtgacactgttccctccaagcagcgaagaactccaggccaacaaggccacacttgtgtgcctgatctccgacttctaccctggggctgtgacagtggcttggaaggccgatggatctcctgtgaaagccggcgtggaaaccaccaagccatccaagcagagcaacaacaaatacgccgccagctcctacctgagcctgacacctgagcagtggaagtcccacagatcctacagctgccaagtgacccacgaaggcagcaccgtggaaaagacagtggcccctacagagtgcagcggatcccagcagcagacactgcccaagcctttcatttgggccgagcctcacttcatggtgcccaaagaaaagcaagtgaccatctgctgccagggcaactacggcgctgtggaataccagctgcacttcgagggaagcctgttcgccgtggacagacctaagcctcctgagcggatcaacaaggtgcagttctacatccccgacatgaacagccggatggccggacagtacagctgcatctatagagtgggcgagctttggagcgagcccagcaatctgctggatctggtggtcaccgagatgtacgacacccctacactgagcgtgcaccccggacctgaagtgatctctggcgagaaagtgaccttctactgtcggctggataccgccaccagcatgtttctgctgctcaaagaaggccggtccagccacgtgcagcgcggatatggaaaagtgcaggccgagtttcccctgggacctgtgacaacagcccacagaggcacctacagatgcttcggcagctacaacaaccacgcttggagcttccctagcgagcccgtgaagttgcttgtgaccggcgacatcgagaacaccagtctggcccctgaggaccctacctttcctgccgatacctggggcacctacctgctgaccacagagacaggactccagaaagatcacgccctgtgggaccacacagcccagaacctgctgagaatgggcctcgcctttctggtgctggttgccctcgtgtggttcctggtggaagattggctgagccggaagcggacaagagagagagccagcagagcctctacctgggagggaagaagaaggctgaacacccagacacttagggccaagcgatctggatctggagcaacaaacttctcactactcaaacaagcaggtgacgtggaggagaatcccgggcctactagtatggactggatttggcgcatccttttccttgtcggcgctgctaccggcgcgcattccgggcccgaagtgcaactggttgaatccggtggcggcctggtgcaagcaggcggatctctcagacttagctgtgccgcctccggcagaaccttcacaatgggatggtttaggcaggctccagggaaagagagagagttcgtcgccgccatctctctgtctcccacactggcctactacgccgactctgtgaaaggccggttcaccatctccagagataatgccaagaacaccgtggtgctgcaaatgaactctctgaaacccgaggatacagccctgtactattgtgccgctgaccggaagtccgtgatgagcatcagacccgattactggggacagggcacacaagtcacagtgtcctctacgcgtgcctctacaaagggaccctccgtgtttcctctggctcccagcagcaagtctacaagcggaggaacagccgctctgggctgcctggtcaaggattactttcccgagcctgtgaccgtgtcctggaatagcggagcactgacaagcggcgtgcacacctttccagccgtgctgcaaagcagcggcctgtactctctgagcagcgtggtcacagtgcctagctctagcctgggcacccagacctacatctgcaatgtgaaccacaagcctagcaacaccaaggtggacaagagagtggaacccaagagctgtggtacccaacaacagaccctgcctaaaccattcatctgggctgaaccccactttatggttccgaaagagaaacaagtcacgatttgttgccaagggaattacggggccgtcgagtatcagctccactttgagggctccctgtttgctgtggatcggcccaagccacctgaaagaatcaacaaagtccaattctatattcctgatatgaactcccgcatggcaggccagtattcatgtatctaccgcgtgggagaactttggagtgaaccctctaacctgctggacctcgtcgtgacagagatgtatgatacacccacactgtctgtgcaccctgggccagaagttatcagcggagaaaaagttaccttttattgccgcctcgataccgctacctctatgttcctcttgctgaaagagggccgcagctctcacgtgcagcgaggctacggaaaggtccaagctgagtttcctctcggccccgtgaccaccgctcacaggggcacatatagatgttttggctcttataacaatcatgcctggtcattcccatccgagcctgtgaaactgctggtcacaggcgatattgagaatacctctctggccccagaagatcctacattccccgccgacacatggggaacatatctgctgacaaccgaaaccgggctgcaaaaggaccatgctctgtgggatcataccgctcagaatctgcttcggatggggcttgcattcctggtcctggtggctcttgtctggtttctggtcgaggactggctgtcccggaagagaaccagagaaagagcttccagggccagcacctgggaaggcagacgcagactgaatactcagaccctgcgcgccaagagaagcggatctggcgtgaagcagaccctgaatttcgacctgctgaagctggctggcgacgtggaatccaacccaggcccttctagaggccatatgaccgagtacaagcccacggtgcgcctcgccacccgcgacgacgtccccagggccgtacgcaccctcgccgccgcgttcgccgactaccccgccacgcgccacaccgtcgatccggaccgccacatcgagcgggtcaccgagctgcaagaactcttcctcacgcgcgtcgggctcgacatcggcaaggtgtgggtcgcggacgacggcgccgcggtggcggtctggaccacgccggagagcgtcgaagcgggggcggtgttcgccgagatcggcccgcgcatggccgagttgagcggttcccggctggccgcgcagcaacagatggaaggcctcctggcgccgcaccggcccaaggagcccgcgtggttcctggccaccgtcggcgtctcgcccgaccaccagggcaagggtctgggcagcgccgtcgtgctccccggagtggaggcggccgagcgcgccggggtgcccgccttcctggagacctccgcgccccgcaacctccccttctacgagcggctcggcttcaccgtcaccgccgacgtcgaggtgcccgaaggaccgcgcacctggtgcatgacccgcaagcccggtgcctga

SEQ ID NO: 1790 - DNA, 3996 bp, Artificial Sequence
  Synthetic Polynucleotide
atggccttaccagtgaccgccttgctcctgccgctggccttgctgctccacgccgccaggccggacatccagatgacacagagccctagcagcctgtctgccagcgtgggagacagagtgaccatcacatgcaaggccagcgaccacatcaacaactggctggcctggtatcagcagaagcctggacaggcccctaagctgctgatctacggcgctaccacactggaaacaggcgtgcccagcagattttctggcagcggctctggcaccgactacaccctgacaatatccagcctccagcctgaggacttcgccacctactactgtcagcagagctggaacaccccttggacattcggccagggcaccaagctggaaatcaagagactcgaggacctgaagaacgtgttcccacctgaggtggccgtgttcgagcctagcgaggccgagatcagccacacccagaaagccaccctcgtgtgcctggctaccggcttctaccccgaccatgtggaactgtcttggtgggtcaacggcaaagaggtgcacagcggcgtgtctaccgacccccagccactgaaagaacagcccgccctgaacgacagccggtactgcctgagcagcagactgagagtgtccgccaccttctggcagaacccccggaaccacttcagatgccaggtgcagttctacggcctgagcgagaacgacgagtggacccaggacagagccaagcccgtgacccagatcgtgtctgccgaagcctggggcagagccgattgcggatcccagcagcagacactgcccaagcctttcatttgggccgagcctcacttcatggtgcccaaagaaaagcaagtgaccatctgctgccagggcaactacggcgctgtggaataccagctgcacttcgagggaagcctgttcgccgtggacagacctaagcctcctgagcggatcaacaaggtgcagttctacatccccgacatgaacagccggatggccggacagtacagctgcatctatagagtgggcgagctttggagcgagcccagcaatctgctggatctggtggtcaccgagatgtacgacacccctacactgagcgtgcaccccggacctgaagtgatctctggcgagaaagtgaccttctactgtcggctggataccgccaccagcatgtttctgctgctcaaagaaggccggtccagccacgtgcagcgcggatatggaaaagtgcaggccgagtttcccctgggacctgtgacaacagcccacagaggcacctacagatgcttcggcagctacaacaaccacgcttggagcttccctagcgagcccgtgaagttgcttgtgaccggcgacatcgagaacaccagtctggcccctgaggaccctacctttcctgccgatacctggggcacctacctgctgaccacagagacaggactccagaaagatcacgccctgtgggaccacacagcccagaacctgctgagaatgggcctcgcctttctggtgctggttgccctcgtgtggttcctggtggaagattggctgagccggaagcggacaagagagagagccagcagagcctctacctgggagggaagaagaaggctgaacacccagacacttagggccaagcgatctggatctggagcaacaaacttctcactactcaaacaagcaggtgacgtggaggagaatcccgggcctactagtatggactggatttggcgcatccttttccttgtcggcgctgctaccggcgcgcattccttcgaacaagttcagcttcaacagcctggcgctgagctggtcaaacctggcgcttctgtgaagatgagctgcaaagccagcggctacgccttcagcagctactggatcaactggatgaagcagaaacccggccagggactcgaatggatcggccaaatctatcccggcgacggcgacaccaactacaacggcaagttcaagggcagagccacactgaccgccgatacctctagcagcacagcctacatgcagctgagcagcctgaccagcgaagatagcgccgtgtacttctgtgcccggtccatcacaacagtcgtgggctgcgctatggactattggggccagggaacaagcgtgaccgtgtctagtacgcgtatccagaaccctgatcctgccgtgtaccagctgcgggatagcaagagcagcgacaagagcgtgtgtctgttcaccgacttcgacagccagaccaacgtgtcccagagcaaggactccgacgtgtacatcaccgataagaccgtgctggacatgcggagcatggacttcaagagcaactccgccgtggcctggtccaacaagtccgatttcgcctgcgccaacgccttcaacaacagcattatccccgaggacacattcttcccaagccccgagagcagctgcggtacccaacaacagaccctgcctaaaccattcatctgggctgaaccccactttatggttccgaaagagaaacaagtcacgatttgttgccaagggaattacggggccgtcgagtatcagctccactttgagggctccctgtttgctgtggatcggcccaagccacctgaaagaatcaacaaagtccaattctatattcctgatatgaactcccgcatggcaggccagtattcatgtatctaccgcgtgggagaactttggagtgaaccctctaacctgctggacctcgtcgtgacagagatgtatgatacacccacactgtctgtgcaccctgggccagaagttatcagcggagaaaaagttaccttttattgccgcctcgataccgctacctctatgttcctcttgctgaaagagggccgcagctctcacgtgcagcgaggctacggaaaggtccaagctgagtttcctctcggccccgtgaccaccgctcacaggggcacatatagatgttttggctcttataacaatcatgcctggtcattcccatccgagcctgtgaaactgctggtcacaggcgatattgagaatacctctctggccccagaagatcctacattccccgccgacacatggggaacatatctgctgacaaccgaaaccgggctgcaaaaggaccatgctctgtgggatcataccgctcagaatctgcttcggatggggcttgcattcctggtcctggtggctcttgtctggtttctggtcgaggactggctgtcccggaagagaaccagagaaagagcttccagggccagcacctgggaaggcagacgcagactgaatactcagaccctgcgcgccaagagaagcggatctggcgtgaagcagaccctgaatttcgacctgctgaagctggctggcgacgtggaatccaacccaggcccttctagaggccatatgaccgagtacaagcccacggtgcgcctcgccacccgcgacgacgtccccagggccgtacgcaccctcgccgccgcgttcgccgactaccccgccacgcgccacaccgtcgatccggaccgccacatcgagcgggtcaccgagctgcaagaactcttcctcacgcgcgtcgggctcgacatcggcaaggtgtgggtcgcggacgacggcgccgcggtggcggtctggaccacgccggagagcgtcgaagcgggggcggtgttcgccgagatcggcccgcgcatggccgagttgagcggttcccggctggccgcgcagcaacagatggaaggcctcctggcgccgcaccggcccaaggagcccgcgtggttcctggccaccgtcggcgtctcgcccgaccaccagggcaagggtctgggcagcgccgtcgtgctccccggagtggaggcggccgagcgcgccggggtgcccgccttcctggagacctccgcgccccgcaacctccccttctacgagcggctcggcttcaccgtcaccgccgacgtcgaggtgcccgaaggaccgcgcacctggtgcatgacccgcaagcccggtgcctga

SEQ ID NO: 1791 - DNA, 4407 bp, Artificial Sequence
  Synthetic Polynucleotide
atggccttaccagtgaccgccttgctcctgccgctggccttgctgctccacgccgccaggccggaagtgcagctggttgaatctggcggaggactggttcaggctggcggatctctgagactgtcttgtgccgccagcggcagaacctttagcatgggctggtttagacaggcccctggcaaagagagagagttcgtcgccgccatcacatactctggcggcagcccttactacgccgactctgtgaagggcagattcaccatcagccgggacaacgccaagaacaccgtgtacctccagatgaacagcctgaagcctgaggacaccgccgtgtactactgcgccgccaatccaacatacggcagcgactggaacgccgagaattggggccagggaacccaagtgacagtgtctagcggtaccggcggaggcggatctggcggcggaggtagcggtggcggaggatctgaattcgacatccagatgacacagagccctagcagcctgtctgccagcgtgggagacagagtgaccatcacatgcaaggccagcgaccacatcaacaactggctggcctggtatcagcagaagcctggacaggcccctaagctgctgatctacggcgctaccacactggaaacaggcgtgcccagcagattttctggcagcggctctggcaccgactacaccctgacaatatccagcctccagcctgaggacttcgccacctactactgtcagcagagctggaacaccccttggacattcggccagggcaccaagctggaaatcaagagactcgaggacctgaagaacgtgttcccacctgaggtggccgtgttcgagcctagcgaggccgagatcagccacacccagaaagccaccctcgtgtgcctggctaccggcttctaccccgaccatgtggaactgtcttggtgggtcaacggcaaagaggtgcacagcggcgtgtctaccgacccccagccactgaaagaacagcccgccctgaacgacagccggtactgcctgagcagcagactgagagtgtccgccaccttctggcagaacccccggaaccacttcagatgccaggtgcagttctacggcctgagcgagaacgacgagtggacccaggacagagccaagcccgtgacccagatcgtgtctgccgaagcctggggcagagccgattgcggatcccagcagcagacactgcccaagcctttcatttgggccgagcctcacttcatggtgcccaaagaaaagcaagtgaccatctgctgccagggcaactacggcgctgtggaataccagctgcacttcgagggaagcctgttcgccgtggacagacctaagcctcctgagcggatcaacaaggtgcagttctacatccccgacatgaacagccggatggccggacagtacagctgcatctatagagtgggcgagctttggagcgagcccagcaatctgctggatctggtggtcaccgagatgtacgacacccctacactgagcgtgcaccccggacctgaagtgatctctggcgagaaagtgaccttctactgtcggctggataccgccaccagcatgtttctgctgctcaaagaaggccggtccagccacgtgcagcgcggatatggaaaagtgcaggccgagtttcccctgggacctgtgacaacagcccacagaggcacctacagatgcttcggcagctacaacaaccacgcttggagcttccctagcgagcccgtgaagttgcttgtgaccggcgacatcgagaacaccagtctggcccctgaggaccctacctttcctgccgatacctggggcacctacctgctgaccacagagacaggactccagaaagatcacgccctgtgggaccacacagcccagaacctgctgagaatgggcctcgcctttctggtgctggttgccctcgtgtggttcctggtggaagattggctgagccggaagcggacaagagagagagccagcagagcctctacctgggagggaagaagaaggctgaacacccagacacttagggccaagcgatctggatctggagcaacaaacttctcactactcaaacaagcaggtgacgtggaggagaatcccgggcctactagtatggactggatttggcgcatccttttccttgtcggcgctgctaccggcgcgcattccttcgaacaagttcagcttcaacagcctggcgctgagctggtcaaacctggcgcttctgtgaagatgagctgcaaagccagcggctacgccttcagcagctactggatcaactggatgaagcagaaacccggccagggactcgaatggatcggccaaatctatcccggcgacggcgacaccaactacaacggcaagttcaagggcagagccacactgaccgccgatacctctagcagcacagcctacatgcagctgagcagcctgaccagcgaagatagcgccgtgtacttctgtgcccggtccatcacaacagtcgtgggctgcgctatggactattggggccagggaacaagcgtgaccgtgtctagtacgcgtatccagaaccctgatcctgccgtgtaccagctgcgggatagcaagagcagcgacaagagcgtgtgtctgttcaccgacttcgacagccagaccaacgtgtcccagagcaaggactccgacgtgtacatcaccgataagaccgtgctggacatgcggagcatggacttcaagagcaactccgccgtggcctggtccaacaagtccgatttcgcctgcgccaacgccttcaacaacagcattatccccgaggacacattcttcccaagccccgagagcagctgcggtacccaacaacagaccctgcctaaaccattcatctgggctgaaccccactttatggttccgaaagagaaacaagtcacgatttgttgccaagggaattacggggccgtcgagtatcagctccactttgagggctccctgtttgctgtggatcggcccaagccacctgaaagaatcaacaaagtccaattctatattcctgatatgaactcccgcatggcaggccagtattcatgtatctaccgcgtgggagaactttggagtgaaccctctaacctgctggacctcgtcgtgacagagatgtatgatacacccacactgtctgtgcaccctgggccagaagttatcagcggagaaaaagttaccttttattgccgcctcgataccgctacctctatgttcctcttgctgaaagagggccgcagctctcacgtgcagcgaggctacggaaaggtccaagctgagtttcctctcggccccgtgaccaccgctcacaggggcacatatagatgttttggctcttataacaatcatgcctggtcattcccatccgagcctgtgaaactgctggtcacaggcgatattgagaatacctctctggccccagaagatcctacattccccgccgacacatggggaacatatctgctgacaaccgaaaccgggctgcaaaaggaccatgctctgtgggatcataccgctcagaatctgcttcggatggggcttgcattcctggtcctggtggctcttgtctggtttctggtcgaggactggctgtcccggaagagaaccagagaaagagcttccagggccagcacctgggaaggcagacgcagactgaatactcagaccctgcgcgccaagagaagcggatctggcgtgaagcagaccctgaatttcgacctgctgaagctggctggcgacgtggaatccaacccaggcccttctagaggccatatgaccgagtacaagcccacggtgcgcctcgccacccgcgacgacgtccccagggccgtacgcaccctcgccgccgcgttcgccgactaccccgccacgcgccacaccgtcgatccggaccgccacatcgagcgggtcaccgagctgcaagaactcttcctcacgcgcgtcgggctcgacatcggcaaggtgtgggtcgcggacgacggcgccgcggtggcggtctggaccacgccggagagcgtcgaagcgggggcggtgttcgccgagatcggcccgcgcatggccgagttgagcggttcccggctggccgcgcagcaacagatggaaggcctcctggcgccgcaccggcccaaggagcccgcgtggttcctggccaccgtcggcgtctcgcccgaccaccagggcaagggtctgggcagcgccgtcgtgctccccggagtggaggcggccgagcgcgccggggtgcccgccttcctggagacctccgcgccccgcaacctccccttctacgagcggctcggcttcaccgtcaccgccgacgtcgaggtgcccgaaggaccgcgcacctggtgcatgacccgcaagcccggtgcctga

SEQ ID NO: 1792 - DNA, 4818 bp, Artificial Sequence
  Synthetic Polynucleotide
atggccttaccagtgaccgccttgctcctgccgctggccttgctgctccacgccgccaggccggaagtgcagctggttgaatctggcggaggactggttcaggctggcggatctctgagactgtcttgtgccgccagcggcagaacctttagcatgggctggtttagacaggcccctggcaaagagagagagttcgtcgccgccatcacatactctggcggcagcccttactacgccgactctgtgaagggcagattcaccatcagccgggacaacgccaagaacaccgtgtacctccagatgaacagcctgaagcctgaggacaccgccgtgtactactgcgccgccaatccaacatacggcagcgactggaacgccgagaattggggccagggaacccaagtgacagtgtctagcggtaccggcggaggcggatctggcggcggaggtagcggtggcggaggatctgaattcgacatccagatgacacagagccctagcagcctgtctgccagcgtgggagacagagtgaccatcacatgcaaggccagcgaccacatcaacaactggctggcctggtatcagcagaagcctggacaggcccctaagctgctgatctacggcgctaccacactggaaacaggcgtgcccagcagattttctggcagcggctctggcaccgactacaccctgacaatatccagcctccagcctgaggacttcgccacctactactgtcagcagagctggaacaccccttggacattcggccagggcaccaagctggaaatcaagagactcgaggacctgaagaacgtgttcccacctgaggtggccgtgttcgagcctagcgaggccgagatcagccacacccagaaagccaccctcgtgtgcctggctaccggcttctaccccgaccatgtggaactgtcttggtgggtcaacggcaaagaggtgcacagcggcgtgtctaccgacccccagccactgaaagaacagcccgccctgaacgacagccggtactgcctgagcagcagactgagagtgtccgccaccttctggcagaacccccggaaccacttcagatgccaggtgcagttctacggcctgagcgagaacgacgagtggacccaggacagagccaagcccgtgacccagatcgtgtctgccgaagcctggggcagagccgattgcggatcccagcagcagacactgcccaagcctttcatttgggccgagcctcacttcatggtgcccaaagaaaagcaagtgaccatctgctgccagggcaactacggcgctgtggaataccagctgcacttcgagggaagcctgttcgccgtggacagacctaagcctcctgagcggatcaacaaggtgcagttctacatccccgacatgaacagccggatggccggacagtacagctgcatctatagagtgggcgagctttggagcgagcccagcaatctgctggatctggtggtcaccgagatgtacgacacccctacactgagcgtgcaccccggacctgaagtgatctctggcgagaaagtgaccttctactgtcggctggataccgccaccagcatgtttctgctgctcaaagaaggccggtccagccacgtgcagcgcggatatggaaaagtgcaggccgagtttcccctgggacctgtgacaacagcccacagaggcacctacagatgcttcggcagctacaacaaccacgcttggagcttccctagcgagcccgtgaagttgcttgtgaccggcgacatcgagaacaccagtctggcccctgaggaccctacctttcctgccgatacctggggcacctacctgctgaccacagagacaggactccagaaagatcacgccctgtgggaccacacagcccagaacctgctgagaatgggcctcgcctttctggtgctggttgccctcgtgtggttcctggtggaagattggctgagccggaagcggacaagagagagagccagcagagcctctacctgggagggaagaagaaggctgaacacccagacacttagggccaagcgatctggatctggagcaacaaacttctcactactcaaacaagcaggtgacgtggaggagaatcccgggcctactagtatggactggatttggcgcatccttttccttgtcggcgctgctaccggcgcgcattccgggcccgaagtgcaactggttgaatccggtggcggcctggtgcaagcaggcggatctctcagacttagctgtgccgcctccggcagaaccttcacaatgggatggtttaggcaggctccagggaaagagagagagttcgtcgccgccatctctctgtctcccacactggcctactacgccgactctgtgaaaggccggttcaccatctccagagataatgccaagaacaccgtggtgctgcaaatgaactctctgaaacccgaggatacagccctgtactattgtgccgctgaccggaagtccgtgatgagcatcagacccgattactggggacagggcacacaagtcacagtgtcctctggatccggcggcggaggatctggcggaggcggatctgggggcggaggctctttcgaacaagttcagcttcaacagcctggcgctgagctggtcaaacctggcgcttctgtgaagatgagctgcaaagccagcggctacgccttcagcagctactggatcaactggatgaagcagaaacccggccagggactcgaatggatcggccaaatctatcccggcgacggcgacaccaactacaacggcaagttcaagggcagagccacactgaccgccgatacctctagcagcacagcctacatgcagctgagcagcctgaccagcgaagatagcgccgtgtacttctgtgcccggtccatcacaacagtcgtgggctgcgctatggactattggggccagggaacaagcgtgaccgtgtctagtacgcgtatccagaaccctgatcctgccgtgtaccagctgcgggatagcaagagcagcgacaagagcgtgtgtctgttcaccgacttcgacagccagaccaacgtgtcccagagcaaggactccgacgtgtacatcaccgataagaccgtgctggacatgcggagcatggacttcaagagcaactccgccgtggcctggtccaacaagtccgatttcgcctgcgccaacgccttcaacaacagcattatccccgaggacacattcttcccaagccccgagagcagctgcggtacccaacaacagaccctgcctaaaccattcatctgggctgaaccccactttatggttccgaaagagaaacaagtcacgatttgttgccaagggaattacggggccgtcgagtatcagctccactttgagggctccctgtttgctgtggatcggcccaagccacctgaaagaatcaacaaagtccaattctatattcctgatatgaactcccgcatggcaggccagtattcatgtatctaccgcgtgggagaactttggagtgaaccctctaacctgctggacctcgtcgtgacagagatgtatgatacacccacactgtctgtgcaccctgggccagaagttatcagcggagaaaaagttaccttttattgccgcctcgataccgctacctctatgttcctcttgctgaaagagggccgcagctctcacgtgcagcgaggctacggaaaggtccaagctgagtttcctctcggccccgtgaccaccgctcacaggggcacatatagatgttttggctcttataacaatcatgcctggtcattcccatccgagcctgtgaaactgctggtcacaggcgatattgagaatacctctctggccccagaagatcctacattccccgccgacacatggggaacatatctgctgacaaccgaaaccgggctgcaaaaggaccatgctctgtgggatcataccgctcagaatctgcttcggatggggcttgcattcctggtcctggtggctcttgtctggtttctggtcgaggactggctgtcccggaagagaaccagagaaagagcttccagggccagcacctgggaaggcagacgcagactgaatactcagaccctgcgcgccaagagaagcggatctggcgtgaagcagaccctgaatttcgacctgctgaagctggctggcgacgtggaatccaacccaggcccttctagaggccatatgaccgagtacaagcccacggtgcgcctcgccacccgcgacgacgtccccagggccgtacgcaccctcgccgccgcgttcgccgactaccccgccacgcgccacaccgtcgatccggaccgccacatcgagcgggtcaccgagctgcaagaactcttcctcacgcgcgtcgggctcgacatcggcaaggtgtgggtcgcggacgacggcgccgcggtggcggtctggaccacgccggagagcgtcgaagcgggggcggtgttcgccgagatcggcccgcgcatggccgagttgagcggttcccggctggccgcgcagcaacagatggaaggcctcctggcgccgcaccggcccaaggagcccgcgtggttcctggccaccgtcggcgtctcgcccgaccaccagggcaagggtctgggcagcgccgtcgtgctccccggagtggaggcggccgagcgcgccggggtgcccgccttcctggagacctccgcgccccgcaacctccccttctacgagcggctcggcttcaccgtcaccgccgacgtcgaggtgcccgaaggaccgcgcacctggtgcatgacccgcaagcccggtgcctga

SEQ ID NO: 1793 - DNA, 4017 bp, Artificial Sequence
  Synthetic Polynucleotide
atggccttaccagtgaccgccttgctcctgccgctggccttgctgctccacgccgccaggccggaagtgcagctggttgaatctggcggaggactggttcaggctggcggatctctgagactgtcttgtgccgccagcggcagaacctttagcatgggctggtttagacaggcccctggcaaagagagagagttcgtcgccgccatcacatactctggcggcagcccttactacgccgactctgtgaagggcagattcaccatcagccgggacaacgccaagaacaccgtgtacctccagatgaacagcctgaagcctgaggacaccgccgtgtactactgcgccgccaatccaacatacggcagcgactggaacgccgagaattggggccagggaacccaagtgacagtgtctagcctcgaggacctgaagaacgtgttcccacctgaggtggccgtgttcgagcctagcgaggccgagatcagccacacccagaaagccaccctcgtgtgcctggctaccggcttctaccccgaccatgtggaactgtcttggtgggtcaacggcaaagaggtgcacagcggcgtgtctaccgacccccagccactgaaagaacagcccgccctgaacgacagccggtactgcctgagcagcagactgagagtgtccgccaccttctggcagaacccccggaaccacttcagatgccaggtgcagttctacggcctgagcgagaacgacgagtggacccaggacagagccaagcccgtgacccagatcgtgtctgccgaagcctggggcagagccgattgcggatcccagcagcagacactgcccaagcctttcatttgggccgagcctcacttcatggtgcccaaagaaaagcaagtgaccatctgctgccagggcaactacggcgctgtggaataccagctgcacttcgagggaagcctgttcgccgtggacagacctaagcctcctgagcggatcaacaaggtgcagttctacatccccgacatgaacagccggatggccggacagtacagctgcatctatagagtgggcgagctttggagcgagcccagcaatctgctggatctggtggtcaccgagatgtacgacacccctacactgagcgtgcaccccggacctgaagtgatctctggcgagaaagtgaccttctactgtcggctggataccgccaccagcatgtttctgctgctcaaagaaggccggtccagccacgtgcagcgcggatatggaaaagtgcaggccgagtttcccctgggacctgtgacaacagcccacagaggcacctacagatgcttcggcagctacaacaaccacgcttggagcttccctagcgagcccgtgaagttgcttgtgaccggcgacatcgagaacaccagtctggcccctgaggaccctacctttcctgccgatacctggggcacctacctgctgaccacagagacaggactccagaaagatcacgccctgtgggaccacacagcccagaacctgctgagaatgggcctcgcctttctggtgctggttgccctcgtgtggttcctggtggaagattggctgagccggaagcggacaagagagagagccagcagagcctctacctgggagggaagaagaaggctgaacacccagacacttagggccaagcgatctggatctggagcaacaaacttctcactactcaaacaagcaggtgacgtggaggagaatcccgggcctactagtatggactggatttggcgcatccttttccttgtcggcgctgctaccggcgcgcattccgggcccgaagtgcaactggttgaatccggtggcggcctggtgcaagcaggcggatctctcagacttagctgtgccgcctccggcagaaccttcacaatgggatggtttaggcaggctccagggaaagagagagagttcgtcgccgccatctctctgtctcccacactggcctactacgccgactctgtgaaaggccggttcaccatctccagagataatgccaagaacaccgtggtgctgcaaatgaactctctgaaacccgaggatacagccctgtactattgtgccgctgaccggaagtccgtgatgagcatcagacccgattactggggacagggcacacaagtcacagtgtcctctacgcgtatccagaaccctgatcctgccgtgtaccagctgcgggatagcaagagcagcgacaagagcgtgtgtctgttcaccgacttcgacagccagaccaacgtgtcccagagcaaggactccgacgtgtacatcaccgataagaccgtgctggacatgcggagcatggacttcaagagcaactccgccgtggcctggtccaacaagtccgatttcgcctgcgccaacgccttcaacaacagcattatccccgaggacacattcttcccaagccccgagagcagctgcggtacccaacaacagaccctgcctaaaccattcatctgggctgaaccccactttatggttccgaaagagaaacaagtcacgatttgttgccaagggaattacggggccgtcgagtatcagctccactttgagggctccctgtttgctgtggatcggcccaagccacctgaaagaatcaacaaagtccaattctatattcctgatatgaactcccgcatggcaggccagtattcatgtatctaccgcgtgggagaactttggagtgaaccctctaacctgctggacctcgtcgtgacagagatgtatgatacacccacactgtctgtgcaccctgggccagaagttatcagcggagaaaaagttaccttttattgccgcctcgataccgctacctctatgttcctcttgctgaaagagggccgcagctctcacgtgcagcgaggctacggaaaggtccaagctgagtttcctctcggccccgtgaccaccgctcacaggggcacatatagatgttttggctcttataacaatcatgcctggtcattcccatccgagcctgtgaaactgctggtcacaggcgatattgagaatacctctctggccccagaagatcctacattccccgccgacacatggggaacatatctgctgacaaccgaaaccgggctgcaaaaggaccatgctctgtgggatcataccgctcagaatctgcttcggatggggcttgcattcctggtcctggtggctcttgtctggtttctggtcgaggactggctgtcccggaagagaaccagagaaagagcttccagggccagcacctgggaaggcagacgcagactgaatactcagaccctgcgcgccaagagaagcggatctggcgtgaagcagaccctgaatttcgacctgctgaagctggctggcgacgtggaatccaacccaggcccttctagaggccatatgaccgagtacaagcccacggtgcgcctcgccacccgcgacgacgtccccagggccgtacgcaccctcgccgccgcgttcgccgactaccccgccacgcgccacaccgtcgatccggaccgccacatcgagcgggtcaccgagctgcaagaactcttcctcacgcgcgtcgggctcgacatcggcaaggtgtgggtcgcggacgacggcgccgcggtggcggtctggaccacgccggagagcgtcgaagcgggggcggtgttcgccgagatcggcccgcgcatggccgagttgagcggttcccggctggccgcgcagcaacagatggaaggcctcctggcgccgcaccggcccaaggagcccgcgtggttcctggccaccgtcggcgtctcgcccgaccaccagggcaagggtctgggcagcgccgtcgtgctccccggagtggaggcggccgagcgcgccggggtgcccgccttcctggagacctccgcgccccgcaacctccccttctacgagcggctcggcttcaccgtcaccgccgacgtcgaggtgcccgaaggaccgcgcacctggtgcatgacccgcaagcccggtgcctga

SEQ ID NO: 1794 - DNA, 2037 bp, Artificial Sequence
  Synthetic Polynucleotide
atggccttaccagtgaccgccttgctcctgccgctggccttgctgctccacgccgccaggccggcatgcgaagtgcagctgcttgaaagtggcggcggactgattcagcctggcggatctctgagactgagctgtgccgccagcggcttcaccttttctagccacgccatgacctgggtccgacaggcacctggaaaagggcttgaatgggtgtccgccatcagcggctctggcgattacacacactacgccgacagcgtgaagggcagattcaccatcagcagagacaacagcaagaacaccgtgtacctccagatgaacagcctgagagccgaggacagcgccgtgtattattgcgccaaggatgaggatggcggcagcctgcttggacacagaggacaaggcaccctggtcaccgtttcttccggtaccggcggaggcggatctggcggcggaggtagcggtggcggaggatctgaattcggatctctcgagcagcagcagacactgcccaagcctttcatttgggccgagcctcacttcatggtgcccaaagaaaagcaagtgaccatctgctgccagggcaactacggcgctgtggaataccagctgcacttcgagggaagcctgttcgccgtggacagacctaagcctcctgagcggatcaacaaggtgcagttctacatccccgacatgaacagccggatggccggacagtacagctgcatctatagagtgggcgagctttggagcgagcccagcaatctgctggatctggtggtcaccgagatgtacgacacccctacactgagcgtgcaccccggacctgaagtgatctctggcgagaaagtgaccttctactgtcggctggataccgccaccagcatgtttctgctgctcaaagaaggccggtccagccacgtgcagcgcggatatggaaaagtgcaggccgagtttcccctgggacctgtgacaacagcccacagaggcacctacagatgcttcggcagctacaacaaccacgcttggagcttccctagcgagcccgtgaagttgcttgtgaccggcgacatcgagaacaccagtctggcccctgaggaccctacctttcctgccgatacctggggcacctacctgctgaccacagagacaggactccagaaagatcacgccctgtgggaccacacagcccagaacctgctgagaatgggcctcgcctttctggtgctggttgccctcgtgtggttcctggtggaagattggctgagccggaagcggacaagagagagagccagcagagcctctacctgggagggaagaagaaggctgaacacccagacacttagggccaagcgatctggatctggagcaacaaacttctcactactcaaacaagcaggtgacgtggaggagaatcccgggcctactagaggccatatgaccgagtacaagcccacggtgcgcctcgccacccgcgacgacgtccccagggccgtacgcaccctcgccgccgcgttcgccgactaccccgccacgcgccacaccgtcgatccggaccgccacatcgagcgggtcaccgagctgcaagaactcttcctcacgcgcgtcgggctcgacatcggcaaggtgtgggtcgcggacgacggcgccgcggtggcggtctggaccacgccggagagcgtcgaagcgggggcggtgttcgccgagatcggcccgcgcatggccgagttgagcggttcccggctggccgcgcagcaacagatggaaggcctcctggcgccgcaccggcccaaggagcccgcgtggttcctggccaccgtcggcgtctcgcccgaccaccagggcaagggtctgggcagcgccgtcgtgctccccggagtggaggcggccgagcgcgccggggtgcccgccttcctggagacctccgcgccccgcaacctccccttctacgagcggctcggcttcaccgtcaccgccgacgtcgaggtgcccgaaggaccgcgcacctggtgcatgacccgcaagcccggtgcctga

SEQ ID NO: 1795 - DNA, 2619 bp, Artificial Sequence
  Synthetic Polynucleotide
atggccttaccagtgaccgccttgctcctgccgctggccttgctgctccacgccgccaggccggacatccagatgacacagagccctagcagcctgtctgccagcgtgggagacagagtgaccatcacatgcaaggccagcgaccacatcaacaactggctggcctggtatcagcagaagcctggacaggcccctaagctgctgatctacggcgctaccacactggaaacaggcgtgcccagcagattttctggcagcggctctggcaccgactacaccctgacaatatccagcctccagcctgaggacttcgccacctactactgtcagcagagctggaacaccccttggacattcggccagggcaccaagctggaaatcaagagactcgagatcggctggctgttgctccaggcccctcggtgggtgttcaaggaggaagaccctattcacctgaggtgtcacagctggaagaacactgctctgcataaggtcacatatttacagaatggcaaaggcaggaagtattttcatcataattctgacttctacattccaaaagccacactcaaagacagcggctcctacttctgcagggggcttgttgggagtaaaaatgtgtcttcagagactgtgaacatcaccatcactcaaggtttggcagtgtcaaccatctcatcattctttccacctggctaccaagtgtccttctgcctggtcatggtgctgctgttcgccgtggataccggcctgtacttcagcgtcaagaccaacatccggtccagcaccagagactggaaggaccacaagttcaagtggcggaaggaccctcaggacaagagggccaagcgatctggatctggagcaacaaacttctcactactcaaacaagcaggtgacgtggaggagaatcccgggcctactagtatggactggatttggcgcatccttttccttgtcggcgctgctaccggcgcgcattccttcgaacaagttcagcttcaacagcctggcgctgagctggtcaaacctggcgcttctgtgaagatgagctgcaaagccagcggctacgccttcagcagctactggatcaactggatgaagcagaaacccggccagggactcgaatggatcggccaaatctatcccggcgacggcgacaccaactacaacggcaagttcaagggcagagccacactgaccgccgatacctctagcagcacagcctacatgcagctgagcagcctgaccagcgaagatagcgccgtgtacttctgtgcccggtccatcacaacagtcgtgggctgcgctatggactattggggccagggaacaagcgtgaccgtgtctagtacgcgtgagatgtatgatacacccacactgtctgtgcaccctgggccagaagttatcagcggagaaaaagttaccttttattgccgcctcgataccgctacctctatgttcctcttgctgaaagagggccgcagctctcacgtgcagcgaggctacggaaaggtccaagctgagtttcctctcggccccgtgaccaccgctcacaggggcacatatagatgttttggctcttataacaatcatgcctggtcattcccatccgagcctgtgaaactgctggtcacaggcgatattgagaatacctctctggccccagaagatcctacattccccgccgacacatggggaacatatctgctgacaaccgaaaccgggctgcaaaaggaccatgctctgtgggatcataccgctcagaatctgcttcggatggggcttgcattcctggtcctggtggctcttgtctggtttctggtcgaggactggctgtcccggaagagaaccagagaaagagcttccagggccagcacctgggaaggcagacgcagactgaatactcagaccctgcgcgccaagagaagcggatctggcgtgaagcagaccctgaatttcgacctgctgaagctggctggcgacgtggaatccaacccaggcccttctagaggccatatgaccgagtacaagcccacggtgcgcctcgccacccgcgacgacgtccccagggccgtacgcaccctcgccgccgcgttcgccgactaccccgccacgcgccacaccgtcgatccggaccgccacatcgagcgggtcaccgagctgcaagaactcttcctcacgcgcgtcgggctcgacatcggcaaggtgtgggtcgcggacgacggcgccgcggtggcggtctggaccacgccggagagcgtcgaagcgggggcggtgttcgccgagatcggcccgcgcatggccgagttgagcggttcccggctggccgcgcagcaacagatggaaggcctcctggcgccgcaccggcccaaggagcccgcgtggttcctggccaccgtcggcgtctcgcccgaccaccagggcaagggtctgggcagcgccgtcgtgctccccggagtggaggcggccgagcgcgccggggtgcccgccttcctggagacctccgcgccccgcaacctccccttctacgagcggctcggcttcaccgtcaccgccgacgtcgaggtgcccgaaggaccgcgcacctggtgcatgacccgcaagcccggtgcctga

SEQ ID NO: 1796 - DNA, 2781 bp, Artificial Sequence
  Synthetic Polynucleotide
atggccttaccagtgaccgccttgctcctgccgctggccttgctgctccacgccgccaggccggcatgcgaagtgcagctgcttgaaagtggcggcggactgattcagcctggcggatctctgagactgagctgtgccgccagcggcttcaccttttctagccacgccatgacctgggtccgacaggcacctggaaaagggcttgaatgggtgtccgccatcagcggctctggcgattacacacactacgccgacagcgtgaagggcagattcaccatcagcagagacaacagcaagaacaccgtgtacctccagatgaacagcctgagagccgaggacagcgccgtgtattattgcgccaaggatgaggatggcggcagcctgcttggacacagaggacaaggcaccctggtcaccgtttcttccggtaccggcggaggcggatctggcggcggaggtagcggtggcggaggatctgaattcggatctctcgagatcggctggctgttgctccaggcccctcggtgggtgttcaaggaggaagaccctattcacctgaggtgtcacagctggaagaacactgctctgcataaggtcacatatttacagaatggcaaaggcaggaagtattttcatcataattctgacttctacattccaaaagccacactcaaagacagcggctcctacttctgcagggggcttgttgggagtaaaaatgtgtcttcagagactgtgaacatcaccatcactcaaggtttggcagtgtcaaccatctcatcattctttccacctggctaccaagtgtccttctgcctggtcatggtgctgctgttcgccgtggataccggcctgtacttcagcgtcaagaccaacatccggtccagcaccagagactggaaggaccacaagttcaagtggcggaaggaccctcaggacaagagggccaagcgatctggatctggagcaacaaacttctcactactcaaacaagcaggtgacgtggaggagaatcccgggcctactagtgccaccatggactggatttggcgcatccttttccttgtcggcgctgctaccggcgcccattccgggcccgaagtgcagctggttgaatctggcggaggactggttcaggctggcggatctctgagactgtcttgtgccgccagcggcagaacctttagcatgggctggtttagacaggcccctggcaaagagagagagttcgtcgccgccatcacatactctggcggcagcccttactacgccgactctgtgaagggcagattcaccatcagccgggacaacgccaagaacaccgtgtacctccagatgaacagcctgaagcctgaggacaccgccgtgtactactgcgccgccaatccaacatacggcagcgactggaacgccgagaattggggccagggaacccaagtgacagtgtctagcggatccggcggcggaggatctggcggaggcggatctgggggcggaggctctttcgaaggcagcacgcgtgagatgtatgatacacccacactgtctgtgcaccctgggccagaagttatcagcggagaaaaagttaccttttattgccgcctcgataccgctacctctatgttcctcttgctgaaagagggccgcagctctcacgtgcagcgaggctacggaaaggtccaagctgagtttcctctcggccccgtgaccaccgctcacaggggcacatatagatgttttggctcttataacaatcatgcctggtcattcccatccgagcctgtgaaactgctggtcacaggcgatattgagaatacctctctggccccagaagatcctacattccccgccgacacatggggaacatatctgctgacaaccgaaaccgggctgcaaaaggaccatgctctgtgggatcataccgctcagaatctgcttcggatggggcttgcattcctggtcctggtggctcttgtctggtttctggtcgaggactggctgtcccggaagagaaccagagaaagagcttccagggccagcacctgggaaggcagacgcagactgaatactcagaccctgcgcgccaagagaagcggatctggcgtgaagcagaccctgaatttcgacctgctgaagctggctggcgacgtggaatccaacccaggcccttctagaggccatatgaccgagtacaagcccacggtgcgcctcgccacccgcgacgacgtccccagggccgtacgcaccctcgccgccgcgttcgccgactaccccgccacgcgccacaccgtcgatccggaccgccacatcgagcgggtcaccgagctgcaagaactcttcctcacgcgcgtcgggctcgacatcggcaaggtgtgggtcgcggacgacggcgccgcggtggcggtctggaccacgccggagagcgtcgaagcgggggcggtgttcgccgagatcggcccgcgcatggccgagttgagcggttcccggctggccgcgcagcaacagatggaaggcctcctggcgccgcaccggcccaaggagcccgcgtggttcctggccaccgtcggcgtctcgcccgaccaccagggcaagggtctgggcagcgccgtcgtgctccccggagtggaggcggccgagcgcgccggggtgcccgccttcctggagacctccgcgccccgcaacctccccttctacgagcggctcggcttcaccgtcaccgccgacgtcgaggtgcccgaaggaccgcgcacctggtgcatgacccgcaagcccggtgcctga

SEQ ID NO: 1797 - DNA, 3231 bp, Artificial Sequence
  Synthetic Polynucleotide
atggccttaccagtgaccgccttgctcctgccgctggccttgctgctccacgccgccaggccggacatccagatgacacagagccctagcagcctgtctgccagcgtgggagacagagtgaccatcacatgcaaggccagcgaccacatcaacaactggctggcctggtatcagcagaagcctggacaggcccctaagctgctgatctacggcgctaccacactggaaacaggcgtgcccagcagattttctggcagcggctctggcaccgactacaccctgacaatatccagcctccagcctgaggacttcgccacctactactgtcagcagagctggaacaccccttggacattcggccagggcaccaagctggaaatcaagagactcgagggacagcctaaggccaatcctaccgtgacactgttccctccaagcagcgaagaactccaggccaacaaggccacacttgtgtgcctgatctccgacttctaccctggggctgtgacagtggcttggaaggccgatggatctcctgtgaaagccggcgtggaaaccaccaagccatccaagcagagcaacaacaaatacgccgccagctcctacctgagcctgacacctgagcagtggaagtcccacagatcctacagctgccaagtgacccacgaaggcagcaccgtggaaaagacagtggcccctacagagtgcagcggatccatcggctggctgttgctccaggcccctcggtgggtgttcaaggaggaagaccctattcacctgaggtgtcacagctggaagaacactgctctgcataaggtcacatatttacagaatggcaaaggcaggaagtattttcatcataattctgacttctacattccaaaagccacactcaaagacagcggctcctacttctgcagggggcttgttgggagtaaaaatgtgtcttcagagactgtgaacatcaccatcactcaaggtttggcagtgtcaaccatctcatcattctttccacctggctaccaagtgtccttctgcctggtcatggtgctgctgttcgccgtggataccggcctgtacttcagcgtcaagaccaacatccggtccagcaccagagactggaaggaccacaagttcaagtggcggaaggaccctcaggacaagagggccaagcgatctggatctggagcaacaaacttctcactactcaaacaagcaggtgacgtggaggagaatcccgggcctactagtatggactggatttggcgcatccttttccttgtcggcgctgctaccggcgcgcattccttcgaacaagttcagcttcaacagcctggcgctgagctggtcaaacctggcgcttctgtgaagatgagctgcaaagccagcggctacgccttcagcagctactggatcaactggatgaagcagaaacccggccagggactcgaatggatcggccaaatctatcccggcgacggcgacaccaactacaacggcaagttcaagggcagagccacactgaccgccgatacctctagcagcacagcctacatgcagctgagcagcctgaccagcgaagatagcgccgtgtacttctgtgcccggtccatcacaacagtcgtgggctgcgctatggactattggggccagggaacaagcgtgaccgtgtctagtacgcgtgcctctacaaagggaccctccgtgtttcctctggctcccagcagcaagtctacaagcggaggaacagccgctctgggctgcctggtcaaggattactttcccgagcctgtgaccgtgtcctggaatagcggagcactgacaagcggcgtgcacacctttccagccgtgctgcaaagcagcggcctgtactctctgagcagcgtggtcacagtgcctagctctagcctgggcacccagacctacatctgcaatgtgaaccacaagcctagcaacaccaaggtggacaagagagtggaacccaagagctgtggtaccgagatgtatgatacacccacactgtctgtgcaccctgggccagaagttatcagcggagaaaaagttaccttttattgccgcctcgataccgctacctctatgttcctcttgctgaaagagggccgcagctctcacgtgcagcgaggctacggaaaggtccaagctgagtttcctctcggccccgtgaccaccgctcacaggggcacatatagatgttttggctcttataacaatcatgcctggtcattcccatccgagcctgtgaaactgctggtcacaggcgatattgagaatacctctctggccccagaagatcctacattccccgccgacacatggggaacatatctgctgacaaccgaaaccgggctgcaaaaggaccatgctctgtgggatcataccgctcagaatctgcttcggatggggcttgcattcctggtcctggtggctcttgtctggtttctggtcgaggactggctgtcccggaagagaaccagagaaagagcttccagggccagcacctgggaaggcagacgcagactgaatactcagaccctgcgcgccaagagaagcggatctggcgtgaagcagaccctgaatttcgacctgctgaagctggctggcgacgtggaatccaacccaggcccttctagaggcgggatccacaccatggctacctacgaggtgctgtgcgaggtggcaagaaagctgggcaccgacgacagagaagtggtgctgttcctgctgaacgtgttcatccctcagcctacactggcccagctgatcggtgcactgagagccctgaaagaggaaggccggctgacctttcctctgctggccgaatgcctgttcagagccggaagaagggatctgctgcgggacctgctgcatctggaccccagatttctggaaagacacctggccggcaccatgagctacttcagcccttaccagctgaccgtgctgcacgttgacggcgaactgtgcgccagagatattcggagcctgatcttcctgagcaaggacaccatcggcagccggtctacccctcagacatttctgcactgggtgtactgcatggaaaacctggacctgctcggccccacagatgtggatgccctgatgtccatgctgagaagcctgagcagagtggacctccagagacaggtgcagacactgatgggactgcacctgagcggacctagccacagccagcactacagacacacccct

SEQ ID NO: 1798 - DNA, 3390 bp, Artificial Sequence
  Synthetic Polynucleotide
atggccttaccagtgaccgccttgctcctgccgctggccttgctgctccacgccgccaggccggacatccagatgacacagagccctagcagcctgtctgccagcgtgggagacagagtgaccatcacatgcaaggccagcgaccacatcaacaactggctggcctggtatcagcagaagcctggacaggcccctaagctgctgatctacggcgctaccacactggaaacaggcgtgcccagcagattttctggcagcggctctggcaccgactacaccctgacaatatccagcctccagcctgaggacttcgccacctactactgtcagcagagctggaacaccccttggacattcggccagggcaccaagctggaaatcaagagactcgagggacagcctaaggccaatcctaccgtgacactgttccctccaagcagcgaagaactccaggccaacaaggccacacttgtgtgcctgatctccgacttctaccctggggctgtgacagtggcttggaaggccgatggatctcctgtgaaagccggcgtggaaaccaccaagccatccaagcagagcaacaacaaatacgccgccagctcctacctgagcctgacacctgagcagtggaagtcccacagatcctacagctgccaagtgacccacgaaggcagcaccgtggaaaagacagtggcccctacagagtgcagcggatccatcggctggctgttgctccaggcccctcggtgggtgttcaaggaggaagaccctattcacctgaggtgtcacagctggaagaacactgctctgcataaggtcacatatttacagaatggcaaaggcaggaagtattttcatcataattctgacttctacattccaaaagccacactcaaagacagcggctcctacttctgcagggggcttgttgggagtaaaaatgtgtcttcagagactgtgaacatcaccatcactcaaggtttggcagtgtcaaccatctcatcattctttccacctggctaccaagtgtccttctgcctggtcatggtgctgctgttcgccgtggataccggcctgtacttcagcgtcaagaccaacatccggtccagcaccagagactggaaggaccacaagttcaagtggcggaaggaccctcaggacaagagggccaagcgatctggatctggagcaacaaacttctcactactcaaacaagcaggtgacgtggaggagaatcccgggcctactagtatggactggatttggcgcatccttttccttgtcggcgctgctaccggcgcgcattccttcgaacaagttcagcttcaacagcctggcgctgagctggtcaaacctggcgcttctgtgaagatgagctgcaaagccagcggctacgccttcagcagctactggatcaactggatgaagcagaaacccggccagggactcgaatggatcggccaaatctatcccggcgacggcgacaccaactacaacggcaagttcaagggcagagccacactgaccgccgatacctctagcagcacagcctacatgcagctgagcagcctgaccagcgaagatagcgccgtgtacttctgtgcccggtccatcacaacagtcgtgggctgcgctatggactattggggccagggaacaagcgtgaccgtgtctagtacgcgtgcctctacaaagggaccctccgtgtttcctctggctcccagcagcaagtctacaagcggaggaacagccgctctgggctgcctggtcaaggattactttcccgagcctgtgaccgtgtcctggaatagcggagcactgacaagcggcgtgcacacctttccagccgtgctgcaaagcagcggcctgtactctctgagcagcgtggtcacagtgcctagctctagcctgggcacccagacctacatctgcaatgtgaaccacaagcctagcaacaccaaggtggacaagagagtggaacccaagagctgtggtaccgagatgtatgatacacccacactgtctgtgcaccctgggccagaagttatcagcggagaaaaagttaccttttattgccgcctcgataccgctacctctatgttcctcttgctgaaagagggccgcagctctcacgtgcagcgaggctacggaaaggtccaagctgagtttcctctcggccccgtgaccaccgctcacaggggcacatatagatgttttggctcttataacaatcatgcctggtcattcccatccgagcctgtgaaactgctggtcacaggcgatattgagaatacctctctggccccagaagatcctacattccccgccgacacatggggaacatatctgctgacaaccgaaaccgggctgcaaaaggaccatgctctgtgggatcataccgctcagaatctgcttcggatggggcttgcattcctggtcctggtggctcttgtctggtttctggtcgaggactggctgtcccggaagagaaccagagaaagagcttccagggccagcacctgggaaggcagacgcagactgaatactcagaccctgcgcgccaagagaagcggatctggcgtgaagcagaccctgaatttcgacctgctgaagctggctggcgacgtggaatccaacccaggcccttctagaggcgggatccacaccatgtccgactccaaggaggtccctagccttccatttttgcgacacttgctcgaagagttggacagccatgaggacagcttgctgctgtttctgtgtcacgacgcggccccgggctgcacgacggtcacgcaagctttgtgctcgcttagccaacagcgcaagctgaccctcgcggctctggtcgagatgctctacgtgctgcagcgtatggatcttctcaagagccgcttcgggctcagcaaggagggggccgagcaattgctgggcacaagctttctcacgcgctaccgcaagctcatggtttgcgtgggtgaggagctcgactcgagcgagctacgcgctctacgcttgttcgcgtgcaacctgaatccgagcctgagcacggcgctttctgagagcagccgctttgtcgagcttgtactcgcgcttgaaaacgtaggactcgtctcgccatcgagtgtttccgtgcttgcggacatgttgcgcactcttcggcgcctcgatttgtgccagcagcttgttgagtacgaacaacaagagcaagccaggtaccgttactgttacgcggcctcgccctcattgccagttcgtacgttacgtcgggggcacggcgcgagtgaacacgagcagctgtgcatgcccgtgcaagaatcctctgacagccccgagctgctgcgcacgcccgtacaagaatcctccagcgacagccccgagcaaacgact

SEQ ID NO: 1799 - DNA, 3258 bp, Artificial Sequence
  Synthetic Polynucleotide
atggccttaccagtgaccgccttgctcctgccgctggccttgctgctccacgccgccaggccggacatccagatgacacagagccctagcagcctgtctgccagcgtgggagacagagtgaccatcacatgcaaggccagcgaccacatcaacaactggctggcctggtatcagcagaagcctggacaggcccctaagctgctgatctacggcgctaccacactggaaacaggcgtgcccagcagattttctggcagcggctctggcaccgactacaccctgacaatatccagcctccagcctgaggacttcgccacctactactgtcagcagagctggaacaccccttggacattcggccagggcaccaagctggaaatcaagagactcgagggacagcctaaggccaatcctaccgtgacactgttccctccaagcagcgaagaactccaggccaacaaggccacacttgtgtgcctgatctccgacttctaccctggggctgtgacagtggcttggaaggccgatggatctcctgtgaaagccggcgtggaaaccaccaagccatccaagcagagcaacaacaaatacgccgccagctcctacctgagcctgacacctgagcagtggaagtcccacagatcctacagctgccaagtgacccacgaaggcagcaccgtggaaaagacagtggcccctacagagtgcagcggatccatcggctggctgttgctccaggcccctcggtgggtgttcaaggaggaagaccctattcacctgaggtgtcacagctggaagaacactgctctgcataaggtcacatatttacagaatggcaaaggcaggaagtattttcatcataattctgacttctacattccaaaagccacactcaaagacagcggctcctacttctgcagggggcttgttgggagtaaaaatgtgtcttcagagactgtgaacatcaccatcactcaaggtttggcagtgtcaaccatctcatcattctttccacctggctaccaagtgtccttctgcctggtcatggtgctgctgttcgccgtggataccggcctgtacttcagcgtcaagaccaacatccggtccagcaccagagactggaaggaccacaagttcaagtggcggaaggaccctcaggacaagagggccaagcgatctggatctggagcaacaaacttctcactactcaaacaagcaggtgacgtggaggagaatcccgggcctactagtatggactggatttggcgcatccttttccttgtcggcgctgctaccggcgcgcattccttcgaacaagttcagcttcaacagcctggcgctgagctggtcaaacctggcgcttctgtgaagatgagctgcaaagccagcggctacgccttcagcagctactggatcaactggatgaagcagaaacccggccagggactcgaatggatcggccaaatctatcccggcgacggcgacaccaactacaacggcaagttcaagggcagagccacactgaccgccgatacctctagcagcacagcctacatgcagctgagcagcctgaccagcgaagatagcgccgtgtacttctgtgcccggtccatcacaacagtcgtgggctgcgctatggactattggggccagggaacaagcgtgaccgtgtctagtacgcgtgcctctacaaagggaccctccgtgtttcctctggctcccagcagcaagtctacaagcggaggaacagccgctctgggctgcctggtcaaggattactttcccgagcctgtgaccgtgtcctggaatagcggagcactgacaagcggcgtgcacacctttccagccgtgctgcaaagcagcggcctgtactctctgagcagcgtggtcacagtgcctagctctagcctgggcacccagacctacatctgcaatgtgaaccacaagcctagcaacaccaaggtggacaagagagtggaacccaagagctgtggtaccgagatgtatgatacacccacactgtctgtgcaccctgggccagaagttatcagcggagaaaaagttaccttttattgccgcctcgataccgctacctctatgttcctcttgctgaaagagggccgcagctctcacgtgcagcgaggctacggaaaggtccaagctgagtttcctctcggccccgtgaccaccgctcacaggggcacatatagatgttttggctcttataacaatcatgcctggtcattcccatccgagcctgtgaaactgctggtcacaggcgatattgagaatacctctctggccccagaagatcctacattccccgccgacacatggggaacatatctgctgacaaccgaaaccgggctgcaaaaggaccatgctctgtgggatcataccgctcagaatctgcttcggatggggcttgcattcctggtcctggtggctcttgtctggtttctggtcgaggactggctgtcccggaagagaaccagagaaagagcttccagggccagcacctgggaaggcagacgcagactgaatactcagaccctgcgcgccaagagaagcggatctggcgtgaagcagaccctgaatttcgacctgctgaagctggctggcgacgtggaatccaacccaggcccttctagaggccatatgaccgagtacaagcccacggtgcgcctcgccacccgcgacgacgtccccagggccgtacgcaccctcgccgccgcgttcgccgactaccccgccacgcgccacaccgtcgatccggaccgccacatcgagcgggtcaccgagctgcaagaactcttcctcacgcgcgtcgggctcgacatcggcaaggtgtgggtcgcggacgacggcgccgcggtggcggtctggaccacgccggagagcgtcgaagcgggggcggtgttcgccgagatcggcccgcgcatggccgagttgagcggttcccggctggccgcgcagcaacagatggaaggcctcctggcgccgcaccggcccaaggagcccgcgtggttcctggccaccgtcggcgtctcgcccgaccaccagggcaagggtctgggcagcgccgtcgtgctccccggagtggaggcggccgagcgcgccggggtgcccgccttcctggagacctccgcgccccgcaacctccccttctacgagcggctcggcttcaccgtcaccgccgacgtcgaggtgcccgaaggaccgcgcacctggtgcatgacccgcaagcccggtgcctga

SEQ ID NO: 1800 - DNA, 3669 bp, Artificial Sequence
  Synthetic Polynucleotide
atggccttaccagtgaccgccttgctcctgccgctggccttgctgctccacgccgccaggccggaagtgcagctggttgaatctggcggaggactggttcaggctggcggatctctgagactgtcttgtgccgccagcggcagaacctttagcatgggctggtttagacaggcccctggcaaagagagagagttcgtcgccgccatcacatactctggcggcagcccttactacgccgactctgtgaagggcagattcaccatcagccgggacaacgccaagaacaccgtgtacctccagatgaacagcctgaagcctgaggacaccgccgtgtactactgcgccgccaatccaacatacggcagcgactggaacgccgagaattggggccagggaacccaagtgacagtgtctagcggtaccggcggaggcggatctggcggcggaggtagcggtggcggaggatctgaattcgacatccagatgacacagagccctagcagcctgtctgccagcgtgggagacagagtgaccatcacatgcaaggccagcgaccacatcaacaactggctggcctggtatcagcagaagcctggacaggcccctaagctgctgatctacggcgctaccacactggaaacaggcgtgcccagcagattttctggcagcggctctggcaccgactacaccctgacaatatccagcctccagcctgaggacttcgccacctactactgtcagcagagctggaacaccccttggacattcggccagggcaccaagctggaaatcaagagactcgagggacagcctaaggccaatcctaccgtgacactgttccctccaagcagcgaagaactccaggccaacaaggccacacttgtgtgcctgatctccgacttctaccctggggctgtgacagtggcttggaaggccgatggatctcctgtgaaagccggcgtggaaaccaccaagccatccaagcagagcaacaacaaatacgccgccagctcctacctgagcctgacacctgagcagtggaagtcccacagatcctacagctgccaagtgacccacgaaggcagcaccgtggaaaagacagtggcccctacagagtgcagcggatccatcggctggctgttgctccaggcccctcggtgggtgttcaaggaggaagaccctattcacctgaggtgtcacagctggaagaacactgctctgcataaggtcacatatttacagaatggcaaaggcaggaagtattttcatcataattctgacttctacattccaaaagccacactcaaagacagcggctcctacttctgcagggggcttgttgggagtaaaaatgtgtcttcagagactgtgaacatcaccatcactcaaggtttggcagtgtcaaccatctcatcattctttccacctggctaccaagtgtccttctgcctggtcatggtgctgctgttcgccgtggataccggcctgtacttcagcgtcaagaccaacatccggtccagcaccagagactggaaggaccacaagttcaagtggcggaaggaccctcaggacaagagggccaagcgatctggatctggagcaacaaacttctcactactcaaacaagcaggtgacgtggaggagaatcccgggcctactagtatggactggatttggcgcatccttttccttgtcggcgctgctaccggcgcgcattccttcgaacaagttcagcttcaacagcctggcgctgagctggtcaaacctggcgcttctgtgaagatgagctgcaaagccagcggctacgccttcagcagctactggatcaactggatgaagcagaaacccggccagggactcgaatggatcggccaaatctatcccggcgacggcgacaccaactacaacggcaagttcaagggcagagccacactgaccgccgatacctctagcagcacagcctacatgcagctgagcagcctgaccagcgaagatagcgccgtgtacttctgtgcccggtccatcacaacagtcgtgggctgcgctatggactattggggccagggaacaagcgtgaccgtgtctagtacgcgtgcctctacaaagggaccctccgtgtttcctctggctcccagcagcaagtctacaagcggaggaacagccgctctgggctgcctggtcaaggattactttcccgagcctgtgaccgtgtcctggaatagcggagcactgacaagcggcgtgcacacctttccagccgtgctgcaaagcagcggcctgtactctctgagcagcgtggtcacagtgcctagctctagcctgggcacccagacctacatctgcaatgtgaaccacaagcctagcaacaccaaggtggacaagagagtggaacccaagagctgtggtaccgagatgtatgatacacccacactgtctgtgcaccctgggccagaagttatcagcggagaaaaagttaccttttattgccgcctcgataccgctacctctatgttcctcttgctgaaagagggccgcagctctcacgtgcagcgaggctacggaaaggtccaagctgagtttcctctcggccccgtgaccaccgctcacaggggcacatatagatgttttggctcttataacaatcatgcctggtcattcccatccgagcctgtgaaactgctggtcacaggcgatattgagaatacctctctggccccagaagatcctacattccccgccgacacatggggaacatatctgctgacaaccgaaaccgggctgcaaaaggaccatgctctgtgggatcataccgctcagaatctgcttcggatggggcttgcattcctggtcctggtggctcttgtctggtttctggtcgaggactggctgtcccggaagagaaccagagaaagagcttccagggccagcacctgggaaggcagacgcagactgaatactcagaccctgcgcgccaagagaagcggatctggcgtgaagcagaccctgaatttcgacctgctgaagctggctggcgacgtggaatccaacccaggcccttctagaggccatatgaccgagtacaagcccacggtgcgcctcgccacccgcgacgacgtccccagggccgtacgcaccctcgccgccgcgttcgccgactaccccgccacgcgccacaccgtcgatccggaccgccacatcgagcgggtcaccgagctgcaagaactcttcctcacgcgcgtcgggctcgacatcggcaaggtgtgggtcgcggacgacggcgccgcggtggcggtctggaccacgccggagagcgtcgaagcgggggcggtgttcgccgagatcggcccgcgcatggccgagttgagcggttcccggctggccgcgcagcaacagatggaaggcctcctggcgccgcaccggcccaaggagcccgcgtggttcctggccaccgtcggcgtctcgcccgaccaccagggcaagggtctgggcagcgccgtcgtgctccccggagtggaggcggccgagcgcgccggggtgcccgccttcctggagacctccgcgccccgcaacctccccttctacgagcggctcggcttcaccgtcaccgccgacgtcgaggtgcccgaaggaccgcgcacctggtgcatgacccgcaagcccggtgcctga

SEQ ID NO: 1801 - DNA, 4080 bp, Artificial Sequence
  Synthetic Polynucleotide
atggccttaccagtgaccgccttgctcctgccgctggccttgctgctccacgccgccaggccggaagtgcagctggttgaatctggcggaggactggttcaggctggcggatctctgagactgtcttgtgccgccagcggcagaacctttagcatgggctggtttagacaggcccctggcaaagagagagagttcgtcgccgccatcacatactctggcggcagcccttactacgccgactctgtgaagggcagattcaccatcagccgggacaacgccaagaacaccgtgtacctccagatgaacagcctgaagcctgaggacaccgccgtgtactactgcgccgccaatccaacatacggcagcgactggaacgccgagaattggggccagggaacccaagtgacagtgtctagcggtaccggcggaggcggatctggcggcggaggtagcggtggcggaggatctgaattcgacatccagatgacacagagccctagcagcctgtctgccagcgtgggagacagagtgaccatcacatgcaaggccagcgaccacatcaacaactggctggcctggtatcagcagaagcctggacaggcccctaagctgctgatctacggcgctaccacactggaaacaggcgtgcccagcagattttctggcagcggctctggcaccgactacaccctgacaatatccagcctccagcctgaggacttcgccacctactactgtcagcagagctggaacaccccttggacattcggccagggcaccaagctggaaatcaagagactcgagggacagcctaaggccaatcctaccgtgacactgttccctccaagcagcgaagaactccaggccaacaaggccacacttgtgtgcctgatctccgacttctaccctggggctgtgacagtggcttggaaggccgatggatctcctgtgaaagccggcgtggaaaccaccaagccatccaagcagagcaacaacaaatacgccgccagctcctacctgagcctgacacctgagcagtggaagtcccacagatcctacagctgccaagtgacccacgaaggcagcaccgtggaaaagacagtggcccctacagagtgcagcggatccatcggctggctgttgctccaggcccctcggtgggtgttcaaggaggaagaccctattcacctgaggtgtcacagctggaagaacactgctctgcataaggtcacatatttacagaatggcaaaggcaggaagtattttcatcataattctgacttctacattccaaaagccacactcaaagacagcggctcctacttctgcagggggcttgttgggagtaaaaatgtgtcttcagagactgtgaacatcaccatcactcaaggtttggcagtgtcaaccatctcatcattctttccacctggctaccaagtgtccttctgcctggtcatggtgctgctgttcgccgtggataccggcctgtacttcagcgtcaagaccaacatccggtccagcaccagagactggaaggaccacaagttcaagtggcggaaggaccctcaggacaagagggccaagcgatctggatctggagcaacaaacttctcactactcaaacaagcaggtgacgtggaggagaatcccgggcctactagtatggactggatttggcgcatccttttccttgtcggcgctgctaccggcgcgcattccgggcccgaagtgcaactggttgaatccggtggcggcctggtgcaagcaggcggatctctcagacttagctgtgccgcctccggcagaaccttcacaatgggatggtttaggcaggctccagggaaagagagagagttcgtcgccgccatctctctgtctcccacactggcctactacgccgactctgtgaaaggccggttcaccatctccagagataatgccaagaacaccgtggtgctgcaaatgaactctctgaaacccgaggatacagccctgtactattgtgccgctgaccggaagtccgtgatgagcatcagacccgattactggggacagggcacacaagtcacagtgtcctctggatccggcggcggaggatctggcggaggcggatctgggggcggaggctctttcgaacaagttcagcttcaacagcctggcgctgagctggtcaaacctggcgcttctgtgaagatgagctgcaaagccagcggctacgccttcagcagctactggatcaactggatgaagcagaaacccggccagggactcgaatggatcggccaaatctatcccggcgacggcgacaccaactacaacggcaagttcaagggcagagccacactgaccgccgatacctctagcagcacagcctacatgcagctgagcagcctgaccagcgaagatagcgccgtgtacttctgtgcccggtccatcacaacagtcgtgggctgcgctatggactattggggccagggaacaagcgtgaccgtgtctagtacgcgtgcctctacaaagggaccctccgtgtttcctctggctcccagcagcaagtctacaagcggaggaacagccgctctgggctgcctggtcaaggattactttcccgagcctgtgaccgtgtcctggaatagcggagcactgacaagcggcgtgcacacctttccagccgtgctgcaaagcagcggcctgtactctctgagcagcgtggtcacagtgcctagctctagcctgggcacccagacctacatctgcaatgtgaaccacaagcctagcaacaccaaggtggacaagagagtggaacccaagagctgtggtaccgagatgtatgatacacccacactgtctgtgcaccctgggccagaagttatcagcggagaaaaagttaccttttattgccgcctcgataccgctacctctatgttcctcttgctgaaagagggccgcagctctcacgtgcagcgaggctacggaaaggtccaagctgagtttcctctcggccccgtgaccaccgctcacaggggcacatatagatgttttggctcttataacaatcatgcctggtcattcccatccgagcctgtgaaactgctggtcacaggcgatattgagaatacctctctggccccagaagatcctacattccccgccgacacatggggaacatatctgctgacaaccgaaaccgggctgcaaaaggaccatgctctgtgggatcataccgctcagaatctgcttcggatggggcttgcattcctggtcctggtggctcttgtctggtttctggtcgaggactggctgtcccggaagagaaccagagaaagagcttccagggccagcacctgggaaggcagacgcagactgaatactcagaccctgcgcgccaagagaagcggatctggcgtgaagcagaccctgaatttcgacctgctgaagctggctggcgacgtggaatccaacccaggcccttctagaggccatatgaccgagtacaagcccacggtgcgcctcgccacccgcgacgacgtccccagggccgtacgcaccctcgccgccgcgttcgccgactaccccgccacgcgccacaccgtcgatccggaccgccacatcgagcgggtcaccgagctgcaagaactcttcctcacgcgcgtcgggctcgacatcggcaaggtgtgggtcgcggacgacggcgccgcggtggcggtctggaccacgccggagagcgtcgaagcgggggcggtgttcgccgagatcggcccgcgcatggccgagttgagcggttcccggctggccgcgcagcaacagatggaaggcctcctggcgccgcaccggcccaaggagcccgcgtggttcctggccaccgtcggcgtctcgcccgaccaccagggcaagggtctgggcagcgccgtcgtgctccccggagtggaggcggccgagcgcgccggggtgcccgccttcctggagacctccgcgccccgcaacctccccttctacgagcggctcggcttcaccgtcaccgccgacgtcgaggtgcccgaaggaccgcgcacctggtgcatgacccgcaagcccggtgcctga

SEQ ID NO: 1802 - DNA, 3279 bp, Artificial Sequence
  Synthetic Polynucleotide
atggccttaccagtgaccgccttgctcctgccgctggccttgctgctccacgccgccaggccggaagtgcagctggttgaatctggcggaggactggttcaggctggcggatctctgagactgtcttgtgccgccagcggcagaacctttagcatgggctggtttagacaggcccctggcaaagagagagagttcgtcgccgccatcacatactctggcggcagcccttactacgccgactctgtgaagggcagattcaccatcagccgggacaacgccaagaacaccgtgtacctccagatgaacagcctgaagcctgaggacaccgccgtgtactactgcgccgccaatccaacatacggcagcgactggaacgccgagaattggggccagggaacccaagtgacagtgtctagcctcgagggacagcctaaggccaatcctaccgtgacactgttccctccaagcagcgaagaactccaggccaacaaggccacacttgtgtgcctgatctccgacttctaccctggggctgtgacagtggcttggaaggccgatggatctcctgtgaaagccggcgtggaaaccaccaagccatccaagcagagcaacaacaaatacgccgccagctcctacctgagcctgacacctgagcagtggaagtcccacagatcctacagctgccaagtgacccacgaaggcagcaccgtggaaaagacagtggcccctacagagtgcagcggatccatcggctggctgttgctccaggcccctcggtgggtgttcaaggaggaagaccctattcacctgaggtgtcacagctggaagaacactgctctgcataaggtcacatatttacagaatggcaaaggcaggaagtattttcatcataattctgacttctacattccaaaagccacactcaaagacagcggctcctacttctgcagggggcttgttgggagtaaaaatgtgtcttcagagactgtgaacatcaccatcactcaaggtttggcagtgtcaaccatctcatcattctttccacctggctaccaagtgtccttctgcctggtcatggtgctgctgttcgccgtggataccggcctgtacttcagcgtcaagaccaacatccggtccagcaccagagactggaaggaccacaagttcaagtggcggaaggaccctcaggacaagagggccaagcgatctggatctggagcaacaaacttctcactactcaaacaagcaggtgacgtggaggagaatcccgggcctactagtatggactggatttggcgcatccttttccttgtcggcgctgctaccggcgcgcattccgggcccgaagtgcaactggttgaatccggtggcggcctggtgcaagcaggcggatctctcagacttagctgtgccgcctccggcagaaccttcacaatgggatggtttaggcaggctccagggaaagagagagagttcgtcgccgccatctctctgtctcccacactggcctactacgccgactctgtgaaaggccggttcaccatctccagagataatgccaagaacaccgtggtgctgcaaatgaactctctgaaacccgaggatacagccctgtactattgtgccgctgaccggaagtccgtgatgagcatcagacccgattactggggacagggcacacaagtcacagtgtcctctacgcgtgcctctacaaagggaccctccgtgtttcctctggctcccagcagcaagtctacaagcggaggaacagccgctctgggctgcctggtcaaggattactttcccgagcctgtgaccgtgtcctggaatagcggagcactgacaagcggcgtgcacacctttccagccgtgctgcaaagcagcggcctgtactctctgagcagcgtggtcacagtgcctagctctagcctgggcacccagacctacatctgcaatgtgaaccacaagcctagcaacaccaaggtggacaagagagtggaacccaagagctgtggtaccgagatgtatgatacacccacactgtctgtgcaccctgggccagaagttatcagcggagaaaaagttaccttttattgccgcctcgataccgctacctctatgttcctcttgctgaaagagggccgcagctctcacgtgcagcgaggctacggaaaggtccaagctgagtttcctctcggccccgtgaccaccgctcacaggggcacatatagatgttttggctcttataacaatcatgcctggtcattcccatccgagcctgtgaaactgctggtcacaggcgatattgagaatacctctctggccccagaagatcctacattccccgccgacacatggggaacatatctgctgacaaccgaaaccgggctgcaaaaggaccatgctctgtgggatcataccgctcagaatctgcttcggatggggcttgcattcctggtcctggtggctcttgtctggtttctggtcgaggactggctgtcccggaagagaaccagagaaagagcttccagggccagcacctgggaaggcagacgcagactgaatactcagaccctgcgcgccaagagaagcggatctggcgtgaagcagaccctgaatttcgacctgctgaagctggctggcgacgtggaatccaacccaggcccttctagaggccatatgaccgagtacaagcccacggtgcgcctcgccacccgcgacgacgtccccagggccgtacgcaccctcgccgccgcgttcgccgactaccccgccacgcgccacaccgtcgatccggaccgccacatcgagcgggtcaccgagctgcaagaactcttcctcacgcgcgtcgggctcgacatcggcaaggtgtgggtcgcggacgacggcgccgcggtggcggtctggaccacgccggagagcgtcgaagcgggggcggtgttcgccgagatcggcccgcgcatggccgagttgagcggttcccggctggccgcgcagcaacagatggaaggcctcctggcgccgcaccggcccaaggagcccgcgtggttcctggccaccgtcggcgtctcgcccgaccaccagggcaagggtctgggcagcgccgtcgtgctccccggagtggaggcggccgagcgcgccggggtgcccgccttcctggagacctccgcgccccgcaacctccccttctacgagcggctcggcttcaccgtcaccgccgacgtcgaggtgcccgaaggaccgcgcacctggtgcatgacccgcaagcccggtgcctga

SEQ ID NO: 1803 - DNA, 3303 bp, Artificial Sequence
  Synthetic Polynucleotide
atggccttaccagtgaccgccttgctcctgccgctggccttgctgctccacgccgccaggccggacatccagatgacacagagccctagcagcctgtctgccagcgtgggagacagagtgaccatcacatgcaaggccagcgaccacatcaacaactggctggcctggtatcagcagaagcctggacaggcccctaagctgctgatctacggcgctaccacactggaaacaggcgtgcccagcagattttctggcagcggctctggcaccgactacaccctgacaatatccagcctccagcctgaggacttcgccacctactactgtcagcagagctggaacaccccttggacattcggccagggcaccaagctggaaatcaagagactcgaggacctgaagaacgtgttcccacctgaggtggccgtgttcgagcctagcgaggccgagatcagccacacccagaaagccaccctcgtgtgcctggctaccggcttctaccccgaccatgtggaactgtcttggtgggtcaacggcaaagaggtgcacagcggcgtgtctaccgacccccagccactgaaagaacagcccgccctgaacgacagccggtactgcctgagcagcagactgagagtgtccgccaccttctggcagaacccccggaaccacttcagatgccaggtgcagttctacggcctgagcgagaacgacgagtggacccaggacagagccaagcccgtgacccagatcgtgtctgccgaagcctggggcagagccgattgcggatccatcggctggctgttgctccaggcccctcggtgggtgttcaaggaggaagaccctattcacctgaggtgtcacagctggaagaacactgctctgcataaggtcacatatttacagaatggcaaaggcaggaagtattttcatcataattctgacttctacattccaaaagccacactcaaagacagcggctcctacttctgcagggggcttgttgggagtaaaaatgtgtcttcagagactgtgaacatcaccatcactcaaggtttggcagtgtcaaccatctcatcattctttccacctggctaccaagtgtccttctgcctggtcatggtgctgctgttcgccgtggataccggcctgtacttcagcgtcaagaccaacatccggtccagcaccagagactggaaggaccacaagttcaagtggcggaaggaccctcaggacaagagggccaagcgatctggatctggagcaacaaacttctcactactcaaacaagcaggtgacgtggaggagaatcccgggcctactagtatggactggatttggcgcatccttttccttgtcggcgctgctaccggcgcgcattccttcgaacaagttcagcttcaacagcctggcgctgagctggtcaaacctggcgcttctgtgaagatgagctgcaaagccagcggctacgccttcagcagctactggatcaactggatgaagcagaaacccggccagggactcgaatggatcggccaaatctatcccggcgacggcgacaccaactacaacggcaagttcaagggcagagccacactgaccgccgatacctctagcagcacagcctacatgcagctgagcagcctgaccagcgaagatagcgccgtgtacttctgtgcccggtccatcacaacagtcgtgggctgcgctatggactattggggccagggaacaagcgtgaccgtgtctagtacgcgtatccagaaccctgatcctgccgtgtaccagctgcgggatagcaagagcagcgacaagagcgtgtgtctgttcaccgacttcgacagccagaccaacgtgtcccagagcaaggactccgacgtgtacatcaccgataagaccgtgctggacatgcggagcatggacttcaagagcaactccgccgtggcctggtccaacaagtccgatttcgcctgcgccaacgccttcaacaacagcattatccccgaggacacattcttcccaagccccgagagcagctgcggtaccgagatgtatgatacacccacactgtctgtgcaccctgggccagaagttatcagcggagaaaaagttaccttttattgccgcctcgataccgctacctctatgttcctcttgctgaaagagggccgcagctctcacgtgcagcgaggctacggaaaggtccaagctgagtttcctctcggccccgtgaccaccgctcacaggggcacatatagatgttttggctcttataacaatcatgcctggtcattcccatccgagcctgtgaaactgctggtcacaggcgatattgagaatacctctctggccccagaagatcctacattccccgccgacacatggggaacatatctgctgacaaccgaaaccgggctgcaaaaggaccatgctctgtgggatcataccgctcagaatctgcttcggatggggcttgcattcctggtcctggtggctcttgtctggtttctggtcgaggactggctgtcccggaagagaaccagagaaagagcttccagggccagcacctgggaaggcagacgcagactgaatactcagaccctgcgcgccaagagaagcggatctggcgtgaagcagaccctgaatttcgacctgctgaagctggctggcgacgtggaatccaacccaggcccttctagaggccatatgaccgagtacaagcccacggtgcgcctcgccacccgcgacgacgtccccagggccgtacgcaccctcgccgccgcgttcgccgactaccccgccacgcgccacaccgtcgatccggaccgccacatcgagcgggtcaccgagctgcaagaactcttcctcacgcgcgtcgggctcgacatcggcaaggtgtgggtcgcggacgacggcgccgcggtggcggtctggaccacgccggagagcgtcgaagcgggggcggtgttcgccgagatcggcccgcgcatggccgagttgagcggttcccggctggccgcgcagcaacagatggaaggcctcctggcgccgcaccggcccaaggagcccgcgtggttcctggccaccgtcggcgtctcgcccgaccaccagggcaagggtctgggcagcgccgtcgtgctccccggagtggaggcggccgagcgcgccggggtgcccgccttcctggagacctccgcgccccgcaacctccccttctacgagcggctcggcttcaccgtcaccgccgacgtcgaggtgcccgaaggaccgcgcacctggtgcatgacccgcaagcccggtgcctga

SEQ ID NO: 1804 - DNA, 3714 bp, Artificial Sequence
  Synthetic Polynucleotide
atggccttaccagtgaccgccttgctcctgccgctggccttgctgctccacgccgccaggccggaagtgcagctggttgaatctggcggaggactggttcaggctggcggatctctgagactgtcttgtgccgccagcggcagaacctttagcatgggctggtttagacaggcccctggcaaagagagagagttcgtcgccgccatcacatactctggcggcagcccttactacgccgactctgtgaagggcagattcaccatcagccgggacaacgccaagaacaccgtgtacctccagatgaacagcctgaagcctgaggacaccgccgtgtactactgcgccgccaatccaacatacggcagcgactggaacgccgagaattggggccagggaacccaagtgacagtgtctagcggtaccggcggaggcggatctggcggcggaggtagcggtggcggaggatctgaattcgacatccagatgacacagagccctagcagcctgtctgccagcgtgggagacagagtgaccatcacatgcaaggccagcgaccacatcaacaactggctggcctggtatcagcagaagcctggacaggcccctaagctgctgatctacggcgctaccacactggaaacaggcgtgcccagcagattttctggcagcggctctggcaccgactacaccctgacaatatccagcctccagcctgaggacttcgccacctactactgtcagcagagctggaacaccccttggacattcggccagggcaccaagctggaaatcaagagactcgaggacctgaagaacgtgttcccacctgaggtggccgtgttcgagcctagcgaggccgagatcagccacacccagaaagccaccctcgtgtgcctggctaccggcttctaccccgaccatgtggaactgtcttggtgggtcaacggcaaagaggtgcacagcggcgtgtctaccgacccccagccactgaaagaacagcccgccctgaacgacagccggtactgcctgagcagcagactgagagtgtccgccaccttctggcagaacccccggaaccacttcagatgccaggtgcagttctacggcctgagcgagaacgacgagtggacccaggacagagccaagcccgtgacccagatcgtgtctgccgaagcctggggcagagccgattgcggatccatcggctggctgttgctccaggcccctcggtgggtgttcaaggaggaagaccctattcacctgaggtgtcacagctggaagaacactgctctgcataaggtcacatatttacagaatggcaaaggcaggaagtattttcatcataattctgacttctacattccaaaagccacactcaaagacagcggctcctacttctgcagggggcttgttgggagtaaaaatgtgtcttcagagactgtgaacatcaccatcactcaaggtttggcagtgtcaaccatctcatcattctttccacctggctaccaagtgtccttctgcctggtcatggtgctgctgttcgccgtggataccggcctgtacttcagcgtcaagaccaacatccggtccagcaccagagactggaaggaccacaagttcaagtggcggaaggaccctcaggacaagagggccaagcgatctggatctggagcaacaaacttctcactactcaaacaagcaggtgacgtggaggagaatcccgggcctactagtatggactggatttggcgcatccttttccttgtcggcgctgctaccggcgcgcattccttcgaacaagttcagcttcaacagcctggcgctgagctggtcaaacctggcgcttctgtgaagatgagctgcaaagccagcggctacgccttcagcagctactggatcaactggatgaagcagaaacccggccagggactcgaatggatcggccaaatctatcccggcgacggcgacaccaactacaacggcaagttcaagggcagagccacactgaccgccgatacctctagcagcacagcctacatgcagctgagcagcctgaccagcgaagatagcgccgtgtacttctgtgcccggtccatcacaacagtcgtgggctgcgctatggactattggggccagggaacaagcgtgaccgtgtctagtacgcgtatccagaaccctgatcctgccgtgtaccagctgcgggatagcaagagcagcgacaagagcgtgtgtctgttcaccgacttcgacagccagaccaacgtgtcccagagcaaggactccgacgtgtacatcaccgataagaccgtgctggacatgcggagcatggacttcaagagcaactccgccgtggcctggtccaacaagtccgatttcgcctgcgccaacgccttcaacaacagcattatccccgaggacacattcttcccaagccccgagagcagctgcggtaccgagatgtatgatacacccacactgtctgtgcaccctgggccagaagttatcagcggagaaaaagttaccttttattgccgcctcgataccgctacctctatgttcctcttgctgaaagagggccgcagctctcacgtgcagcgaggctacggaaaggtccaagctgagtttcctctcggccccgtgaccaccgctcacaggggcacatatagatgttttggctcttataacaatcatgcctggtcattcccatccgagcctgtgaaactgctggtcacaggcgatattgagaatacctctctggccccagaagatcctacattccccgccgacacatggggaacatatctgctgacaaccgaaaccgggctgcaaaaggaccatgctctgtgggatcataccgctcagaatctgcttcggatggggcttgcattcctggtcctggtggctcttgtctggtttctggtcgaggactggctgtcccggaagagaaccagagaaagagcttccagggccagcacctgggaaggcagacgcagactgaatactcagaccctgcgcgccaagagaagcggatctggcgtgaagcagaccctgaatttcgacctgctgaagctggctggcgacgtggaatccaacccaggcccttctagaggccatatgaccgagtacaagcccacggtgcgcctcgccacccgcgacgacgtccccagggccgtacgcaccctcgccgccgcgttcgccgactaccccgccacgcgccacaccgtcgatccggaccgccacatcgagcgggtcaccgagctgcaagaactcttcctcacgcgcgtcgggctcgacatcggcaaggtgtgggtcgcggacgacggcgccgcggtggcggtctggaccacgccggagagcgtcgaagcgggggcggtgttcgccgagatcggcccgcgcatggccgagttgagcggttcccggctggccgcgcagcaacagatggaaggcctcctggcgccgcaccggcccaaggagcccgcgtggttcctggccaccgtcggcgtctcgcccgaccaccagggcaagggtctgggcagcgccgtcgtgctccccggagtggaggcggccgagcgcgccggggtgcccgccttcctggagacctccgcgccccgcaacctccccttctacgagcggctcggcttcaccgtcaccgccgacgtcgaggtgcccgaaggaccgcgcacctggtgcatgacccgcaagcccggtgcctga

SEQ ID NO: 1805 - DNA, 4125 bp, Artificial Sequence
  Synthetic Polynucleotide
atggccttaccagtgaccgccttgctcctgccgctggccttgctgctccacgccgccaggccggaagtgcagctggttgaatctggcggaggactggttcaggctggcggatctctgagactgtcttgtgccgccagcggcagaacctttagcatgggctggtttagacaggcccctggcaaagagagagagttcgtcgccgccatcacatactctggcggcagcccttactacgccgactctgtgaagggcagattcaccatcagccgggacaacgccaagaacaccgtgtacctccagatgaacagcctgaagcctgaggacaccgccgtgtactactgcgccgccaatccaacatacggcagcgactggaacgccgagaattggggccagggaacccaagtgacagtgtctagcggtaccggcggaggcggatctggcggcggaggtagcggtggcggaggatctgaattcgacatccagatgacacagagccctagcagcctgtctgccagcgtgggagacagagtgaccatcacatgcaaggccagcgaccacatcaacaactggctggcctggtatcagcagaagcctggacaggcccctaagctgctgatctacggcgctaccacactggaaacaggcgtgcccagcagattttctggcagcggctctggcaccgactacaccctgacaatatccagcctccagcctgaggacttcgccacctactactgtcagcagagctggaacaccccttggacattcggccagggcaccaagctggaaatcaagagactcgaggacctgaagaacgtgttcccacctgaggtggccgtgttcgagcctagcgaggccgagatcagccacacccagaaagccaccctcgtgtgcctggctaccggcttctaccccgaccatgtggaactgtcttggtgggtcaacggcaaagaggtgcacagcggcgtgtctaccgacccccagccactgaaagaacagcccgccctgaacgacagccggtactgcctgagcagcagactgagagtgtccgccaccttctggcagaacccccggaaccacttcagatgccaggtgcagttctacggcctgagcgagaacgacgagtggacccaggacagagccaagcccgtgacccagatcgtgtctgccgaagcctggggcagagccgattgcggatccatcggctggctgttgctccaggcccctcggtgggtgttcaaggaggaagaccctattcacctgaggtgtcacagctggaagaacactgctctgcataaggtcacatatttacagaatggcaaaggcaggaagtattttcatcataattctgacttctacattccaaaagccacactcaaagacagcggctcctacttctgcagggggcttgttgggagtaaaaatgtgtcttcagagactgtgaacatcaccatcactcaaggtttggcagtgtcaaccatctcatcattctttccacctggctaccaagtgtccttctgcctggtcatggtgctgctgttcgccgtggataccggcctgtacttcagcgtcaagaccaacatccggtccagcaccagagactggaaggaccacaagttcaagtggcggaaggaccctcaggacaagagggccaagcgatctggatctggagcaacaaacttctcactactcaaacaagcaggtgacgtggaggagaatcccgggcctactagtatggactggatttggcgcatccttttccttgtcggcgctgctaccggcgcgcattccgggcccgaagtgcaactggttgaatccggtggcggcctggtgcaagcaggcggatctctcagacttagctgtgccgcctccggcagaaccttcacaatgggatggtttaggcaggctccagggaaagagagagagttcgtcgccgccatctctctgtctcccacactggcctactacgccgactctgtgaaaggccggttcaccatctccagagataatgccaagaacaccgtggtgctgcaaatgaactctctgaaacccgaggatacagccctgtactattgtgccgctgaccggaagtccgtgatgagcatcagacccgattactggggacagggcacacaagtcacagtgtcctctggatccggcggcggaggatctggcggaggcggatctgggggcggaggctctttcgaacaagttcagcttcaacagcctggcgctgagctggtcaaacctggcgcttctgtgaagatgagctgcaaagccagcggctacgccttcagcagctactggatcaactggatgaagcagaaacccggccagggactcgaatggatcggccaaatctatcccggcgacggcgacaccaactacaacggcaagttcaagggcagagccacactgaccgccgatacctctagcagcacagcctacatgcagctgagcagcctgaccagcgaagatagcgccgtgtacttctgtgcccggtccatcacaacagtcgtgggctgcgctatggactattggggccagggaacaagcgtgaccgtgtctagtacgcgtatccagaaccctgatcctgccgtgtaccagctgcgggatagcaagagcagcgacaagagcgtgtgtctgttcaccgacttcgacagccagaccaacgtgtcccagagcaaggactccgacgtgtacatcaccgataagaccgtgctggacatgcggagcatggacttcaagagcaactccgccgtggcctggtccaacaagtccgatttcgcctgcgccaacgccttcaacaacagcattatccccgaggacacattcttcccaagccccgagagcagctgcggtaccgagatgtatgatacacccacactgtctgtgcaccctgggccagaagttatcagcggagaaaaagttaccttttattgccgcctcgataccgctacctctatgttcctcttgctgaaagagggccgcagctctcacgtgcagcgaggctacggaaaggtccaagctgagtttcctctcggccccgtgaccaccgctcacaggggcacatatagatgttttggctcttataacaatcatgcctggtcattcccatccgagcctgtgaaactgctggtcacaggcgatattgagaatacctctctggccccagaagatcctacattccccgccgacacatggggaacatatctgctgacaaccgaaaccgggctgcaaaaggaccatgctctgtgggatcataccgctcagaatctgcttcggatggggcttgcattcctggtcctggtggctcttgtctggtttctggtcgaggactggctgtcccggaagagaaccagagaaagagcttccagggccagcacctgggaaggcagacgcagactgaatactcagaccctgcgcgccaagagaagcggatctggcgtgaagcagaccctgaatttcgacctgctgaagctggctggcgacgtggaatccaacccaggcccttctagaggccatatgaccgagtacaagcccacggtgcgcctcgccacccgcgacgacgtccccagggccgtacgcaccctcgccgccgcgttcgccgactaccccgccacgcgccacaccgtcgatccggaccgccacatcgagcgggtcaccgagctgcaagaactcttcctcacgcgcgtcgggctcgacatcggcaaggtgtgggtcgcggacgacggcgccgcggtggcggtctggaccacgccggagagcgtcgaagcgggggcggtgttcgccgagatcggcccgcgcatggccgagttgagcggttcccggctggccgcgcagcaacagatggaaggcctcctggcgccgcaccggcccaaggagcccgcgtggttcctggccaccgtcggcgtctcgcccgaccaccagggcaagggtctgggcagcgccgtcgtgctccccggagtggaggcggccgagcgcgccggggtgcccgccttcctggagacctccgcgccccgcaacctccccttctacgagcggctcggcttcaccgtcaccgccgacgtcgaggtgcccgaaggaccgcgcacctggtgcatgacccgcaagcccggtgcctga

SEQ ID NO: 1806 - DNA, 3324 bp, Artificial Sequence
  Synthetic Polynucleotide
atggccttaccagtgaccgccttgctcctgccgctggccttgctgctccacgccgccaggccggaagtgcagctggttgaatctggcggaggactggttcaggctggcggatctctgagactgtcttgtgccgccagcggcagaacctttagcatgggctggtttagacaggcccctggcaaagagagagagttcgtcgccgccatcacatactctggcggcagcccttactacgccgactctgtgaagggcagattcaccatcagccgggacaacgccaagaacaccgtgtacctccagatgaacagcctgaagcctgaggacaccgccgtgtactactgcgccgccaatccaacatacggcagcgactggaacgccgagaattggggccagggaacccaagtgacagtgtctagcctcgaggacctgaagaacgtgttcccacctgaggtggccgtgttcgagcctagcgaggccgagatcagccacacccagaaagccaccctcgtgtgcctggctaccggcttctaccccgaccatgtggaactgtcttggtgggtcaacggcaaagaggtgcacagcggcgtgtctaccgacccccagccactgaaagaacagcccgccctgaacgacagccggtactgcctgagcagcagactgagagtgtccgccaccttctggcagaacccccggaaccacttcagatgccaggtgcagttctacggcctgagcgagaacgacgagtggacccaggacagagccaagcccgtgacccagatcgtgtctgccgaagcctggggcagagccgattgcggatccatcggctggctgttgctccaggcccctcggtgggtgttcaaggaggaagaccctattcacctgaggtgtcacagctggaagaacactgctctgcataaggtcacatatttacagaatggcaaaggcaggaagtattttcatcataattctgacttctacattccaaaagccacactcaaagacagcggctcctacttctgcagggggcttgttgggagtaaaaatgtgtcttcagagactgtgaacatcaccatcactcaaggtttggcagtgtcaaccatctcatcattctttccacctggctaccaagtgtccttctgcctggtcatggtgctgctgttcgccgtggataccggcctgtacttcagcgtcaagaccaacatccggtccagcaccagagactggaaggaccacaagttcaagtggcggaaggaccctcaggacaagagggccaagcgatctggatctggagcaacaaacttctcactactcaaacaagcaggtgacgtggaggagaatcccgggcctactagtatggactggatttggcgcatccttttccttgtcggcgctgctaccggcgcgcattccgggcccgaagtgcaactggttgaatccggtggcggcctggtgcaagcaggcggatctctcagacttagctgtgccgcctccggcagaaccttcacaatgggatggtttaggcaggctccagggaaagagagagagttcgtcgccgccatctctctgtctcccacactggcctactacgccgactctgtgaaaggccggttcaccatctccagagataatgccaagaacaccgtggtgctgcaaatgaactctctgaaacccgaggatacagccctgtactattgtgccgctgaccggaagtccgtgatgagcatcagacccgattactggggacagggcacacaagtcacagtgtcctctacgcgtatccagaaccctgatcctgccgtgtaccagctgcgggatagcaagagcagcgacaagagcgtgtgtctgttcaccgacttcgacagccagaccaacgtgtcccagagcaaggactccgacgtgtacatcaccgataagaccgtgctggacatgcggagcatggacttcaagagcaactccgccgtggcctggtccaacaagtccgatttcgcctgcgccaacgccttcaacaacagcattatccccgaggacacattcttcccaagccccgagagcagctgcggtaccgagatgtatgatacacccacactgtctgtgcaccctgggccagaagttatcagcggagaaaaagttaccttttattgccgcctcgataccgctacctctatgttcctcttgctgaaagagggccgcagctctcacgtgcagcgaggctacggaaaggtccaagctgagtttcctctcggccccgtgaccaccgctcacaggggcacatatagatgttttggctcttataacaatcatgcctggtcattcccatccgagcctgtgaaactgctggtcacaggcgatattgagaatacctctctggccccagaagatcctacattccccgccgacacatggggaacatatctgctgacaaccgaaaccgggctgcaaaaggaccatgctctgtgggatcataccgctcagaatctgcttcggatggggcttgcattcctggtcctggtggctcttgtctggtttctggtcgaggactggctgtcccggaagagaaccagagaaagagcttccagggccagcacctgggaaggcagacgcagactgaatactcagaccctgcgcgccaagagaagcggatctggcgtgaagcagaccctgaatttcgacctgctgaagctggctggcgacgtggaatccaacccaggcccttctagaggccatatgaccgagtacaagcccacggtgcgcctcgccacccgcgacgacgtccccagggccgtacgcaccctcgccgccgcgttcgccgactaccccgccacgcgccacaccgtcgatccggaccgccacatcgagcgggtcaccgagctgcaagaactcttcctcacgcgcgtcgggctcgacatcggcaaggtgtgggtcgcggacgacggcgccgcggtggcggtctggaccacgccggagagcgtcgaagcgggggcggtgttcgccgagatcggcccgcgcatggccgagttgagcggttcccggctggccgcgcagcaacagatggaaggcctcctggcgccgcaccggcccaaggagcccgcgtggttcctggccaccgtcggcgtctcgcccgaccaccagggcaagggtctgggcagcgccgtcgtgctccccggagtggaggcggccgagcgcgccggggtgcccgccttcctggagacctccgcgccccgcaacctccccttctacgagcggctcggcttcaccgtcaccgccgacgtcgaggtgcccgaaggaccgcgcacctggtgcatgacccgcaagcccggtgcctga

SEQ ID NO: 1807 - DNA, 1635 bp, Artificial Sequence; identical to SEQ ID NO: 1664
  Synthetic Polynucleotide

SEQ ID NO: 1808 - DNA, 2730 bp, Artificial Sequence
  Synthetic Polynucleotide
atggccttaccagtgaccgccttgctcctgccgctggccttgctgctccacgccgccaggccggacatccagatgacacagagccctagcagcctgtctgccagcgtgggagacagagtgaccatcacatgcaaggccagcgaccacatcaacaactggctggcctggtatcagcagaagcctggacaggcccctaagctgctgatctacggcgctaccacactggaaacaggcgtgcccagcagattttctggcagcggctctggcaccgactacaccctgacaatatccagcctccagcctgaggacttcgccacctactactgtcagcagagctggaacaccccttggacattcggccagggcaccaagctggaaatcaagagactcgaggagatgtacgacacccctacactgagcgtgcaccccggacctgaagtgatctctggcgagaaagtgaccttctactgtcggctggataccgccaccagcatgtttctgctgctcaaagaaggccggtccagccacgtgcagcgcggatatggaaaagtgcaggccgagtttcccctgggacctgtgacaacagcccacagaggcacctacagatgcttcggcagctacaacaaccacgcttggagcttccctagcgagcccgtgaagttgcttgtgaccggcgacatcgagaacaccagtctggcccctgaggaccctacctttcctgccgatacctggggcacctacctgctgaccacagagacaggactccagaaagatcacgccctgtgggaccacacagcccagaacctgctgagaatgggcctcgcctttctggtgctggttgccctcgtgtggttcctggtggaagattggctgagccggaagcggacaagagagagagccagcagagcctctacctgggagggaagaagaaggctgaacacccagacacttagggccaagcgatctggatctggagcaacaaacttctcactactcaaacaagcaggtgacgtggaggagaatcccgggcctactagtatggactggatttggcgcatccttttccttgtcggcgctgctaccggcgcgcattccttcgaacaagttcagcttcaacagcctggcgctgagctggtcaaacctggcgcttctgtgaagatgagctgcaaagccagcggctacgccttcagcagctactggatcaactggatgaagcagaaacccggccagggactcgaatggatcggccaaatctatcccggcgacggcgacaccaactacaacggcaagttcaagggcagagccacactgaccgccgatacctctagcagcacagcctacatgcagctgagcagcctgaccagcgaagatagcgccgtgtacttctgtgcccggtccatcacaacagtcgtgggctgcgctatggactattggggccagggaacaagcgtgaccgtgtctagtacgcgtgagatgtatgatacacccacactgtctgtgcaccctgggccagaagttatcagcggagaaaaagttaccttttattgccgcctcgataccgctacctctatgttcctcttgctgaaagagggccgcagctctcacgtgcagcgaggctacggaaaggtccaagctgagtttcctctcggccccgtgaccaccgctcacaggggcacatatagatgttttggctcttataacaatcatgcctggtcattcccatccgagcctgtgaaactgctggtcacaggcgatattgagaatacctctctggccccagaagatcctacattccccgccgacacatggggaacatatctgctgacaaccgaaaccgggctgcaaaaggaccatgctctgtgggatcataccgctcagaatctgcttcggatggggcttgcattcctggtcctggtggctcttgtctggtttctggtcgaggactggctgtcccggaagagaaccagagaaagagcttccagggccagcacctgggaaggcagacgcagactgaatactcagaccctgcgcgccaagagaagcggatctggcgtgaagcagaccctgaatttcgacctgctgaagctggctggcgacgtggaatccaacccaggcccttctagaggccatatgaccgagtacaagcccacggtgcgcctcgccacccgcgacgacgtccccagggccgtacgcaccctcgccgccgcgttcgccgactaccccgccacgcgccacaccgtcgatccggaccgccacatcgagcgggtcaccgagctgcaagaactcttcctcacgcgcgtcgggctcgacatcggcaaggtgtgggtcgcggacgacggcgccgcggtggcggtctggaccacgccggagagcgtcgaagcgggggcggtgttcgccgagatcggcccgcgcatggccgagttgagcggttcccggctggccgcgcagcaacagatggaaggcctcctggcgccgcaccggcccaaggagcccgcgtggttcctggccaccgtcggcgtctcgcccgaccaccagggcaagggtctgggcagcgccgtcgtgctccccggagtggaggcggccgagcgcgccggggtgcccgccttcctggagacctccgcgccccgcaacctccccttctacgagcggctcggcttcaccgtcaccgccgacgtcgaggtgcccgaaggaccgcgcacctggtgcatgacccgcaagcccggtgcctga

SEQ ID NO: 1809 - DNA, 2892 bp, Artificial Sequence
  Synthetic Polynucleotide
atggccttaccagtgaccgccttgctcctgccgctggccttgctgctccacgccgccaggccggcatgcgaagtgcagctgcttgaaagtggcggcggactgattcagcctggcggatctctgagactgagctgtgccgccagcggcttcaccttttctagccacgccatgacctgggtccgacaggcacctggaaaagggcttgaatgggtgtccgccatcagcggctctggcgattacacacactacgccgacagcgtgaagggcagattcaccatcagcagagacaacagcaagaacaccgtgtacctccagatgaacagcctgagagccgaggacagcgccgtgtattattgcgccaaggatgaggatggcggcagcctgcttggacacagaggacaaggcaccctggtcaccgtttcttccggtaccggcggaggcggatctggcggcggaggtagcggtggcggaggatctgaattcggatctctcgaggagatgtacgacacccctacactgagcgtgcaccccggacctgaagtgatctctggcgagaaagtgaccttctactgtcggctggataccgccaccagcatgtttctgctgctcaaagaaggccggtccagccacgtgcagcgcggatatggaaaagtgcaggccgagtttcccctgggacctgtgacaacagcccacagaggcacctacagatgcttcggcagctacaacaaccacgcttggagcttccctagcgagcccgtgaagttgcttgtgaccggcgacatcgagaacaccagtctggcccctgaggaccctacctttcctgccgatacctggggcacctacctgctgaccacagagacaggactccagaaagatcacgccctgtgggaccacacagcccagaacctgctgagaatgggcctcgcctttctggtgctggttgccctcgtgtggttcctggtggaagattggctgagccggaagcggacaagagagagagccagcagagcctctacctgggagggaagaagaaggctgaacacccagacacttagggccaagcgatctggatctggagcaacaaacttctcactactcaaacaagcaggtgacgtggaggagaatcccgggcctactagtgccaccatggactggatttggcgcatccttttccttgtcggcgctgctaccggcgcccattccgggcccgaagtgcagctggttgaatctggcggaggactggttcaggctggcggatctctgagactgtcttgtgccgccagcggcagaacctttagcatgggctggtttagacaggcccctggcaaagagagagagttcgtcgccgccatcacatactctggcggcagcccttactacgccgactctgtgaagggcagattcaccatcagccgggacaacgccaagaacaccgtgtacctccagatgaacagcctgaagcctgaggacaccgccgtgtactactgcgccgccaatccaacatacggcagcgactggaacgccgagaattggggccagggaacccaagtgacagtgtctagcggatccggcggcggaggatctggcggaggcggatctgggggcggaggctctttcgaaggcagcacgcgtgagatgtatgatacacccacactgtctgtgcaccctgggccagaagttatcagcggagaaaaagttaccttttattgccgcctcgataccgctacctctatgttcctcttgctgaaagagggccgcagctctcacgtgcagcgaggctacggaaaggtccaagctgagtttcctctcggccccgtgaccaccgctcacaggggcacatatagatgttttggctcttataacaatcatgcctggtcattcccatccgagcctgtgaaactgctggtcacaggcgatattgagaatacctctctggccccagaagatcctacattccccgccgacacatggggaacatatctgctgacaaccgaaaccgggctgcaaaaggaccatgctctgtgggatcataccgctcagaatctgcttcggatggggcttgcattcctggtcctggtggctcttgtctggtttctggtcgaggactggctgtcccggaagagaaccagagaaagagcttccagggccagcacctgggaaggcagacgcagactgaatactcagaccctgcgcgccaagagaagcggatctggcgtgaagcagaccctgaatttcgacctgctgaagctggctggcgacgtggaatccaacccaggcccttctagaggccatatgaccgagtacaagcccacggtgcgcctcgccacccgcgacgacgtccccagggccgtacgcaccctcgccgccgcgttcgccgactaccccgccacgcgccacaccgtcgatccggaccgccacatcgagcgggtcaccgagctgcaagaactcttcctcacgcgcgtcgggctcgacatcggcaaggtgtgggtcgcggacgacggcgccgcggtggcggtctggaccacgccggagagcgtcgaagcgggggcggtgttcgccgagatcggcccgcgcatggccgagttgagcggttcccggctggccgcgcagcaacagatggaaggcctcctggcgccgcaccggcccaaggagcccgcgtggttcctggccaccgtcggcgtctcgcccgaccaccagggcaagggtctgggcagcgccgtcgtgctccccggagtggaggcggccgagcgcgccggggtgcccgccttcctggagacctccgcgccccgcaacctccccttctacgagcggctcggcttcaccgtcaccgccgacgtcgaggtgcccgaaggaccgcgcacctggtgcatgacccgcaagcccggtgcctga

SEQ ID NO: 1810 - DNA, 3342 bp, Artificial Sequence
  Synthetic Polynucleotide
atggccttaccagtgaccgccttgctcctgccgctggccttgctgctccacgccgccaggccggacatccagatgacacagagccctagcagcctgtctgccagcgtgggagacagagtgaccatcacatgcaaggccagcgaccacatcaacaactggctggcctggtatcagcagaagcctggacaggcccctaagctgctgatctacggcgctaccacactggaaacaggcgtgcccagcagattttctggcagcggctctggcaccgactacaccctgacaatatccagcctccagcctgaggacttcgccacctactactgtcagcagagctggaacaccccttggacattcggccagggcaccaagctggaaatcaagagactcgagggacagcctaaggccaatcctaccgtgacactgttccctccaagcagcgaagaactccaggccaacaaggccacacttgtgtgcctgatctccgacttctaccctggggctgtgacagtggcttggaaggccgatggatctcctgtgaaagccggcgtggaaaccaccaagccatccaagcagagcaacaacaaatacgccgccagctcctacctgagcctgacacctgagcagtggaagtcccacagatcctacagctgccaagtgacccacgaaggcagcaccgtggaaaagacagtggcccctacagagtgcagcggatccgagatgtacgacacccctacactgagcgtgcaccccggacctgaagtgatctctggcgagaaagtgaccttctactgtcggctggataccgccaccagcatgtttctgctgctcaaagaaggccggtccagccacgtgcagcgcggatatggaaaagtgcaggccgagtttcccctgggacctgtgacaacagcccacagaggcacctacagatgcttcggcagctacaacaaccacgcttggagcttccctagcgagcccgtgaagttgcttgtgaccggcgacatcgagaacaccagtctggcccctgaggaccctacctttcctgccgatacctggggcacctacctgctgaccacagagacaggactccagaaagatcacgccctgtgggaccacacagcccagaacctgctgagaatgggcctcgcctttctggtgctggttgccctcgtgtggttcctggtggaagattggctgagccggaagcggacaagagagagagccagcagagcctctacctgggagggaagaagaaggctgaacacccagacacttagggccaagcgatctggatctggagcaacaaacttctcactactcaaacaagcaggtgacgtggaggagaatcccgggcctactagtatggactggatttggcgcatccttttccttgtcggcgctgctaccggcgcgcattccttcgaacaagttcagcttcaacagcctggcgctgagctggtcaaacctggcgcttctgtgaagatgagctgcaaagccagcggctacgccttcagcagctactggatcaactggatgaagcagaaacccggccagggactcgaatggatcggccaaatctatcccggcgacggcgacaccaactacaacggcaagttcaagggcagagccacactgaccgccgatacctctagcagcacagcctacatgcagctgagcagcctgaccagcgaagatagcgccgtgtacttctgtgcccggtccatcacaacagtcgtgggctgcgctatggactattggggccagggaacaagcgtgaccgtgtctagtacgcgtgcctctacaaagggaccctccgtgtttcctctggctcccagcagcaagtctacaagcggaggaacagccgctctgggctgcctggtcaaggattactttcccgagcctgtgaccgtgtcctggaatagcggagcactgacaagcggcgtgcacacctttccagccgtgctgcaaagcagcggcctgtactctctgagcagcgtggtcacagtgcctagctctagcctgggcacccagacctacatctgcaatgtgaaccacaagcctagcaacaccaaggtggacaagagagtggaacccaagagctgtggtaccgagatgtatgatacacccacactgtctgtgcaccctgggccagaagttatcagcggagaaaaagttaccttttattgccgcctcgataccgctacctctatgttcctcttgctgaaagagggccgcagctctcacgtgcagcgaggctacggaaaggtccaagctgagtttcctctcggccccgtgaccaccgctcacaggggcacatatagatgttttggctcttataacaatcatgcctggtcattcccatccgagcctgtgaaactgctggtcacaggcgatattgagaatacctctctggccccagaagatcctacattccccgccgacacatggggaacatatctgctgacaaccgaaaccgggctgcaaaaggaccatgctctgtgggatcataccgctcagaatctgcttcggatggggcttgcattcctggtcctggtggctcttgtctggtttctggtcgaggactggctgtcccggaagagaaccagagaaagagcttccagggccagcacctgggaaggcagacgcagactgaatactcagaccctgcgcgccaagagaagcggatctggcgtgaagcagaccctgaatttcgacctgctgaagctggctggcgacgtggaatccaacccaggcccttctagaggcgggatccacaccatggctacctacgaggtgctgtgcgaggtggcaagaaagctgggcaccgacgacagagaagtggtgctgttcctgctgaacgtgttcatccctcagcctacactggcccagctgatcggtgcactgagagccctgaaagaggaaggccggctgacctttcctctgctggccgaatgcctgttcagagccggaagaagggatctgctgcgggacctgctgcatctggaccccagatttctggaaagacacctggccggcaccatgagctacttcagcccttaccagctgaccgtgctgcacgttgacggcgaactgtgcgccagagatattcggagcctgatcttcctgagcaaggacaccatcggcagccggtctacccctcagacatttctgcactgggtgtactgcatggaaaacctggacctgctcggccccacagatgtggatgccctgatgtccatgctgagaagcctgagcagagtggacctccagagacaggtgcagacactgatgggactgcacctgagcggacctagccacagccagcactacagacacacccct

SEQ ID NO: 1811 - DNA, 3501 bp, Artificial Sequence
  Synthetic Polynucleotide
atggccttaccagtgaccgccttgctcctgccgctggccttgctgctccacgccgccaggccggacatccagatgacacagagccctagcagcctgtctgccagcgtgggagacagagtgaccatcacatgcaaggccagcgaccacatcaacaactggctggcctggtatcagcagaagcctggacaggcccctaagctgctgatctacggcgctaccacactggaaacaggcgtgcccagcagattttctggcagcggctctggcaccgactacaccctgacaatatccagcctccagcctgaggacttcgccacctactactgtcagcagagctggaacaccccttggacattcggccagggcaccaagctggaaatcaagagactcgagggacagcctaaggccaatcctaccgtgacactgttccctccaagcagcgaagaactccaggccaacaaggccacacttgtgtgcctgatctccgacttctaccctggggctgtgacagtggcttggaaggccgatggatctcctgtgaaagccggcgtggaaaccaccaagccatccaagcagagcaacaacaaatacgccgccagctcctacctgagcctgacacctgagcagtggaagtcccacagatcctacagctgccaagtgacccacgaaggcagcaccgtggaaaagacagtggcccctacagagtgcagcggatccgagatgtacgacacccctacactgagcgtgcaccccggacctgaagtgatctctggcgagaaagtgaccttctactgtcggctggataccgccaccagcatgtttctgctgctcaaagaaggccggtccagccacgtgcagcgcggatatggaaaagtgcaggccgagtttcccctgggacctgtgacaacagcccacagaggcacctacagatgcttcggcagctacaacaaccacgcttggagcttccctagcgagcccgtgaagttgcttgtgaccggcgacatcgagaacaccagtctggcccctgaggaccctacctttcctgccgatacctggggcacctacctgctgaccacagagacaggactccagaaagatcacgccctgtgggaccacacagcccagaacctgctgagaatgggcctcgcctttctggtgctggttgccctcgtgtggttcctggtggaagattggctgagccggaagcggacaagagagagagccagcagagcctctacctgggagggaagaagaaggctgaacacccagacacttagggccaagcgatctggatctggagcaacaaacttctcactactcaaacaagcaggtgacgtggaggagaatcccgggcctactagtatggactggatttggcgcatccttttccttgtcggcgctgctaccggcgcgcattccttcgaacaagttcagcttcaacagcctggcgctgagctggtcaaacctggcgcttctgtgaagatgagctgcaaagccagcggctacgccttcagcagctactggatcaactggatgaagcagaaacccggccagggactcgaatggatcggccaaatctatcccggcgacggcgacaccaactacaacggcaagttcaagggcagagccacactgaccgccgatacctctagcagcacagcctacatgcagctgagcagcctgaccagcgaagatagcgccgtgtacttctgtgcccggtccatcacaacagtcgtgggctgcgctatggactattggggccagggaacaagcgtgaccgtgtctagtacgcgtgcctctacaaagggaccctccgtgtttcctctggctcccagcagcaagtctacaagcggaggaacagccgctctgggctgcctggtcaaggattactttcccgagcctgtgaccgtgtcctggaatagcggagcactgacaagcggcgtgcacacctttccagccgtgctgcaaagcagcggcctgtactctctgagcagcgtggtcacagtgcctagctctagcctgggcacccagacctacatctgcaatgtgaaccacaagcctagcaacaccaaggtggacaagagagtggaacccaagagctgtggtaccgagatgtatgatacacccacactgtctgtgcaccctgggccagaagttatcagcggagaaaaagttaccttttattgccgcctcgataccgctacctctatgttcctcttgctgaaagagggccgcagctctcacgtgcagcgaggctacggaaaggtccaagctgagtttcctctcggccccgtgaccaccgctcacaggggcacatatagatgttttggctcttataacaatcatgcctggtcattcccatccgagcctgtgaaactgctggtcacaggcgatattgagaatacctctctggccccagaagatcctacattccccgccgacacatggggaacatatctgctgacaaccgaaaccgggctgcaaaaggaccatgctctgtgggatcataccgctcagaatctgcttcggatggggcttgcattcctggtcctggtggctcttgtctggtttctggtcgaggactggctgtcccggaagagaaccagagaaagagcttccagggccagcacctgggaaggcagacgcagactgaatactcagaccctgcgcgccaagagaagcggatctggcgtgaagcagaccctgaatttcgacctgctgaagctggctggcgacgtggaatccaacccaggcccttctagaggcgggatccacaccatgtccgactccaaggaggtccctagccttccatttttgcgacacttgctcgaagagttggacagccatgaggacagcttgctgctgtttctgtgtcacgacgcggccccgggctgcacgacggtcacgcaagctttgtgctcgcttagccaacagcgcaagctgaccctcgcggctctggtcgagatgctctacgtgctgcagcgtatggatcttctcaagagccgcttcgggctcagcaaggagggggccgagcaattgctgggcacaagctttctcacgcgctaccgcaagctcatggtttgcgtgggtgaggagctcgactcgagcgagctacgcgctctacgcttgttcgcgtgcaacctgaatccgagcctgagcacggcgctttctgagagcagccgctttgtcgagcttgtactcgcgcttgaaaacgtaggactcgtctcgccatcgagtgtttccgtgcttgcggacatgttgcgcactcttcggcgcctcgatttgtgccagcagcttgttgagtacgaacaacaagagcaagccaggtaccgttactgttacgcggcctcgccctcattgccagttcgtacgttacgtcgggggcacggcgcgagtgaacacgagcagctgtgcatgcccgtgcaagaatcctctgacagccccgagctgctgcgcacgcccgtacaagaatcctccagcgacagccccgagcaaacgact

SEQ ID NO: 1812 - DNA, 3369 bp, Artificial Sequence
  Synthetic Polynucleotide
atggccttaccagtgaccgccttgctcctgccgctggccttgctgctccacgccgccaggccggacatccagatgacacagagccctagcagcctgtctgccagcgtgggagacagagtgaccatcacatgcaaggccagcgaccacatcaacaactggctggcctggtatcagcagaagcctggacaggcccctaagctgctgatctacggcgctaccacactggaaacaggcgtgcccagcagattttctggcagcggctctggcaccgactacaccctgacaatatccagcctccagcctgaggacttcgccacctactactgtcagcagagctggaacaccccttggacattcggccagggcaccaagctggaaatcaagagactcgagggacagcctaaggccaatcctaccgtgacactgttccctccaagcagcgaagaactccaggccaacaaggccacacttgtgtgcctgatctccgacttctaccctggggctgtgacagtggcttggaaggccgatggatctcctgtgaaagccggcgtggaaaccaccaagccatccaagcagagcaacaacaaatacgccgccagctcctacctgagcctgacacctgagcagtggaagtcccacagatcctacagctgccaagtgacccacgaaggcagcaccgtggaaaagacagtggcccctacagagtgcagcggatccgagatgtacgacacccctacactgagcgtgcaccccggacctgaagtgatctctggcgagaaagtgaccttctactgtcggctggataccgccaccagcatgtttctgctgctcaaagaaggccggtccagccacgtgcagcgcggatatggaaaagtgcaggccgagtttcccctgggacctgtgacaacagcccacagaggcacctacagatgcttcggcagctacaacaaccacgcttggagcttccctagcgagcccgtgaagttgcttgtgaccggcgacatcgagaacaccagtctggcccctgaggaccctacctttcctgccgatacctggggcacctacctgctgaccacagagacaggactccagaaagatcacgccctgtgggaccacacagcccagaacctgctgagaatgggcctcgcctttctggtgctggttgccctcgtgtggttcctggtggaagattggctgagccggaagcggacaagagagagagccagcagagcctctacctgggagggaagaagaaggctgaacacccagacacttagggccaagcgatctggatctggagcaacaaacttctcactactcaaacaagcaggtgacgtggaggagaatcccgggcctactagtatggactggatttggcgcatccttttccttgtcggcgctgctaccggcgcgcattccttcgaacaagttcagcttcaacagcctggcgctgagctggtcaaacctggcgcttctgtgaagatgagctgcaaagccagcggctacgccttcagcagctactggatcaactggatgaagcagaaacccggccagggactcgaatggatcggccaaatctatcccggcgacggcgacaccaactacaacggcaagttcaagggcagagccacactgaccgccgatacctctagcagcacagcctacatgcagctgagcagcctgaccagcgaagatagcgccgtgtacttctgtgcccggtccatcacaacagtcgtgggctgcgctatggactattggggccagggaacaagcgtgaccgtgtctagtacgcgtgcctctacaaagggaccctccgtgtttcctctggctcccagcagcaagtctacaagcggaggaacagccgctctgggctgcctggtcaaggattactttcccgagcctgtgaccgtgtcctggaatagcggagcactgacaagcggcgtgcacacctttccagccgtgctgcaaagcagcggcctgtactctctgagcagcgtggtcacagtgcctagctctagcctgggcacccagacctacatctgcaatgtgaaccacaagcctagcaacaccaaggtggacaagagagtggaacccaagagctgtggtaccgagatgtatgatacacccacactgtctgtgcaccctgggccagaagttatcagcggagaaaaagttaccttttattgccgcctcgataccgctacctctatgttcctcttgctgaaagagggccgcagctctcacgtgcagcgaggctacggaaaggtccaagctgagtttcctctcggccccgtgaccaccgctcacaggggcacatatagatgttttggctcttataacaatcatgcctggtcattcccatccgagcctgtgaaactgctggtcacaggcgatattgagaatacctctctggccccagaagatcctacattccccgccgacacatggggaacatatctgctgacaaccgaaaccgggctgcaaaaggaccatgctctgtgggatcataccgctcagaatctgcttcggatggggcttgcattcctggtcctggtggctcttgtctggtttctggtcgaggactggctgtcccggaagagaaccagagaaagagcttccagggccagcacctgggaaggcagacgcagactgaatactcagaccctgcgcgccaagagaagcggatctggcgtgaagcagaccctgaatttcgacctgctgaagctggctggcgacgtggaatccaacccaggcccttctagaggccatatgaccgagtacaagcccacggtgcgcctcgccacccgcgacgacgtccccagggccgtacgcaccctcgccgccgcgttcgccgactaccccgccacgcgccacaccgtcgatccggaccgccacatcgagcgggtcaccgagctgcaagaactcttcctcacgcgcgtcgggctcgacatcggcaaggtgtgggtcgcggacgacggcgccgcggtggcggtctggaccacgccggagagcgtcgaagcgggggcggtgttcgccgagatcggcccgcgcatggccgagttgagcggttcccggctggccgcgcagcaacagatggaaggcctcctggcgccgcaccggcccaaggagcccgcgtggttcctggccaccgtcggcgtctcgcccgaccaccagggcaagggtctgggcagcgccgtcgtgctccccggagtggaggcggccgagcgcgccggggtgcccgccttcctggagacctccgcgccccgcaacctccccttctacgagcggctcggcttcaccgtcaccgccgacgtcgaggtgcccgaaggaccgcgcacctggtgcatgacccgcaagcccggtgcctga

SEQ ID NO: 1813 - DNA, 3780 bp, Artificial Sequence
  Synthetic Polynucleotide
atggccttaccagtgaccgccttgctcctgccgctggccttgctgctccacgccgccaggccggaagtgcagctggttgaatctggcggaggactggttcaggctggcggatctctgagactgtcttgtgccgccagcggcagaacctttagcatgggctggtttagacaggcccctggcaaagagagagagttcgtcgccgccatcacatactctggcggcagcccttactacgccgactctgtgaagggcagattcaccatcagccgggacaacgccaagaacaccgtgtacctccagatgaacagcctgaagcctgaggacaccgccgtgtactactgcgccgccaatccaacatacggcagcgactggaacgccgagaattggggccagggaacccaagtgacagtgtctagcggtaccggcggaggcggatctggcggcggaggtagcggtggcggaggatctgaattcgacatccagatgacacagagccctagcagcctgtctgccagcgtgggagacagagtgaccatcacatgcaaggccagcgaccacatcaacaactggctggcctggtatcagcagaagcctggacaggcccctaagctgctgatctacggcgctaccacactggaaacaggcgtgcccagcagattttctggcagcggctctggcaccgactacaccctgacaatatccagcctccagcctgaggacttcgccacctactactgtcagcagagctggaacaccccttggacattcggccagggcaccaagctggaaatcaagagactcgagggacagcctaaggccaatcctaccgtgacactgttccctccaagcagcgaagaactccaggccaacaaggccacacttgtgtgcctgatctccgacttctaccctggggctgtgacagtggcttggaaggccgatggatctcctgtgaaagccggcgtggaaaccaccaagccatccaagcagagcaacaacaaatacgccgccagctcctacctgagcctgacacctgagcagtggaagtcccacagatcctacagctgccaagtgacccacgaaggcagcaccgtggaaaagacagtggcccctacagagtgcagcggatccgagatgtacgacacccctacactgagcgtgcaccccggacctgaagtgatctctggcgagaaagtgaccttctactgtcggctggataccgccaccagcatgtttctgctgctcaaagaaggccggtccagccacgtgcagcgcggatatggaaaagtgcaggccgagtttcccctgggacctgtgacaacagcccacagaggcacctacagatgcttcggcagctacaacaaccacgcttggagcttccctagcgagcccgtgaagttgcttgtgaccggcgacatcgagaacaccagtctggcccctgaggaccctacctttcctgccgatacctggggcacctacctgctgaccacagagacaggactccagaaagatcacgccctgtgggaccacacagcccagaacctgctgagaatgggcctcgcctttctggtgctggttgccctcgtgtggttcctggtggaagattggctgagccggaagcggacaagagagagagccagcagagcctctacctgggagggaagaagaaggctgaacacccagacacttagggccaagcgatctggatctggagcaacaaacttctcactactcaaacaagcaggtgacgtggaggagaatcccgggcctactagtatggactggatttggcgcatccttttccttgtcggcgctgctaccggcgcgcattccttcgaacaagttcagcttcaacagcctggcgctgagctggtcaaacctggcgcttctgtgaagatgagctgcaaagccagcggctacgccttcagcagctactggatcaactggatgaagcagaaacccggccagggactcgaatggatcggccaaatctatcccggcgacggcgacaccaactacaacggcaagttcaagggcagagccacactgaccgccgatacctctagcagcacagcctacatgcagctgagcagcctgaccagcgaagatagcgccgtgtacttctgtgcccggtccatcacaacagtcgtgggctgcgctatggactattggggccagggaacaagcgtgaccgtgtctagtacgcgtgcctctacaaagggaccctccgtgtttcctctggctcccagcagcaagtctacaagcggaggaacagccgctctgggctgcctggtcaaggattactttcccgagcctgtgaccgtgtcctggaatagcggagcactgacaagcggcgtgcacacctttccagccgtgctgcaaagcagcggcctgtactctctgagcagcgtggtcacagtgcctagctctagcctgggcacccagacctacatctgcaatgtgaaccacaagcctagcaacaccaaggtggacaagagagtggaacccaagagctgtggtaccgagatgtatgatacacccacactgtctgtgcaccctgggccagaagttatcagcggagaaaaagttaccttttattgccgcctcgataccgctacctctatgttcctcttgctgaaagagggccgcagctctcacgtgcagcgaggctacggaaaggtccaagctgagtttcctctcggccccgtgaccaccgctcacaggggcacatatagatgttttggctcttataacaatcatgcctggtcattcccatccgagcctgtgaaactgctggtcacaggcgatattgagaatacctctctggccccagaagatcctacattccccgccgacacatggggaacatatctgctgacaaccgaaaccgggctgcaaaaggaccatgctctgtgggatcataccgctcagaatctgcttcggatggggcttgcattcctggtcctggtggctcttgtctggtttctggtcgaggactggctgtcccggaagagaaccagagaaagagcttccagggccagcacctgggaaggcagacgcagactgaatactcagaccctgcgcgccaagagaagcggatctggcgtgaagcagaccctgaatttcgacctgctgaagctggctggcgacgtggaatccaacccaggcccttctagaggccatatgaccgagtacaagcccacggtgcgcctcgccacccgcgacgacgtccccagggccgtacgcaccctcgccgccgcgttcgccgactaccccgccacgcgccacaccgtcgatccggaccgccacatcgagcgggtcaccgagctgcaagaactcttcctcacgcgcgtcgggctcgacatcggcaaggtgtgggtcgcggacgacggcgccgcggtggcggtctggaccacgccggagagcgtcgaagcgggggcggtgttcgccgagatcggcccgcgcatggccgagttgagcggttcccggctggccgcgcagcaacagatggaaggcctcctggcgccgcaccggcccaaggagcccgcgtggttcctggccaccgtcggcgtctcgcccgaccaccagggcaagggtctgggcagcgccgtcgtgctccccggagtggaggcggccgagcgcgccggggtgcccgccttcctggagacctccgcgccccgcaacctccccttctacgagcggctcggcttcaccgtcaccgccgacgtcgaggtgcccgaaggaccgcgcacctggtgcatgacccgcaagcccggtgcctga

SEQ ID NO: 1814 - DNA, 4191 bp, Artificial Sequence
  Synthetic Polynucleotide
atggccttaccagtgaccgccttgctcctgccgctggccttgctgctccacgccgccaggccggaagtgcagctggttgaatctggcggaggactggttcaggctggcggatctctgagactgtcttgtgccgccagcggcagaacctttagcatgggctggtttagacaggcccctggcaaagagagagagttcgtcgccgccatcacatactctggcggcagcccttactacgccgactctgtgaagggcagattcaccatcagccgggacaacgccaagaacaccgtgtacctccagatgaacagcctgaagcctgaggacaccgccgtgtactactgcgccgccaatccaacatacggcagcgactggaacgccgagaattggggccagggaacccaagtgacagtgtctagcggtaccggcggaggcggatctggcggcggaggtagcggtggcggaggatctgaattcgacatccagatgacacagagccctagcagcctgtctgccagcgtgggagacagagtgaccatcacatgcaaggccagcgaccacatcaacaactggctggcctggtatcagcagaagcctggacaggcccctaagctgctgatctacggcgctaccacactggaaacaggcgtgcccagcagattttctggcagcggctctggcaccgactacaccctgacaatatccagcctccagcctgaggacttcgccacctactactgtcagcagagctggaacaccccttggacattcggccagggcaccaagctggaaatcaagagactcgagggacagcctaaggccaatcctaccgtgacactgttccctccaagcagcgaagaactccaggccaacaaggccacacttgtgtgcctgatctccgacttctaccctggggctgtgacagtggcttggaaggccgatggatctcctgtgaaagccggcgtggaaaccaccaagccatccaagcagagcaacaacaaatacgccgccagctcctacctgagcctgacacctgagcagtggaagtcccacagatcctacagctgccaagtgacccacgaaggcagcaccgtggaaaagacagtggcccctacagagtgcagcggatccgagatgtacgacacccctacactgagcgtgcaccccggacctgaagtgatctctggcgagaaagtgaccttctactgtcggctggataccgccaccagcatgtttctgctgctcaaagaaggccggtccagccacgtgcagcgcggatatggaaaagtgcaggccgagtttcccctgggacctgtgacaacagcccacagaggcacctacagatgcttcggcagctacaacaaccacgcttggagcttccctagcgagcccgtgaagttgcttgtgaccggcgacatcgagaacaccagtctggcccctgaggaccctacctttcctgccgatacctggggcacctacctgctgaccacagagacaggactccagaaagatcacgccctgtgggaccacacagcccagaacctgctgagaatgggcctcgcctttctggtgctggttgccctcgtgtggttcctggtggaagattggctgagccggaagcggacaagagagagagccagcagagcctctacctgggagggaagaagaaggctgaacacccagacacttagggccaagcgatctggatctggagcaacaaacttctcactactcaaacaagcaggtgacgtggaggagaatcccgggcctactagtatggactggatttggcgcatccttttccttgtcggcgctgctaccggcgcgcattccgggcccgaagtgcaactggttgaatccggtggcggcctggtgcaagcaggcggatctctcagacttagctgtgccgcctccggcagaaccttcacaatgggatggtttaggcaggctccagggaaagagagagagttcgtcgccgccatctctctgtctcccacactggcctactacgccgactctgtgaaaggccggttcaccatctccagagataatgccaagaacaccgtggtgctgcaaatgaactctctgaaacccgaggatacagccctgtactattgtgccgctgaccggaagtccgtgatgagcatcagacccgattactggggacagggcacacaagtcacagtgtcctctggatccggcggcggaggatctggcggaggcggatctgggggcggaggctctttcgaacaagttcagcttcaacagcctggcgctgagctggtcaaacctggcgcttctgtgaagatgagctgcaaagccagcggctacgccttcagcagctactggatcaactggatgaagcagaaacccggccagggactcgaatggatcggccaaatctatcccggcgacggcgacaccaactacaacggcaagttcaagggcagagccacactgaccgccgatacctctagcagcacagcctacatgcagctgagcagcctgaccagcgaagatagcgccgtgtacttctgtgcccggtccatcacaacagtcgtgggctgcgctatggactattggggccagggaacaagcgtgaccgtgtctagtacgcgtgcctctacaaagggaccctccgtgtttcctctggctcccagcagcaagtctacaagcggaggaacagccgctctgggctgcctggtcaaggattactttcccgagcctgtgaccgtgtcctggaatagcggagcactgacaagcggcgtgcacacctttccagccgtgctgcaaagcagcggcctgtactctctgagcagcgtggtcacagtgcctagctctagcctgggcacccagacctacatctgcaatgtgaaccacaagcctagcaacaccaaggtggacaagagagtggaacccaagagctgtggtaccgagatgtatgatacacccacactgtctgtgcaccctgggccagaagttatcagcggagaaaaagttaccttttattgccgcctcgataccgctacctctatgttcctcttgctgaaagagggccgcagctctcacgtgcagcgaggctacggaaaggtccaagctgagtttcctctcggccccgtgaccaccgctcacaggggcacatatagatgttttggctcttataacaatcatgcctggtcattcccatccgagcctgtgaaactgctggtcacaggcgatattgagaatacctctctggccccagaagatcctacattccccgccgacacatggggaacatatctgctgacaaccgaaaccgggctgcaaaaggaccatgctctgtgggatcataccgctcagaatctgcttcggatggggcttgcattcctggtcctggtggctcttgtctggtttctggtcgaggactggctgtcccggaagagaaccagagaaagagcttccagggccagcacctgggaaggcagacgcagactgaatactcagaccctgcgcgccaagagaagcggatctggcgtgaagcagaccctgaatttcgacctgctgaagctggctggcgacgtggaatccaacccaggcccttctagaggccatatgaccgagtacaagcccacggtgcgcctcgccacccgcgacgacgtccccagggccgtacgcaccctcgccgccgcgttcgccgactaccccgccacgcgccacaccgtcgatccggaccgccacatcgagcgggtcaccgagctgcaagaactcttcctcacgcgcgtcgggctcgacatcggcaaggtgtgggtcgcggacgacggcgccgcggtggcggtctggaccacgccggagagcgtcgaagcgggggcggtgttcgccgagatcggcccgcgcatggccgagttgagcggttcccggctggccgcgcagcaacagatggaaggcctcctggcgccgcaccggcccaaggagcccgcgtggttcctggccaccgtcggcgtctcgcccgaccaccagggcaagggtctgggcagcgccgtcgtgctccccggagtggaggcggccgagcgcgccggggtgcccgccttcctggagacctccgcgccccgcaacctccccttctacgagcggctcggcttcaccgtcaccgccgacgtcgaggtgcccgaaggaccgcgcacctggtgcatgacccgcaagcccggtgcctga

SEQ ID NO: 1815 - DNA, 3390 bp, Artificial Sequence
  Synthetic Polynucleotide
atggccttaccagtgaccgccttgctcctgccgctggccttgctgctccacgccgccaggccggaagtgcagctggttgaatctggcggaggactggttcaggctggcggatctctgagactgtcttgtgccgccagcggcagaacctttagcatgggctggtttagacaggcccctggcaaagagagagagttcgtcgccgccatcacatactctggcggcagcccttactacgccgactctgtgaagggcagattcaccatcagccgggacaacgccaagaacaccgtgtacctccagatgaacagcctgaagcctgaggacaccgccgtgtactactgcgccgccaatccaacatacggcagcgactggaacgccgagaattggggccagggaacccaagtgacagtgtctagcctcgagggacagcctaaggccaatcctaccgtgacactgttccctccaagcagcgaagaactccaggccaacaaggccacacttgtgtgcctgatctccgacttctaccctggggctgtgacagtggcttggaaggccgatggatctcctgtgaaagccggcgtggaaaccaccaagccatccaagcagagcaacaacaaatacgccgccagctcctacctgagcctgacacctgagcagtggaagtcccacagatcctacagctgccaagtgacccacgaaggcagcaccgtggaaaagacagtggcccctacagagtgcagcggatccgagatgtacgacacccctacactgagcgtgcaccccggacctgaagtgatctctggcgagaaagtgaccttctactgtcggctggataccgccaccagcatgtttctgctgctcaaagaaggccggtccagccacgtgcagcgcggatatggaaaagtgcaggccgagtttcccctgggacctgtgacaacagcccacagaggcacctacagatgcttcggcagctacaacaaccacgcttggagcttccctagcgagcccgtgaagttgcttgtgaccggcgacatcgagaacaccagtctggcccctgaggaccctacctttcctgccgatacctggggcacctacctgctgaccacagagacaggactccagaaagatcacgccctgtgggaccacacagcccagaacctgctgagaatgggcctcgcctttctggtgctggttgccctcgtgtggttcctggtggaagattggctgagccggaagcggacaagagagagagccagcagagcctctacctgggagggaagaagaaggctgaacacccagacacttagggccaagcgatctggatctggagcaacaaacttctcactactcaaacaagcaggtgacgtggaggagaatcccgggcctactagtatggactggatttggcgcatccttttccttgtcggcgctgctaccggcgcgcattccgggcccgaagtgcaactggttgaatccggtggcggcctggtgcaagcaggcggatctctcagacttagctgtgccgcctccggcagaaccttcacaatgggatggtttaggcaggctccagggaaagagagagagttcgtcgccgccatctctctgtctcccacactggcctactacgccgactctgtgaaaggccggttcaccatctccagagataatgccaagaacaccgtggtgctgcaaatgaactctctgaaacccgaggatacagccctgtactattgtgccgctgaccggaagtccgtgatgagcatcagacccgattactggggacagggcacacaagtcacagtgtcctctacgcgtgcctctacaaagggaccctccgtgtttcctctggctcccagcagcaagtctacaagcggaggaacagccgctctgggctgcctggtcaaggattactttcccgagcctgtgaccgtgtcctggaatagcggagcactgacaagcggcgtgcacacctttccagccgtgctgcaaagcagcggcctgtactctctgagcagcgtggtcacagtgcctagctctagcctgggcacccagacctacatctgcaatgtgaaccacaagcctagcaacaccaaggtggacaagagagtggaacccaagagctgtggtaccgagatgtatgatacacccacactgtctgtgcaccctgggccagaagttatcagcggagaaaaagttaccttttattgccgcctcgataccgctacctctatgttcctcttgctgaaagagggccgcagctctcacgtgcagcgaggctacggaaaggtccaagctgagtttcctctcggccccgtgaccaccgctcacaggggcacatatagatgttttggctcttataacaatcatgcctggtcattcccatccgagcctgtgaaactgctggtcacaggcgatattgagaatacctctctggccccagaagatcctacattccccgccgacacatggggaacatatctgctgacaaccgaaaccgggctgcaaaaggaccatgctctgtgggatcataccgctcagaatctgcttcggatggggcttgcattcctggtcctggtggctcttgtctggtttctggtcgaggactggctgtcccggaagagaaccagagaaagagcttccagggccagcacctgggaaggcagacgcagactgaatactcagaccctgcgcgccaagagaagcggatctggcgtgaagcagaccctgaatttcgacctgctgaagctggctggcgacgtggaatccaacccaggcccttctagaggccatatgaccgagtacaagcccacggtgcgcctcgccacccgcgacgacgtccccagggccgtacgcaccctcgccgccgcgttcgccgactaccccgccacgcgccacaccgtcgatccggaccgccacatcgagcgggtcaccgagctgcaagaactcttcctcacgcgcgtcgggctcgacatcggcaaggtgtgggtcgcggacgacggcgccgcggtggcggtctggaccacgccggagagcgtcgaagcgggggcggtgttcgccgagatcggcccgcgcatggccgagttgagcggttcccggctggccgcgcagcaacagatggaaggcctcctggcgccgcaccggcccaaggagcccgcgtggttcctggccaccgtcggcgtctcgcccgaccaccagggcaagggtctgggcagcgccgtcgtgctccccggagtggaggcggccgagcgcgccggggtgcccgccttcctggagacctccgcgccccgcaacctccccttctacgagcggctcggcttcaccgtcaccgccgacgtcgaggtgcccgaaggaccgcgcacctggtgcatgacccgcaagcccggtgcctga

SEQ ID NO: 1816 - DNA, 3414 bp, Artificial Sequence
  Synthetic Polynucleotide
atggccttaccagtgaccgccttgctcctgccgctggccttgctgctccacgccgccaggccggacatccagatgacacagagccctagcagcctgtctgccagcgtgggagacagagtgaccatcacatgcaaggccagcgaccacatcaacaactggctggcctggtatcagcagaagcctggacaggcccctaagctgctgatctacggcgctaccacactggaaacaggcgtgcccagcagattttctggcagcggctctggcaccgactacaccctgacaatatccagcctccagcctgaggacttcgccacctactactgtcagcagagctggaacaccccttggacattcggccagggcaccaagctggaaatcaagagactcgaggacctgaagaacgtgttcccacctgaggtggccgtgttcgagcctagcgaggccgagatcagccacacccagaaagccaccctcgtgtgcctggctaccggcttctaccccgaccatgtggaactgtcttggtgggtcaacggcaaagaggtgcacagcggcgtgtctaccgacccccagccactgaaagaacagcccgccctgaacgacagccggtactgcctgagcagcagactgagagtgtccgccaccttctggcagaacccccggaaccacttcagatgccaggtgcagttctacggcctgagcgagaacgacgagtggacccaggacagagccaagcccgtgacccagatcgtgtctgccgaagcctggggcagagccgattgcggatccgagatgtacgacacccctacactgagcgtgcaccccggacctgaagtgatctctggcgagaaagtgaccttctactgtcggctggataccgccaccagcatgtttctgctgctcaaagaaggccggtccagccacgtgcagcgcggatatggaaaagtgcaggccgagtttcccctgggacctgtgacaacagcccacagaggcacctacagatgcttcggcagctacaacaaccacgcttggagcttccctagcgagcccgtgaagttgcttgtgaccggcgacatcgagaacaccagtctggcccctgaggaccctacctttcctgccgatacctggggcacctacctgctgaccacagagacaggactccagaaagatcacgccctgtgggaccacacagcccagaacctgctgagaatgggcctcgcctttctggtgctggttgccctcgtgtggttcctggtggaagattggctgagccggaagcggacaagagagagagccagcagagcctctacctgggagggaagaagaaggctgaacacccagacacttagggccaagcgatctggatctggagcaacaaacttctcactactcaaacaagcaggtgacgtggaggagaatcccgggcctactagtatggactggatttggcgcatccttttccttgtcggcgctgctaccggcgcgcattccttcgaacaagttcagcttcaacagcctggcgctgagctggtcaaacctggcgcttctgtgaagatgagctgcaaagccagcggctacgccttcagcagctactggatcaactggatgaagcagaaacccggccagggactcgaatggatcggccaaatctatcccggcgacggcgacaccaactacaacggcaagttcaagggcagagccacactgaccgccgatacctctagcagcacagcctacatgcagctgagcagcctgaccagcgaagatagcgccgtgtacttctgtgcccggtccatcacaacagtcgtgggctgcgctatggactattggggccagggaacaagcgtgaccgtgtctagtacgcgtatccagaaccctgatcctgccgtgtaccagctgcgggatagcaagagcagcgacaagagcgtgtgtctgttcaccgacttcgacagccagaccaacgtgtcccagagcaaggactccgacgtgtacatcaccgataagaccgtgctggacatgcggagcatggacttcaagagcaactccgccgtggcctggtccaacaagtccgatttcgcctgcgccaacgccttcaacaacagcattatccccgaggacacattcttcccaagccccgagagcagctgcggtaccgagatgtatgatacacccacactgtctgtgcaccctgggccagaagttatcagcggagaaaaagttaccttttattgccgcctcgataccgctacctctatgttcctcttgctgaaagagggccgcagctctcacgtgcagcgaggctacggaaaggtccaagctgagtttcctctcggccccgtgaccaccgctcacaggggcacatatagatgttttggctcttataacaatcatgcctggtcattcccatccgagcctgtgaaactgctggtcacaggcgatattgagaatacctctctggccccagaagatcctacattccccgccgacacatggggaacatatctgctgacaaccgaaaccgggctgcaaaaggaccatgctctgtgggatcataccgctcagaatctgcttcggatggggcttgcattcctggtcctggtggctcttgtctggtttctggtcgaggactggctgtcccggaagagaaccagagaaagagcttccagggccagcacctgggaaggcagacgcagactgaatactcagaccctgcgcgccaagagaagcggatctggcgtgaagcagaccctgaatttcgacctgctgaagctggctggcgacgtggaatccaacccaggcccttctagaggccatatgaccgagtacaagcccacggtgcgcctcgccacccgcgacgacgtccccagggccgtacgcaccctcgccgccgcgttcgccgactaccccgccacgcgccacaccgtcgatccggaccgccacatcgagcgggtcaccgagctgcaagaactcttcctcacgcgcgtcgggctcgacatcggcaaggtgtgggtcgcggacgacggcgccgcggtggcggtctggaccacgccggagagcgtcgaagcgggggcggtgttcgccgagatcggcccgcgcatggccgagttgagcggttcccggctggccgcgcagcaacagatggaaggcctcctggcgccgcaccggcccaaggagcccgcgtggttcctggccaccgtcggcgtctcgcccgaccaccagggcaagggtctgggcagcgccgtcgtgctccccggagtggaggcggccgagcgcgccggggtgcccgccttcctggagacctccgcgccccgcaacctccccttctacgagcggctcggcttcaccgtcaccgccgacgtcgaggtgcccgaaggaccgcgcacctggtgcatgacccgcaagcccggtgcctga

SEQ ID NO: 1817 - DNA, 3825 bp, Artificial Sequence
  Synthetic Polynucleotide
atggccttaccagtgaccgccttgctcctgccgctggccttgctgctccacgccgccaggccggaagtgcagctggttgaatctggcggaggactggttcaggctggcggatctctgagactgtcttgtgccgccagcggcagaacctttagcatgggctggtttagacaggcccctggcaaagagagagagttcgtcgccgccatcacatactctggcggcagcccttactacgccgactctgtgaagggcagattcaccatcagccgggacaacgccaagaacaccgtgtacctccagatgaacagcctgaagcctgaggacaccgccgtgtactactgcgccgccaatccaacatacggcagcgactggaacgccgagaattggggccagggaacccaagtgacagtgtctagcggtaccggcggaggcggatctggcggcggaggtagcggtggcggaggatctgaattcgacatccagatgacacagagccctagcagcctgtctgccagcgtgggagacagagtgaccatcacatgcaaggccagcgaccacatcaacaactggctggcctggtatcagcagaagcctggacaggcccctaagctgctgatctacggcgctaccacactggaaacaggcgtgcccagcagattttctggcagcggctctggcaccgactacaccctgacaatatccagcctccagcctgaggacttcgccacctactactgtcagcagagctggaacaccccttggacattcggccagggcaccaagctggaaatcaagagactcgaggacctgaagaacgtgttcccacctgaggtggccgtgttcgagcctagcgaggccgagatcagccacacccagaaagccaccctcgtgtgcctggctaccggcttctaccccgaccatgtggaactgtcttggtgggtcaacggcaaagaggtgcacagcggcgtgtctaccgacccccagccactgaaagaacagcccgccctgaacgacagccggtactgcctgagcagcagactgagagtgtccgccaccttctggcagaacccccggaaccacttcagatgccaggtgcagttctacggcctgagcgagaacgacgagtggacccaggacagagccaagcccgtgacccagatcgtgtctgccgaagcctggggcagagccgattgcggatccgagatgtacgacacccctacactgagcgtgcaccccggacctgaagtgatctctggcgagaaagtgaccttctactgtcggctggataccgccaccagcatgtttctgctgctcaaagaaggccggtccagccacgtgcagcgcggatatggaaaagtgcaggccgagtttcccctgggacctgtgacaacagcccacagaggcacctacagatgcttcggcagctacaacaaccacgcttggagcttccctagcgagcccgtgaagttgcttgtgaccggcgacatcgagaacaccagtctggcccctgaggaccctacctttcctgccgatacctggggcacctacctgctgaccacagagacaggactccagaaagatcacgccctgtgggaccacacagcccagaacctgctgagaatgggcctcgcctttctggtgctggttgccctcgtgtggttcctggtggaagattggctgagccggaagcggacaagagagagagccagcagagcctctacctgggagggaagaagaaggctgaacacccagacacttagggccaagcgatctggatctggagcaacaaacttctcactactcaaacaagcaggtgacgtggaggagaatcccgggcctactagtatggactggatttggcgcatccttttccttgtcggcgctgctaccggcgcgcattccttcgaacaagttcagcttcaacagcctggcgctgagctggtcaaacctggcgcttctgtgaagatgagctgcaaagccagcggctacgccttcagcagctactggatcaactggatgaagcagaaacccggccagggactcgaatggatcggccaaatctatcccggcgacggcgacaccaactacaacggcaagttcaagggcagagccacactgaccgccgatacctctagcagcacagcctacatgcagctgagcagcctgaccagcgaagatagcgccgtgtacttctgtgcccggtccatcacaacagtcgtgggctgcgctatggactattggggccagggaacaagcgtgaccgtgtctagtacgcgtatccagaaccctgatcctgccgtgtaccagctgcgggatagcaagagcagcgacaagagcgtgtgtctgttcaccgacttcgacagccagaccaacgtgtcccagagcaaggactccgacgtgtacatcaccgataagaccgtgctggacatgcggagcatggacttcaagagcaactccgccgtggcctggtccaacaagtccgatttcgcctgcgccaacgccttcaacaacagcattatccccgaggacacattcttcccaagccccgagagcagctgcggtaccgagatgtatgatacacccacactgtctgtgcaccctgggccagaagttatcagcggagaaaaagttaccttttattgccgcctcgataccgctacctctatgttcctcttgctgaaagagggccgcagctctcacgtgcagcgaggctacggaaaggtccaagctgagtttcctctcggccccgtgaccaccgctcacaggggcacatatagatgttttggctcttataacaatcatgcctggtcattcccatccgagcctgtgaaactgctggtcacaggcgatattgagaatacctctctggccccagaagatcctacattccccgccgacacatggggaacatatctgctgacaaccgaaaccgggctgcaaaaggaccatgctctgtgggatcataccgctcagaatctgcttcggatggggcttgcattcctggtcctggtggctcttgtctggtttctggtcgaggactggctgtcccggaagagaaccagagaaagagcttccagggccagcacctgggaaggcagacgcagactgaatactcagaccctgcgcgccaagagaagcggatctggcgtgaagcagaccctgaatttcgacctgctgaagctggctggcgacgtggaatccaacccaggcccttctagaggccatatgaccgagtacaagcccacggtgcgcctcgccacccgcgacgacgtccccagggccgtacgcaccctcgccgccgcgttcgccgactaccccgccacgcgccacaccgtcgatccggaccgccacatcgagcgggtcaccgagctgcaagaactcttcctcacgcgcgtcgggctcgacatcggcaaggtgtgggtcgcggacgacggcgccgcggtggcggtctggaccacgccggagagcgtcgaagcgggggcggtgttcgccgagatcggcccgcgcatggccgagttgagcggttcccggctggccgcgcagcaacagatggaaggcctcctggcgccgcaccggcccaaggagcccgcgtggttcctggccaccgtcggcgtctcgcccgaccaccagggcaagggtctgggcagcgccgtcgtgctccccggagtggaggcggccgagcgcgccggggtgcccgccttcctggagacctccgcgccccgcaacctccccttctacgagcggctcggcttcaccgtcaccgccgacgtcgaggtgcccgaaggaccgcgcacctggtgcatgacccgcaagcccggtgcctga

SEQ ID NO: 1818 - DNA, 4236 bp, Artificial Sequence
  Synthetic Polynucleotide
atggccttaccagtgaccgccttgctcctgccgctggccttgctgctccacgccgccaggccggaagtgcagctggttgaatctggcggaggactggttcaggctggcggatctctgagactgtcttgtgccgccagcggcagaacctttagcatgggctggtttagacaggcccctggcaaagagagagagttcgtcgccgccatcacatactctggcggcagcccttactacgccgactctgtgaagggcagattcaccatcagccgggacaacgccaagaacaccgtgtacctccagatgaacagcctgaagcctgaggacaccgccgtgtactactgcgccgccaatccaacatacggcagcgactggaacgccgagaattggggccagggaacccaagtgacagtgtctagcggtaccggcggaggcggatctggcggcggaggtagcggtggcggaggatctgaattcgacatccagatgacacagagccctagcagcctgtctgccagcgtgggagacagagtgaccatcacatgcaaggccagcgaccacatcaacaactggctggcctggtatcagcagaagcctggacaggcccctaagctgctgatctacggcgctaccacactggaaacaggcgtgcccagcagattttctggcagcggctctggcaccgactacaccctgacaatatccagcctccagcctgaggacttcgccacctactactgtcagcagagctggaacaccccttggacattcggccagggcaccaagctggaaatcaagagactcgaggacctgaagaacgtgttcccacctgaggtggccgtgttcgagcctagcgaggccgagatcagccacacccagaaagccaccctcgtgtgcctggctaccggcttctaccccgaccatgtggaactgtcttggtgggtcaacggcaaagaggtgcacagcggcgtgtctaccgacccccagccactgaaagaacagcccgccctgaacgacagccggtactgcctgagcagcagactgagagtgtccgccaccttctggcagaacccccggaaccacttcagatgccaggtgcagttctacggcctgagcgagaacgacgagtggacccaggacagagccaagcccgtgacccagatcgtgtctgccgaagcctggggcagagccgattgcggatccgagatgtacgacacccctacactgagcgtgcaccccggacctgaagtgatctctggcgagaaagtgaccttctactgtcggctggataccgccaccagcatgtttctgctgctcaaagaaggccggtccagccacgtgcagcgcggatatggaaaagtgcaggccgagtttcccctgggacctgtgacaacagcccacagaggcacctacagatgcttcggcagctacaacaaccacgcttggagcttccctagcgagcccgtgaagttgcttgtgaccggcgacatcgagaacaccagtctggcccctgaggaccctacctttcctgccgatacctggggcacctacctgctgaccacagagacaggactccagaaagatcacgccctgtgggaccacacagcccagaacctgctgagaatgggcctcgcctttctggtgctggttgccctcgtgtggttcctggtggaagattggctgagccggaagcggacaagagagagagccagcagagcctctacctgggagggaagaagaaggctgaacacccagacacttagggccaagcgatctggatctggagcaacaaacttctcactactcaaacaagcaggtgacgtggaggagaatcccgggcctactagtatggactggatttggcgcatccttttccttgtcggcgctgctaccggcgcgcattccgggcccgaagtgcaactggttgaatccggtggcggcctggtgcaagcaggcggatctctcagacttagctgtgccgcctccggcagaaccttcacaatgggatggtttaggcaggctccagggaaagagagagagttcgtcgccgccatctctctgtctcccacactggcctactacgccgactctgtgaaaggccggttcaccatctccagagataatgccaagaacaccgtggtgctgcaaatgaactctctgaaacccgaggatacagccctgtactattgtgccgctgaccggaagtccgtgatgagcatcagacccgattactggggacagggcacacaagtcacagtgtcctctggatccggcggcggaggatctggcggaggcggatctgggggcggaggctctttcgaacaagttcagcttcaacagcctggcgctgagctggtcaaacctggcgcttctgtgaagatgagctgcaaagccagcggctacgccttcagcagctactggatcaactggatgaagcagaaacccggccagggactcgaatggatcggccaaatctatcccggcgacggcgacaccaactacaacggcaagttcaagggcagagccacactgaccgccgatacctctagcagcacagcctacatgcagctgagcagcctgaccagcgaagatagcgccgtgtacttctgtgcccggtccatcacaacagtcgtgggctgcgctatggactattggggccagggaacaagcgtgaccgtgtctagtacgcgtatccagaaccctgatcctgccgtgtaccagctgcgggatagcaagagcagcgacaagagcgtgtgtctgttcaccgacttcgacagccagaccaacgtgtcccagagcaaggactccgacgtgtacatcaccgataagaccgtgctggacatgcggagcatggacttcaagagcaactccgccgtggcctggtccaacaagtccgatttcgcctgcgccaacgccttcaacaacagcattatccccgaggacacattcttcccaagccccgagagcagctgcggtaccgagatgtatgatacacccacactgtctgtgcaccctgggccagaagttatcagcggagaaaaagttaccttttattgccgcctcgataccgctacctctatgttcctcttgctgaaagagggccgcagctctcacgtgcagcgaggctacggaaaggtccaagctgagtttcctctcggccccgtgaccaccgctcacaggggcacatatagatgttttggctcttataacaatcatgcctggtcattcccatccgagcctgtgaaactgctggtcacaggcgatattgagaatacctctctggccccagaagatcctacattccccgccgacacatggggaacatatctgctgacaaccgaaaccgggctgcaaaaggaccatgctctgtgggatcataccgctcagaatctgcttcggatggggcttgcattcctggtcctggtggctcttgtctggtttctggtcgaggactggctgtcccggaagagaaccagagaaagagcttccagggccagcacctgggaaggcagacgcagactgaatactcagaccctgcgcgccaagagaagcggatctggcgtgaagcagaccctgaatttcgacctgctgaagctggctggcgacgtggaatccaacccaggcccttctagaggccatatgaccgagtacaagcccacggtgcgcctcgccacccgcgacgacgtccccagggccgtacgcaccctcgccgccgcgttcgccgactaccccgccacgcgccacaccgtcgatccggaccgccacatcgagcgggtcaccgagctgcaagaactcttcctcacgcgcgtcgggctcgacatcggcaaggtgtgggtcgcggacgacggcgccgcggtggcggtctggaccacgccggagagcgtcgaagcgggggcggtgttcgccgagatcggcccgcgcatggccgagttgagcggttcccggctggccgcgcagcaacagatggaaggcctcctggcgccgcaccggcccaaggagcccgcgtggttcctggccaccgtcggcgtctcgcccgaccaccagggcaagggtctgggcagcgccgtcgtgctccccggagtggaggcggccgagcgcgccggggtgcccgccttcctggagacctccgcgccccgcaacctccccttctacgagcggctcggcttcaccgtcaccgccgacgtcgaggtgcccgaaggaccgcgcacctggtgcatgacccgcaagcccggtgcctga

SEQ ID NO: 1819 - DNA, 3435 bp, Artificial Sequence
  Synthetic Polynucleotide
atggccttaccagtgaccgccttgctcctgccgctggccttgctgctccacgccgccaggccggaagtgcagctggttgaatctggcggaggactggttcaggctggcggatctctgagactgtcttgtgccgccagcggcagaacctttagcatgggctggtttagacaggcccctggcaaagagagagagttcgtcgccgccatcacatactctggcggcagcccttactacgccgactctgtgaagggcagattcaccatcagccgggacaacgccaagaacaccgtgtacctccagatgaacagcctgaagcctgaggacaccgccgtgtactactgcgccgccaatccaacatacggcagcgactggaacgccgagaattggggccagggaacccaagtgacagtgtctagcctcgaggacctgaagaacgtgttcccacctgaggtggccgtgttcgagcctagcgaggccgagatcagccacacccagaaagccaccctcgtgtgcctggctaccggcttctaccccgaccatgtggaactgtcttggtgggtcaacggcaaagaggtgcacagcggcgtgtctaccgacccccagccactgaaagaacagcccgccctgaacgacagccggtactgcctgagcagcagactgagagtgtccgccaccttctggcagaacccccggaaccacttcagatgccaggtgcagttctacggcctgagcgagaacgacgagtggacccaggacagagccaagcccgtgacccagatcgtgtctgccgaagcctggggcagagccgattgcggatccgagatgtacgacacccctacactgagcgtgcaccccggacctgaagtgatctctggcgagaaagtgaccttctactgtcggctggataccgccaccagcatgtttctgctgctcaaagaaggccggtccagccacgtgcagcgcggatatggaaaagtgcaggccgagtttcccctgggacctgtgacaacagcccacagaggcacctacagatgcttcggcagctacaacaaccacgcttggagcttccctagcgagcccgtgaagttgcttgtgaccggcgacatcgagaacaccagtctggcccctgaggaccctacctttcctgccgatacctggggcacctacctgctgaccacagagacaggactccagaaagatcacgccctgtgggaccacacagcccagaacctgctgagaatgggcctcgcctttctggtgctggttgccctcgtgtggttcctggtggaagattggctgagccggaagcggacaagagagagagccagcagagcctctacctgggagggaagaagaaggctgaacacccagacacttagggccaagcgatctggatctggagcaacaaacttctcactactcaaacaagcaggtgacgtggaggagaatcccgggcctactagtatggactggatttggcgcatccttttccttgtcggcgctgctaccggcgcgcattccgggcccgaagtgcaactggttgaatccggtggcggcctggtgcaagcaggcggatctctcagacttagctgtgccgcctccggcagaaccttcacaatgggatggtttaggcaggctccagggaaagagagagagttcgtcgccgccatctctctgtctcccacactggcctactacgccgactctgtgaaaggccggttcaccatctccagagataatgccaagaacaccgtggtgctgcaaatgaactctctgaaacccgaggatacagccctgtactattgtgccgctgaccggaagtccgtgatgagcatcagacccgattactggggacagggcacacaagtcacagtgtcctctacgcgtatccagaaccctgatcctgccgtgtaccagctgcgggatagcaagagcagcgacaagagcgtgtgtctgttcaccgacttcgacagccagaccaacgtgtcccagagcaaggactccgacgtgtacatcaccgataagaccgtgctggacatgcggagcatggacttcaagagcaactccgccgtggcctggtccaacaagtccgatttcgcctgcgccaacgccttcaacaacagcattatccccgaggacacattcttcccaagccccgagagcagctgcggtaccgagatgtatgatacacccacactgtctgtgcaccctgggccagaagttatcagcggagaaaaagttaccttttattgccgcctcgataccgctacctctatgttcctcttgctgaaagagggccgcagctctcacgtgcagcgaggctacggaaaggtccaagctgagtttcctctcggccccgtgaccaccgctcacaggggcacatatagatgttttggctcttataacaatcatgcctggtcattcccatccgagcctgtgaaactgctggtcacaggcgatattgagaatacctctctggccccagaagatcctacattccccgccgacacatggggaacatatctgctgacaaccgaaaccgggctgcaaaaggaccatgctctgtgggatcataccgctcagaatctgcttcggatggggcttgcattcctggtcctggtggctcttgtctggtttctggtcgaggactggctgtcccggaagagaaccagagaaagagcttccagggccagcacctgggaaggcagacgcagactgaatactcagaccctgcgcgccaagagaagcggatctggcgtgaagcagaccctgaatttcgacctgctgaagctggctggcgacgtggaatccaacccaggcccttctagaggccatatgaccgagtacaagcccacggtgcgcctcgccacccgcgacgacgtccccagggccgtacgcaccctcgccgccgcgttcgccgactaccccgccacgcgccacaccgtcgatccggaccgccacatcgagcgggtcaccgagctgcaagaactcttcctcacgcgcgtcgggctcgacatcggcaaggtgtgggtcgcggacgacggcgccgcggtggcggtctggaccacgccggagagcgtcgaagcgggggcggtgttcgccgagatcggcccgcgcatggccgagttgagcggttcccggctggccgcgcagcaacagatggaaggcctcctggcgccgcaccggcccaaggagcccgcgtggttcctggccaccgtcggcgtctcgcccgaccaccagggcaagggtctgggcagcgccgtcgtgctccccggagtggaggcggccgagcgcgccggggtgcccgccttcctggagacctccgcgccccgcaacctccccttctacgagcggctcggcttcaccgtcaccgccgacgtcgaggtgcccgaaggaccgcgcacctggtgcatgacccgcaagcccggtgcctga

SEQ ID NO: 1820 - DNA, 1746 bp, Artificial Sequence
  Synthetic Polynucleotide
atggccttaccagtgaccgccttgctcctgccgctggccttgctgctccacgccgccaggccggcatgcgaagtgcagctgcttgaaagtggcggcggactgattcagcctggcggatctctgagactgagctgtgccgccagcggcttcaccttttctagccacgccatgacctgggtccgacaggcacctggaaaagggcttgaatgggtgtccgccatcagcggctctggcgattacacacactacgccgacagcgtgaagggcagattcaccatcagcagagacaacagcaagaacaccgtgtacctccagatgaacagcctgagagccgaggacagcgccgtgtattattgcgccaaggatgaggatggcggcagcctgcttggacacagaggacaaggcaccctggtcaccgtttcttccggtaccggcggaggcggatctggcggcggaggtagcggtggcggaggatctgaattcggatctctcgaggagatgtacgacacccctacactgagcgtgcaccccggacctgaagtgatctctggcgagaaagtgaccttctactgtcggctggataccgccaccagcatgtttctgctgctcaaagaaggccggtccagccacgtgcagcgcggatatggaaaagtgcaggccgagtttcccctgggacctgtgacaacagcccacagaggcacctacagatgcttcggcagctacaacaaccacgcttggagcttccctagcgagcccgtgaagttgcttgtgaccggcgacatcgagaacaccagtctggcccctgaggaccctacctttcctgccgatacctggggcacctacctgctgaccacagagacaggactccagaaagatcacgccctgtgggaccacacagcccagaacctgctgagaatgggcctcgcctttctggtgctggttgccctcgtgtggttcctggtggaagattggctgagccggaagcggacaagagagagagccagcagagcctctacctgggagggaagaagaaggctgaacacccagacacttagggccaagcgatctggatctggagcaacaaacttctcactactcaaacaagcaggtgacgtggaggagaatcccgggcctactagaggccatatgaccgagtacaagcccacggtgcgcctcgccacccgcgacgacgtccccagggccgtacgcaccctcgccgccgcgttcgccgactaccccgccacgcgccacaccgtcgatccggaccgccacatcgagcgggtcaccgagctgcaagaactcttcctcacgcgcgtcgggctcgacatcggcaaggtgtgggtcgcggacgacggcgccgcggtggcggtctggaccacgccggagagcgtcgaagcgggggcggtgttcgccgagatcggcccgcgcatggccgagttgagcggttcccggctggccgcgcagcaacagatggaaggcctcctggcgccgcaccggcccaaggagcccgcgtggttcctggccaccgtcggcgtctcgcccgaccaccagggcaagggtctgggcagcgccgtcgtgctccccggagtggaggcggccgagcgcgccggggtgcccgccttcctggagacctccgcgccccgcaacctccccttctacgagcggctcggcttcaccgtcaccgccgacgtcgaggtgcccgaaggaccgcgcacctggtgcatgacccgcaagcccggtgcctga

SEQ ID NO: 1821 - DNA, 2592 bp, Artificial Sequence
  Synthetic Polynucleotide
atggccttaccagtgaccgccttgctcctgccgctggccttgctgctccacgccgccaggccggacatccagatgacacagagccctagcagcctgtctgccagcgtgggagacagagtgaccatcacatgcaaggccagcgaccacatcaacaactggctggcctggtatcagcagaagcctggacaggcccctaagctgctgatctacggcgctaccacactggaaacaggcgtgcccagcagattttctggcagcggctctggcaccgactacaccctgacaatatccagcctccagcctgaggacttcgccacctactactgtcagcagagctggaacaccccttggacattcggccagggcaccaagctggaaatcaagagactcgagatcggctggctgttgctccaggcccctcggtgggtgttcaaggaggaagaccctattcacctgaggtgtcacagctggaagaacactgctctgcataaggtcacatatttacagaatggcaaaggcaggaagtattttcatcataattctgacttctacattccaaaagccacactcaaagacagcggctcctacttctgcagggggcttgttgggagtaaaaatgtgtcttcagagactgtgaacatcaccatcactcaaggtttggcagtgtcaaccatctcatcattctttccacctggctaccaagtgtccttctgcctggtcatggtgctgctgttcgccgtggataccggcctgtacttcagcgtcaagaccaacatccggtccagcaccagagactggaaggaccacaagttcaagtggcggaaggaccctcaggacaagagggccaagcgatctggatctggagcaacaaacttctcactactcaaacaagcaggtgacgtggaggagaatcccgggcctactagtatggactggatttggcgcatccttttccttgtcggcgctgctaccggcgcgcattccttcgaacaagttcagcttcaacagcctggcgctgagctggtcaaacctggcgcttctgtgaagatgagctgcaaagccagcggctacgccttcagcagctactggatcaactggatgaagcagaaacccggccagggactcgaatggatcggccaaatctatcccggcgacggcgacaccaactacaacggcaagttcaagggcagagccacactgaccgccgatacctctagcagcacagcctacatgcagctgagcagcctgaccagcgaagatagcgccgtgtacttctgtgcccggtccatcacaacagtcgtgggctgcgctatggactattggggccagggaacaagcgtgaccgtgtctagtacgcgtgtgcaccctgggccagaagttatcagcggagaaaaagttaccttttattgccgcctcgataccgctacctctatgttcctcttgctgaaagagggccgcagctctcacgtgcagcgaggctacggaaaggtccaagctgagtttcctctcggccccgtgaccaccgctcacaggggcacatatagatgttttggctcttataacaatcatgcctggtcattcccatccgagcctgtgaaactgctggtcacaggcgatattgagaatacctctctggccccagaagatcctacattccccgccgacacatggggaacatatctgctgacaaccgaaaccgggctgcaaaaggaccatgctctgtgggatcataccgctcagaatctgcttcggatggggcttgcattcctggtcctggtggctcttgtctggtttctggtcgaggactggctgtcccggaagagaaccagagaaagagcttccagggccagcacctgggaaggcagacgcagactgaatactcagaccctgcgcgccaagagaagcggatctggcgtgaagcagaccctgaatttcgacctgctgaagctggctggcgacgtggaatccaacccaggcccttctagaggccatatgaccgagtacaagcccacggtgcgcctcgccacccgcgacgacgtccccagggccgtacgcaccctcgccgccgcgttcgccgactaccccgccacgcgccacaccgtcgatccggaccgccacatcgagcgggtcaccgagctgcaagaactcttcctcacgcgcgtcgggctcgacatcggcaaggtgtgggtcgcggacgacggcgccgcggtggcggtctggaccacgccggagagcgtcgaagcgggggcggtgttcgccgagatcggcccgcgcatggccgagttgagcggttcccggctggccgcgcagcaacagatggaaggcctcctggcgccgcaccggcccaaggagcccgcgtggttcctggccaccgtcggcgtctcgcccgaccaccagggcaagggtctgggcagcgccgtcgtgctccccggagtggaggcggccgagcgcgccggggtgcccgccttcctggagacctccgcgccccgcaacctccccttctacgagcggctcggcttcaccgtcaccgccgacgtcgaggtgcccgaaggaccgcgcacctggtgcatgacccgcaagcccggtgcctga

SEQ ID NO: 1822 - DNA, 2754 bp, Artificial Sequence
  Synthetic Polynucleotide
atggccttaccagtgaccgccttgctcctgccgctggccttgctgctccacgccgccaggccggcatgcgaagtgcagctgcttgaaagtggcggcggactgattcagcctggcggatctctgagactgagctgtgccgccagcggcttcaccttttctagccacgccatgacctgggtccgacaggcacctggaaaagggcttgaatgggtgtccgccatcagcggctctggcgattacacacactacgccgacagcgtgaagggcagattcaccatcagcagagacaacagcaagaacaccgtgtacctccagatgaacagcctgagagccgaggacagcgccgtgtattattgcgccaaggatgaggatggcggcagcctgcttggacacagaggacaaggcaccctggtcaccgtttcttccggtaccggcggaggcggatctggcggcggaggtagcggtggcggaggatctgaattcggatctctcgagatcggctggctgttgctccaggcccctcggtgggtgttcaaggaggaagaccctattcacctgaggtgtcacagctggaagaacactgctctgcataaggtcacatatttacagaatggcaaaggcaggaagtattttcatcataattctgacttctacattccaaaagccacactcaaagacagcggctcctacttctgcagggggcttgttgggagtaaaaatgtgtcttcagagactgtgaacatcaccatcactcaaggtttggcagtgtcaaccatctcatcattctttccacctggctaccaagtgtccttctgcctggtcatggtgctgctgttcgccgtggataccggcctgtacttcagcgtcaagaccaacatccggtccagcaccagagactggaaggaccacaagttcaagtggcggaaggaccctcaggacaagagggccaagcgatctggatctggagcaacaaacttctcactactcaaacaagcaggtgacgtggaggagaatcccgggcctactagtgccaccatggactggatttggcgcatccttttccttgtcggcgctgctaccggcgcccattccgggcccgaagtgcagctggttgaatctggcggaggactggttcaggctggcggatctctgagactgtcttgtgccgccagcggcagaacctttagcatgggctggtttagacaggcccctggcaaagagagagagttcgtcgccgccatcacatactctggcggcagcccttactacgccgactctgtgaagggcagattcaccatcagccgggacaacgccaagaacaccgtgtacctccagatgaacagcctgaagcctgaggacaccgccgtgtactactgcgccgccaatccaacatacggcagcgactggaacgccgagaattggggccagggaacccaagtgacagtgtctagcggatccggcggcggaggatctggcggaggcggatctgggggcggaggctctttcgaaggcagcacgcgtgtgcaccctgggccagaagttatcagcggagaaaaagttaccttttattgccgcctcgataccgctacctctatgttcctcttgctgaaagagggccgcagctctcacgtgcagcgaggctacggaaaggtccaagctgagtttcctctcggccccgtgaccaccgctcacaggggcacatatagatgttttggctcttataacaatcatgcctggtcattcccatccgagcctgtgaaactgctggtcacaggcgatattgagaatacctctctggccccagaagatcctacattccccgccgacacatggggaacatatctgctgacaaccgaaaccgggctgcaaaaggaccatgctctgtgggatcataccgctcagaatctgcttcggatggggcttgcattcctggtcctggtggctcttgtctggtttctggtcgaggactggctgtcccggaagagaaccagagaaagagcttccagggccagcacctgggaaggcagacgcagactgaatactcagaccctgcgcgccaagagaagcggatctggcgtgaagcagaccctgaatttcgacctgctgaagctggctggcgacgtggaatccaacccaggcccttctagaggccatatgaccgagtacaagcccacggtgcgcctcgccacccgcgacgacgtccccagggccgtacgcaccctcgccgccgcgttcgccgactaccccgccacgcgccacaccgtcgatccggaccgccacatcgagcgggtcaccgagctgcaagaactcttcctcacgcgcgtcgggctcgacatcggcaaggtgtgggtcgcggacgacggcgccgcggtggcggtctggaccacgccggagagcgtcgaagcgggggcggtgttcgccgagatcggcccgcgcatggccgagttgagcggttcccggctggccgcgcagcaacagatggaaggcctcctggcgccgcaccggcccaaggagcccgcgtggttcctggccaccgtcggcgtctcgcccgaccaccagggcaagggtctgggcagcgccgtcgtgctccccggagtggaggcggccgagcgcgccggggtgcccgccttcctggagacctccgcgccccgcaacctccccttctacgagcggctcggcttcaccgtcaccgccgacgtcgaggtgcccgaaggaccgcgcacctggtgcatgacccgcaagcccggtgcctga

SEQ ID NO: 1823 - DNA, 3204 bp, Artificial Sequence
  Synthetic Polynucleotide
atggccttaccagtgaccgccttgctcctgccgctggccttgctgctccacgccgccaggccggacatccagatgacacagagccctagcagcctgtctgccagcgtgggagacagagtgaccatcacatgcaaggccagcgaccacatcaacaactggctggcctggtatcagcagaagcctggacaggcccctaagctgctgatctacggcgctaccacactggaaacaggcgtgcccagcagattttctggcagcggctctggcaccgactacaccctgacaatatccagcctccagcctgaggacttcgccacctactactgtcagcagagctggaacaccccttggacattcggccagggcaccaagctggaaatcaagagactcgagggacagcctaaggccaatcctaccgtgacactgttccctccaagcagcgaagaactccaggccaacaaggccacacttgtgtgcctgatctccgacttctaccctggggctgtgacagtggcttggaaggccgatggatctcctgtgaaagccggcgtggaaaccaccaagccatccaagcagagcaacaacaaatacgccgccagctcctacctgagcctgacacctgagcagtggaagtcccacagatcctacagctgccaagtgacccacgaaggcagcaccgtggaaaagacagtggcccctacagagtgcagcggatccatcggctggctgttgctccaggcccctcggtgggtgttcaaggaggaagaccctattcacctgaggtgtcacagctggaagaacactgctctgcataaggtcacatatttacagaatggcaaaggcaggaagtattttcatcataattctgacttctacattccaaaagccacactcaaagacagcggctcctacttctgcagggggcttgttgggagtaaaaatgtgtcttcagagactgtgaacatcaccatcactcaaggtttggcagtgtcaaccatctcatcattctttccacctggctaccaagtgtccttctgcctggtcatggtgctgctgttcgccgtggataccggcctgtacttcagcgtcaagaccaacatccggtccagcaccagagactggaaggaccacaagttcaagtggcggaaggaccctcaggacaagagggccaagcgatctggatctggagcaacaaacttctcactactcaaacaagcaggtgacgtggaggagaatcccgggcctactagtatggactggatttggcgcatccttttccttgtcggcgctgctaccggcgcgcattccttcgaacaagttcagcttcaacagcctggcgctgagctggtcaaacctggcgcttctgtgaagatgagctgcaaagccagcggctacgccttcagcagctactggatcaactggatgaagcagaaacccggccagggactcgaatggatcggccaaatctatcccggcgacggcgacaccaactacaacggcaagttcaagggcagagccacactgaccgccgatacctctagcagcacagcctacatgcagctgagcagcctgaccagcgaagatagcgccgtgtacttctgtgcccggtccatcacaacagtcgtgggctgcgctatggactattggggccagggaacaagcgtgaccgtgtctagtacgcgtgcctctacaaagggaccctccgtgtttcctctggctcccagcagcaagtctacaagcggaggaacagccgctctgggctgcctggtcaaggattactttcccgagcctgtgaccgtgtcctggaatagcggagcactgacaagcggcgtgcacacctttccagccgtgctgcaaagcagcggcctgtactctctgagcagcgtggtcacagtgcctagctctagcctgggcacccagacctacatctgcaatgtgaaccacaagcctagcaacaccaaggtggacaagagagtggaacccaagagctgtggtaccgtgcaccctgggccagaagttatcagcggagaaaaagttaccttttattgccgcctcgataccgctacctctatgttcctcttgctgaaagagggccgcagctctcacgtgcagcgaggctacggaaaggtccaagctgagtttcctctcggccccgtgaccaccgctcacaggggcacatatagatgttttggctcttataacaatcatgcctggtcattcccatccgagcctgtgaaactgctggtcacaggcgatattgagaatacctctctggccccagaagatcctacattccccgccgacacatggggaacatatctgctgacaaccgaaaccgggctgcaaaaggaccatgctctgtgggatcataccgctcagaatctgcttcggatggggcttgcattcctggtcctggtggctcttgtctggtttctggtcgaggactggctgtcccggaagagaaccagagaaagagcttccagggccagcacctgggaaggcagacgcagactgaatactcagaccctgcgcgccaagagaagcggatctggcgtgaagcagaccctgaatttcgacctgctgaagctggctggcgacgtggaatccaacccaggcccttctagaggcgggatccacaccatggctacctacgaggtgctgtgcgaggtggcaagaaagctgggcaccgacgacagagaagtggtgctgttcctgctgaacgtgttcatccctcagcctacactggcccagctgatcggtgcactgagagccctgaaagaggaaggccggctgacctttcctctgctggccgaatgcctgttcagagccggaagaagggatctgctgcgggacctgctgcatctggaccccagatttctggaaagacacctggccggcaccatgagctacttcagcccttaccagctgaccgtgctgcacgttgacggcgaactgtgcgccagagatattcggagcctgatcttcctgagcaaggacaccatcggcagccggtctacccctcagacatttctgcactgggtgtactgcatggaaaacctggacctgctcggccccacagatgtggatgccctgatgtccatgctgagaagcctgagcagagtggacctccagagacaggtgcagacactgatgggactgcacctgagcggacctagccacagccagcactacagacacacccct

SEQ ID NO: 1824 - DNA, 3363 bp, Artificial Sequence
  Synthetic Polynucleotide
atggccttaccagtgaccgccttgctcctgccgctggccttgctgctccacgccgccaggccggacatccagatgacacagagccctagcagcctgtctgccagcgtgggagacagagtgaccatcacatgcaaggccagcgaccacatcaacaactggctggcctggtatcagcagaagcctggacaggcccctaagctgctgatctacggcgctaccacactggaaacaggcgtgcccagcagattttctggcagcggctctggcaccgactacaccctgacaatatccagcctccagcctgaggacttcgccacctactactgtcagcagagctggaacaccccttggacattcggccagggcaccaagctggaaatcaagagactcgagggacagcctaaggccaatcctaccgtgacactgttccctccaagcagcgaagaactccaggccaacaaggccacacttgtgtgcctgatctccgacttctaccctggggctgtgacagtggcttggaaggccgatggatctcctgtgaaagccggcgtggaaaccaccaagccatccaagcagagcaacaacaaatacgccgccagctcctacctgagcctgacacctgagcagtggaagtcccacagatcctacagctgccaagtgacccacgaaggcagcaccgtggaaaagacagtggcccctacagagtgcagcggatccatcggctggctgttgctccaggcccctcggtgggtgttcaaggaggaagaccctattcacctgaggtgtcacagctggaagaacactgctctgcataaggtcacatatttacagaatggcaaaggcaggaagtattttcatcataattctgacttctacattccaaaagccacactcaaagacagcggctcctacttctgcagggggcttgttgggagtaaaaatgtgtcttcagagactgtgaacatcaccatcactcaaggtttggcagtgtcaaccatctcatcattctttccacctggctaccaagtgtccttctgcctggtcatggtgctgctgttcgccgtggataccggcctgtacttcagcgtcaagaccaacatccggtccagcaccagagactggaaggaccacaagttcaagtggcggaaggaccctcaggacaagagggccaagcgatctggatctggagcaacaaacttctcactactcaaacaagcaggtgacgtggaggagaatcccgggcctactagtatggactggatttggcgcatccttttccttgtcggcgctgctaccggcgcgcattccttcgaacaagttcagcttcaacagcctggcgctgagctggtcaaacctggcgcttctgtgaagatgagctgcaaagccagcggctacgccttcagcagctactggatcaactggatgaagcagaaacccggccagggactcgaatggatcggccaaatctatcccggcgacggcgacaccaactacaacggcaagttcaagggcagagccacactgaccgccgatacctctagcagcacagcctacatgcagctgagcagcctgaccagcgaagatagcgccgtgtacttctgtgcccggtccatcacaacagtcgtgggctgcgctatggactattggggccagggaacaagcgtgaccgtgtctagtacgcgtgcctctacaaagggaccctccgtgtttcctctggctcccagcagcaagtctacaagcggaggaacagccgctctgggctgcctggtcaaggattactttcccgagcctgtgaccgtgtcctggaatagcggagcactgacaagcggcgtgcacacctttccagccgtgctgcaaagcagcggcctgtactctctgagcagcgtggtcacagtgcctagctctagcctgggcacccagacctacatctgcaatgtgaaccacaagcctagcaacaccaaggtggacaagagagtggaacccaagagctgtggtaccgtgcaccctgggccagaagttatcagcggagaaaaagttaccttttattgccgcctcgataccgctacctctatgttcctcttgctgaaagagggccgcagctctcacgtgcagcgaggctacggaaaggtccaagctgagtttcctctcggccccgtgaccaccgctcacaggggcacatatagatgttttggctcttataacaatcatgcctggtcattcccatccgagcctgtgaaactgctggtcacaggcgatattgagaatacctctctggccccagaagatcctacattccccgccgacacatggggaacatatctgctgacaaccgaaaccgggctgcaaaaggaccatgctctgtgggatcataccgctcagaatctgcttcggatggggcttgcattcctggtcctggtggctcttgtctggtttctggtcgaggactggctgtcccggaagagaaccagagaaagagcttccagggccagcacctgggaaggcagacgcagactgaatactcagaccctgcgcgccaagagaagcggatctggcgtgaagcagaccctgaatttcgacctgctgaagctggctggcgacgtggaatccaacccaggcccttctagaggcgggatccacaccatgtccgactccaaggaggtccctagccttccatttttgcgacacttgctcgaagagttggacagccatgaggacagcttgctgctgtttctgtgtcacgacgcggccccgggctgcacgacggtcacgcaagctttgtgctcgcttagccaacagcgcaagctgaccctcgcggctctggtcgagatgctctacgtgctgcagcgtatggatcttctcaagagccgcttcgggctcagcaaggagggggccgagcaattgctgggcacaagctttctcacgcgctaccgcaagctcatggtttgcgtgggtgaggagctcgactcgagcgagctacgcgctctacgcttgttcgcgtgcaacctgaatccgagcctgagcacggcgctttctgagagcagccgctttgtcgagcttgtactcgcgcttgaaaacgtaggactcgtctcgccatcgagtgtttccgtgcttgcggacatgttgcgcactcttcggcgcctcgatttgtgccagcagcttgttgagtacgaacaacaagagcaagccaggtaccgttactgttacgcggcctcgccctcattgccagttcgtacgttacgtcgggggcacggcgcgagtgaacacgagcagctgtgcatgcccgtgcaagaatcctctgacagccccgagctgctgcgcacgcccgtacaagaatcctccagcgacagccccgagcaaacgact

SEQ ID NO: 1825 - DNA, 3231 bp, Artificial Sequence
  Synthetic Polynucleotide
atggccttaccagtgaccgccttgctcctgccgctggccttgctgctccacgccgccaggccggacatccagatgacacagagccctagcagcctgtctgccagcgtgggagacagagtgaccatcacatgcaaggccagcgaccacatcaacaactggctggcctggtatcagcagaagcctggacaggcccctaagctgctgatctacggcgctaccacactggaaacaggcgtgcccagcagattttctggcagcggctctggcaccgactacaccctgacaatatccagcctccagcctgaggacttcgccacctactactgtcagcagagctggaacaccccttggacattcggccagggcaccaagctggaaatcaagagactcgagggacagcctaaggccaatcctaccgtgacactgttccctccaagcagcgaagaactccaggccaacaaggccacacttgtgtgcctgatctccgacttctaccctggggctgtgacagtggcttggaaggccgatggatctcctgtgaaagccggcgtggaaaccaccaagccatccaagcagagcaacaacaaatacgccgccagctcctacctgagcctgacacctgagcagtggaagtcccacagatcctacagctgccaagtgacccacgaaggcagcaccgtggaaaagacagtggcccctacagagtgcagcggatccatcggctggctgttgctccaggcccctcggtgggtgttcaaggaggaagaccctattcacctgaggtgtcacagctggaagaacactgctctgcataaggtcacatatttacagaatggcaaaggcaggaagtattttcatcataattctgacttctacattccaaaagccacactcaaagacagcggctcctacttctgcagggggcttgttgggagtaaaaatgtgtcttcagagactgtgaacatcaccatcactcaaggtttggcagtgtcaaccatctcatcattctttccacctggctaccaagtgtccttctgcctggtcatggtgctgctgttcgccgtggataccggcctgtacttcagcgtcaagaccaacatccggtccagcaccagagactggaaggaccacaagttcaagtggcggaaggaccctcaggacaagagggccaagcgatctggatctggagcaacaaacttctcactactcaaacaagcaggtgacgtggaggagaatcccgggcctactagtatggactggatttggcgcatccttttccttgtcggcgctgctaccggcgcgcattccttcgaacaagttcagcttcaacagcctggcgctgagctggtcaaacctggcgcttctgtgaagatgagctgcaaagccagcggctacgccttcagcagctactggatcaactggatgaagcagaaacccggccagggactcgaatggatcggccaaatctatcccggcgacggcgacaccaactacaacggcaagttcaagggcagagccacactgaccgccgatacctctagcagcacagcctacatgcagctgagcagcctgaccagcgaagatagcgccgtgtacttctgtgcccggtccatcacaacagtcgtgggctgcgctatggactattggggccagggaacaagcgtgaccgtgtctagtacgcgtgcctctacaaagggaccctccgtgtttcctctggctcccagcagcaagtctacaagcggaggaacagccgctctgggctgcctggtcaaggattactttcccgagcctgtgaccgtgtcctggaatagcggagcactgacaagcggcgtgcacacctttccagccgtgctgcaaagcagcggcctgtactctctgagcagcgtggtcacagtgcctagctctagcctgggcacccagacctacatctgcaatgtgaaccacaagcctagcaacaccaaggtggacaagagagtggaacccaagagctgtggtaccgtgcaccctgggccagaagttatcagcggagaaaaagttaccttttattgccgcctcgataccgctacctctatgttcctcttgctgaaagagggccgcagctctcacgtgcagcgaggctacggaaaggtccaagctgagtttcctctcggccccgtgaccaccgctcacaggggcacatatagatgttttggctcttataacaatcatgcctggtcattcccatccgagcctgtgaaactgctggtcacaggcgatattgagaatacctctctggccccagaagatcctacattccccgccgacacatggggaacatatctgctgacaaccgaaaccgggctgcaaaaggaccatgctctgtgggatcataccgctcagaatctgcttcggatggggcttgcattcctggtcctggtggctcttgtctggtttctggtcgaggactggctgtcccggaagagaaccagagaaagagcttccagggccagcacctgggaaggcagacgcagactgaatactcagaccctgcgcgccaagagaagcggatctggcgtgaagcagaccctgaatttcgacctgctgaagctggctggcgacgtggaatccaacccaggcccttctagaggccatatgaccgagtacaagcccacggtgcgcctcgccacccgcgacgacgtccccagggccgtacgcaccctcgccgccgcgttcgccgactaccccgccacgcgccacaccgtcgatccggaccgccacatcgagcgggtcaccgagctgcaagaactcttcctcacgcgcgtcgggctcgacatcggcaaggtgtgggtcgcggacgacggcgccgcggtggcggtctggaccacgccggagagcgtcgaagcgggggcggtgttcgccgagatcggcccgcgcatggccgagttgagcggttcccggctggccgcgcagcaacagatggaaggcctcctggcgccgcaccggcccaaggagcccgcgtggttcctggccaccgtcggcgtctcgcccgaccaccagggcaagggtctgggcagcgccgtcgtgctccccggagtggaggcggccgagcgcgccggggtgcccgccttcctggagacctccgcgccccgcaacctccccttctacgagcggctcggcttcaccgtcaccgccgacgtcgaggtgcccgaaggaccgcgcacctggtgcatgacccgcaagcccggtgcctga

SEQ ID NO: 1826 - DNA, 3642 bp, Artificial Sequence
  Synthetic Polynucleotide
atggccttaccagtgaccgccttgctcctgccgctggccttgctgctccacgccgccaggccggaagtgcagctggttgaatctggcggaggactggttcaggctggcggatctctgagactgtcttgtgccgccagcggcagaacctttagcatgggctggtttagacaggcccctggcaaagagagagagttcgtcgccgccatcacatactctggcggcagcccttactacgccgactctgtgaagggcagattcaccatcagccgggacaacgccaagaacaccgtgtacctccagatgaacagcctgaagcctgaggacaccgccgtgtactactgcgccgccaatccaacatacggcagcgactggaacgccgagaattggggccagggaacccaagtgacagtgtctagcggtaccggcggaggcggatctggcggcggaggtagcggtggcggaggatctgaattcgacatccagatgacacagagccctagcagcctgtctgccagcgtgggagacagagtgaccatcacatgcaaggccagcgaccacatcaacaactggctggcctggtatcagcagaagcctggacaggcccctaagctgctgatctacggcgctaccacactggaaacaggcgtgcccagcagattttctggcagcggctctggcaccgactacaccctgacaatatccagcctccagcctgaggacttcgccacctactactgtcagcagagctggaacaccccttggacattcggccagggcaccaagctggaaatcaagagactcgagggacagcctaaggccaatcctaccgtgacactgttccctccaagcagcgaagaactccaggccaacaaggccacacttgtgtgcctgatctccgacttctaccctggggctgtgacagtggcttggaaggccgatggatctcctgtgaaagccggcgtggaaaccaccaagccatccaagcagagcaacaacaaatacgccgccagctcctacctgagcctgacacctgagcagtggaagtcccacagatcctacagctgccaagtgacccacgaaggcagcaccgtggaaaagacagtggcccctacagagtgcagcggatccatcggctggctgttgctccaggcccctcggtgggtgttcaaggaggaagaccctattcacctgaggtgtcacagctggaagaacactgctctgcataaggtcacatatttacagaatggcaaaggcaggaagtattttcatcataattctgacttctacattccaaaagccacactcaaagacagcggctcctacttctgcagggggcttgttgggagtaaaaatgtgtcttcagagactgtgaacatcaccatcactcaaggtttggcagtgtcaaccatctcatcattctttccacctggctaccaagtgtccttctgcctggtcatggtgctgctgttcgccgtggataccggcctgtacttcagcgtcaagaccaacatccggtccagcaccagagactggaaggaccacaagttcaagtggcggaaggaccctcaggacaagagggccaagcgatctggatctggagcaacaaacttctcactactcaaacaagcaggtgacgtggaggagaatcccgggcctactagtatggactggatttggcgcatccttttccttgtcggcgctgctaccggcgcgcattccttcgaacaagttcagcttcaacagcctggcgctgagctggtcaaacctggcgcttctgtgaagatgagctgcaaagccagcggctacgccttcagcagctactggatcaactggatgaagcagaaacccggccagggactcgaatggatcggccaaatctatcccggcgacggcgacaccaactacaacggcaagttcaagggcagagccacactgaccgccgatacctctagcagcacagcctacatgcagctgagcagcctgaccagcgaagatagcgccgtgtacttctgtgcccggtccatcacaacagtcgtgggctgcgctatggactattggggccagggaacaagcgtgaccgtgtctagtacgcgtgcctctacaaagggaccctccgtgtttcctctggctcccagcagcaagtctacaagcggaggaacagccgctctgggctgcctggtcaaggattactttcccgagcctgtgaccgtgtcctggaatagcggagcactgacaagcggcgtgcacacctttccagccgtgctgcaaagcagcggcctgtactctctgagcagcgtggtcacagtgcctagctctagcctgggcacccagacctacatctgcaatgtgaaccacaagcctagcaacaccaaggtggacaagagagtggaacccaagagctgtggtaccgtgcaccctgggccagaagttatcagcggagaaaaagttaccttttattgccgcctcgataccgctacctctatgttcctcttgctgaaagagggccgcagctctcacgtgcagcgaggctacggaaaggtccaagctgagtttcctctcggccccgtgaccaccgctcacaggggcacatatagatgttttggctcttataacaatcatgcctggtcattcccatccgagcctgtgaaactgctggtcacaggcgatattgagaatacctctctggccccagaagatcctacattccccgccgacacatggggaacatatctgctgacaaccgaaaccgggctgcaaaaggaccatgctctgtgggatcataccgctcagaatctgcttcggatggggcttgcattcctggtcctggtggctcttgtctggtttctggtcgaggactggctgtcccggaagagaaccagagaaagagcttccagggccagcacctgggaaggcagacgcagactgaatactcagaccctgcgcgccaagagaagcggatctggcgtgaagcagaccctgaatttcgacctgctgaagctggctggcgacgtggaatccaacccaggcccttctagaggccatatgaccgagtacaagcccacggtgcgcctcgccacccgcgacgacgtccccagggccgtacgcaccctcgccgccgcgttcgccgactaccccgccacgcgccacaccgtcgatccggaccgccacatcgagcgggtcaccgagctgcaagaactcttcctcacgcgcgtcgggctcgacatcggcaaggtgtgggtcgcggacgacggcgccgcggtggcggtctggaccacgccggagagcgtcgaagcgggggcggtgttcgccgagatcggcccgcgcatggccgagttgagcggttcccggctggccgcgcagcaacagatggaaggcctcctggcgccgcaccggcccaaggagcccgcgtggttcctggccaccgtcggcgtctcgcccgaccaccagggcaagggtctgggcagcgccgtcgtgctccccggagtggaggcggccgagcgcgccggggtgcccgccttcctggagacctccgcgccccgcaacctccccttctacgagcggctcggcttcaccgtcaccgccgacgtcgaggtgcccgaaggaccgcgcacctggtgcatgacccgcaagcccggtgcctga

SEQ ID NO: 1827 - DNA, 4053 bp, Artificial Sequence
  Synthetic Polynucleotide
atggccttaccagtgaccgccttgctcctgccgctggccttgctgctccacgccgccaggccggaagtgcagctggttgaatctggcggaggactggttcaggctggcggatctctgagactgtcttgtgccgccagcggcagaacctttagcatgggctggtttagacaggcccctggcaaagagagagagttcgtcgccgccatcacatactctggcggcagcccttactacgccgactctgtgaagggcagattcaccatcagccgggacaacgccaagaacaccgtgtacctccagatgaacagcctgaagcctgaggacaccgccgtgtactactgcgccgccaatccaacatacggcagcgactggaacgccgagaattggggccagggaacccaagtgacagtgtctagcggtaccggcggaggcggatctggcggcggaggtagcggtggcggaggatctgaattcgacatccagatgacacagagccctagcagcctgtctgccagcgtgggagacagagtgaccatcacatgcaaggccagcgaccacatcaacaactggctggcctggtatcagcagaagcctggacaggcccctaagctgctgatctacggcgctaccacactggaaacaggcgtgcccagcagattttctggcagcggctctggcaccgactacaccctgacaatatccagcctccagcctgaggacttcgccacctactactgtcagcagagctggaacaccccttggacattcggccagggcaccaagctggaaatcaagagactcgagggacagcctaaggccaatcctaccgtgacactgttccctccaagcagcgaagaactccaggccaacaaggccacacttgtgtgcctgatctccgacttctaccctggggctgtgacagtggcttggaaggccgatggatctcctgtgaaagccggcgtggaaaccaccaagccatccaagcagagcaacaacaaatacgccgccagctcctacctgagcctgacacctgagcagtggaagtcccacagatcctacagctgccaagtgacccacgaaggcagcaccgtggaaaagacagtggcccctacagagtgcagcggatccatcggctggctgttgctccaggcccctcggtgggtgttcaaggaggaagaccctattcacctgaggtgtcacagctggaagaacactgctctgcataaggtcacatatttacagaatggcaaaggcaggaagtattttcatcataattctgacttctacattccaaaagccacactcaaagacagcggctcctacttctgcagggggcttgttgggagtaaaaatgtgtcttcagagactgtgaacatcaccatcactcaaggtttggcagtgtcaaccatctcatcattctttccacctggctaccaagtgtccttctgcctggtcatggtgctgctgttcgccgtggataccggcctgtacttcagcgtcaagaccaacatccggtccagcaccagagactggaaggaccacaagttcaagtggcggaaggaccctcaggacaagagggccaagcgatctggatctggagcaacaaacttctcactactcaaacaagcaggtgacgtggaggagaatcccgggcctactagtatggactggatttggcgcatccttttccttgtcggcgctgctaccggcgcgcattccgggcccgaagtgcaactggttgaatccggtggcggcctggtgcaagcaggcggatctctcagacttagctgtgccgcctccggcagaaccttcacaatgggatggtttaggcaggctccagggaaagagagagagttcgtcgccgccatctctctgtctcccacactggcctactacgccgactctgtgaaaggccggttcaccatctccagagataatgccaagaacaccgtggtgctgcaaatgaactctctgaaacccgaggatacagccctgtactattgtgccgctgaccggaagtccgtgatgagcatcagacccgattactggggacagggcacacaagtcacagtgtcctctggatccggcggcggaggatctggcggaggcggatctgggggcggaggctctttcgaacaagttcagcttcaacagcctggcgctgagctggtcaaacctggcgcttctgtgaagatgagctgcaaagccagcggctacgccttcagcagctactggatcaactggatgaagcagaaacccggccagggactcgaatggatcggccaaatctatcccggcgacggcgacaccaactacaacggcaagttcaagggcagagccacactgaccgccgatacctctagcagcacagcctacatgcagctgagcagcctgaccagcgaagatagcgccgtgtacttctgtgcccggtccatcacaacagtcgtgggctgcgctatggactattggggccagggaacaagcgtgaccgtgtctagtacgcgtgcctctacaaagggaccctccgtgtttcctctggctcccagcagcaagtctacaagcggaggaacagccgctctgggctgcctggtcaaggattactttcccgagcctgtgaccgtgtcctggaatagcggagcactgacaagcggcgtgcacacctttccagccgtgctgcaaagcagcggcctgtactctctgagcagcgtggtcacagtgcctagctctagcctgggcacccagacctacatctgcaatgtgaaccacaagcctagcaacaccaaggtggacaagagagtggaacccaagagctgtggtaccgtgcaccctgggccagaagttatcagcggagaaaaagttaccttttattgccgcctcgataccgctacctctatgttcctcttgctgaaagagggccgcagctctcacgtgcagcgaggctacggaaaggtccaagctgagtttcctctcggccccgtgaccaccgctcacaggggcacatatagatgttttggctcttataacaatcatgcctggtcattcccatccgagcctgtgaaactgctggtcacaggcgatattgagaatacctctctggccccagaagatcctacattccccgccgacacatggggaacatatctgctgacaaccgaaaccgggctgcaaaaggaccatgctctgtgggatcataccgctcagaatctgcttcggatggggcttgcattcctggtcctggtggctcttgtctggtttctggtcgaggactggctgtcccggaagagaaccagagaaagagcttccagggccagcacctgggaaggcagacgcagactgaatactcagaccctgcgcgccaagagaagcggatctggcgtgaagcagaccctgaatttcgacctgctgaagctggctggcgacgtggaatccaacccaggcccttctagaggccatatgaccgagtacaagcccacggtgcgcctcgccacccgcgacgacgtccccagggccgtacgcaccctcgccgccgcgttcgccgactaccccgccacgcgccacaccgtcgatccggaccgccacatcgagcgggtcaccgagctgcaagaactcttcctcacgcgcgtcgggctcgacatcggcaaggtgtgggtcgcggacgacggcgccgcggtggcggtctggaccacgccggagagcgtcgaagcgggggcggtgttcgccgagatcggcccgcgcatggccgagttgagcggttcccggctggccgcgcagcaacagatggaaggcctcctggcgccgcaccggcccaaggagcccgcgtggttcctggccaccgtcggcgtctcgcccgaccaccagggcaagggtctgggcagcgccgtcgtgctccccggagtggaggcggccgagcgcgccggggtgcccgccttcctggagacctccgcgccccgcaacctccccttctacgagcggctcggcttcaccgtcaccgccgacgtcgaggtgcccgaaggaccgcgcacctggtgcatgacccgcaagcccggtgcctga

SEQ ID NO: 1828 - DNA, 3252 bp, Artificial Sequence
  Synthetic Polynucleotide
atggccttaccagtgaccgccttgctcctgccgctggccttgctgctccacgccgccaggccggaagtgcagctggttgaatctggcggaggactggttcaggctggcggatctctgagactgtcttgtgccgccagcggcagaacctttagcatgggctggtttagacaggcccctggcaaagagagagagttcgtcgccgccatcacatactctggcggcagcccttactacgccgactctgtgaagggcagattcaccatcagccgggacaacgccaagaacaccgtgtacctccagatgaacagcctgaagcctgaggacaccgccgtgtactactgcgccgccaatccaacatacggcagcgactggaacgccgagaattggggccagggaacccaagtgacagtgtctagcctcgagggacagcctaaggccaatcctaccgtgacactgttccctccaagcagcgaagaactccaggccaacaaggccacacttgtgtgcctgatctccgacttctaccctggggctgtgacagtggcttggaaggccgatggatctcctgtgaaagccggcgtggaaaccaccaagccatccaagcagagcaacaacaaatacgccgccagctcctacctgagcctgacacctgagcagtggaagtcccacagatcctacagctgccaagtgacccacgaaggcagcaccgtggaaaagacagtggcccctacagagtgcagcggatccatcggctggctgttgctccaggcccctcggtgggtgttcaaggaggaagaccctattcacctgaggtgtcacagctggaagaacactgctctgcataaggtcacatatttacagaatggcaaaggcaggaagtattttcatcataattctgacttctacattccaaaagccacactcaaagacagcggctcctacttctgcagggggcttgttgggagtaaaaatgtgtcttcagagactgtgaacatcaccatcactcaaggtttggcagtgtcaaccatctcatcattctttccacctggctaccaagtgtccttctgcctggtcatggtgctgctgttcgccgtggataccggcctgtacttcagcgtcaagaccaacatccggtccagcaccagagactggaaggaccacaagttcaagtggcggaaggaccctcaggacaagagggccaagcgatctggatctggagcaacaaacttctcactactcaaacaagcaggtgacgtggaggagaatcccgggcctactagtatggactggatttggcgcatccttttccttgtcggcgctgctaccggcgcgcattccgggcccgaagtgcaactggttgaatccggtggcggcctggtgcaagcaggcggatctctcagacttagctgtgccgcctccggcagaaccttcacaatgggatggtttaggcaggctccagggaaagagagagagttcgtcgccgccatctctctgtctcccacactggcctactacgccgactctgtgaaaggccggttcaccatctccagagataatgccaagaacaccgtggtgctgcaaatgaactctctgaaacccgaggatacagccctgtactattgtgccgctgaccggaagtccgtgatgagcatcagacccgattactggggacagggcacacaagtcacagtgtcctctacgcgtgcctctacaaagggaccctccgtgtttcctctggctcccagcagcaagtctacaagcggaggaacagccgctctgggctgcctggtcaaggattactttcccgagcctgtgaccgtgtcctggaatagcggagcactgacaagcggcgtgcacacctttccagccgtgctgcaaagcagcggcctgtactctctgagcagcgtggtcacagtgcctagctctagcctgggcacccagacctacatctgcaatgtgaaccacaagcctagcaacaccaaggtggacaagagagtggaacccaagagctgtggtaccgtgcaccctgggccagaagttatcagcggagaaaaagttaccttttattgccgcctcgataccgctacctctatgttcctcttgctgaaagagggccgcagctctcacgtgcagcgaggctacggaaaggtccaagctgagtttcctctcggccccgtgaccaccgctcacaggggcacatatagatgttttggctcttataacaatcatgcctggtcattcccatccgagcctgtgaaactgctggtcacaggcgatattgagaatacctctctggccccagaagatcctacattccccgccgacacatggggaacatatctgctgacaaccgaaaccgggctgcaaaaggaccatgctctgtgggatcataccgctcagaatctgcttcggatggggcttgcattcctggtcctggtggctcttgtctggtttctggtcgaggactggctgtcccggaagagaaccagagaaagagcttccagggccagcacctgggaaggcagacgcagactgaatactcagaccctgcgcgccaagagaagcggatctggcgtgaagcagaccctgaatttcgacctgctgaagctggctggcgacgtggaatccaacccaggcccttctagaggccatatgaccgagtacaagcccacggtgcgcctcgccacccgcgacgacgtccccagggccgtacgcaccctcgccgccgcgttcgccgactaccccgccacgcgccacaccgtcgatccggaccgccacatcgagcgggtcaccgagctgcaagaactcttcctcacgcgcgtcgggctcgacatcggcaaggtgtgggtcgcggacgacggcgccgcggtggcggtctggaccacgccggagagcgtcgaagcgggggcggtgttcgccgagatcggcccgcgcatggccgagttgagcggttcccggctggccgcgcagcaacagatggaaggcctcctggcgccgcaccggcccaaggagcccgcgtggttcctggccaccgtcggcgtctcgcccgaccaccagggcaagggtctgggcagcgccgtcgtgctccccggagtggaggcggccgagcgcgccggggtgcccgccttcctggagacctccgcgccccgcaacctccccttctacgagcggctcggcttcaccgtcaccgccgacgtcgaggtgcccgaaggaccgcgcacctggtgcatgacccgcaagcccggtgcctga

SEQ ID NO: 1829 - DNA, 3276 bp, Artificial Sequence
  Synthetic Polynucleotide
atggccttaccagtgaccgccttgctcctgccgctggccttgctgctccacgccgccaggccggacatccagatgacacagagccctagcagcctgtctgccagcgtgggagacagagtgaccatcacatgcaaggccagcgaccacatcaacaactggctggcctggtatcagcagaagcctggacaggcccctaagctgctgatctacggcgctaccacactggaaacaggcgtgcccagcagattttctggcagcggctctggcaccgactacaccctgacaatatccagcctccagcctgaggacttcgccacctactactgtcagcagagctggaacaccccttggacattcggccagggcaccaagctggaaatcaagagactcgaggacctgaagaacgtgttcccacctgaggtggccgtgttcgagcctagcgaggccgagatcagccacacccagaaagccaccctcgtgtgcctggctaccggcttctaccccgaccatgtggaactgtcttggtgggtcaacggcaaagaggtgcacagcggcgtgtctaccgacccccagccactgaaagaacagcccgccctgaacgacagccggtactgcctgagcagcagactgagagtgtccgccaccttctggcagaacccccggaaccacttcagatgccaggtgcagttctacggcctgagcgagaacgacgagtggacccaggacagagccaagcccgtgacccagatcgtgtctgccgaagcctggggcagagccgattgcggatccatcggctggctgttgctccaggcccctcggtgggtgttcaaggaggaagaccctattcacctgaggtgtcacagctggaagaacactgctctgcataaggtcacatatttacagaatggcaaaggcaggaagtattttcatcataattctgacttctacattccaaaagccacactcaaagacagcggctcctacttctgcagggggcttgttgggagtaaaaatgtgtcttcagagactgtgaacatcaccatcactcaaggtttggcagtgtcaaccatctcatcattctttccacctggctaccaagtgtccttctgcctggtcatggtgctgctgttcgccgtggataccggcctgtacttcagcgtcaagaccaacatccggtccagcaccagagactggaaggaccacaagttcaagtggcggaaggaccctcaggacaagagggccaagcgatctggatctggagcaacaaacttctcactactcaaacaagcaggtgacgtggaggagaatcccgggcctactagtatggactggatttggcgcatccttttccttgtcggcgctgctaccggcgcgcattccttcgaacaagttcagcttcaacagcctggcgctgagctggtcaaacctggcgcttctgtgaagatgagctgcaaagccagcggctacgccttcagcagctactggatcaactggatgaagcagaaacccggccagggactcgaatggatcggccaaatctatcccggcgacggcgacaccaactacaacggcaagttcaagggcagagccacactgaccgccgatacctctagcagcacagcctacatgcagctgagcagcctgaccagcgaagatagcgccgtgtacttctgtgcccggtccatcacaacagtcgtgggctgcgctatggactattggggccagggaacaagcgtgaccgtgtctagtacgcgtatccagaaccctgatcctgccgtgtaccagctgcgggatagcaagagcagcgacaagagcgtgtgtctgttcaccgacttcgacagccagaccaacgtgtcccagagcaaggactccgacgtgtacatcaccgataagaccgtgctggacatgcggagcatggacttcaagagcaactccgccgtggcctggtccaacaagtccgatttcgcctgcgccaacgccttcaacaacagcattatccccgaggacacattcttcccaagccccgagagcagctgcggtaccgtgcaccctgggccagaagttatcagcggagaaaaagttaccttttattgccgcctcgataccgctacctctatgttcctcttgctgaaagagggccgcagctctcacgtgcagcgaggctacggaaaggtccaagctgagtttcctctcggccccgtgaccaccgctcacaggggcacatatagatgttttggctcttataacaatcatgcctggtcattcccatccgagcctgtgaaactgctggtcacaggcgatattgagaatacctctctggccccagaagatcctacattccccgccgacacatggggaacatatctgctgacaaccgaaaccgggctgcaaaaggaccatgctctgtgggatcataccgctcagaatctgcttcggatggggcttgcattcctggtcctggtggctcttgtctggtttctggtcgaggactggctgtcccggaagagaaccagagaaagagcttccagggccagcacctgggaaggcagacgcagactgaatactcagaccctgcgcgccaagagaagcggatctggcgtgaagcagaccctgaatttcgacctgctgaagctggctggcgacgtggaatccaacccaggcccttctagaggccatatgaccgagtacaagcccacggtgcgcctcgccacccgcgacgacgtccccagggccgtacgcaccctcgccgccgcgttcgccgactaccccgccacgcgccacaccgtcgatccggaccgccacatcgagcgggtcaccgagctgcaagaactcttcctcacgcgcgtcgggctcgacatcggcaaggtgtgggtcgcggacgacggcgccgcggtggcggtctggaccacgccggagagcgtcgaagcgggggcggtgttcgccgagatcggcccgcgcatggccgagttgagcggttcccggctggccgcgcagcaacagatggaaggcctcctggcgccgcaccggcccaaggagcccgcgtggttcctggccaccgtcggcgtctcgcccgaccaccagggcaagggtctgggcagcgccgtcgtgctccccggagtggaggcggccgagcgcgccggggtgcccgccttcctggagacctccgcgccccgcaacctccccttctacgagcggctcggcttcaccgtcaccgccgacgtcgaggtgcccgaaggaccgcgcacctggtgcatgacccgcaagcccggtgcctga

SEQ ID NO: 1830 - DNA, 3687 bp, Artificial Sequence
  Synthetic Polynucleotide
atggccttaccagtgaccgccttgctcctgccgctggccttgctgctccacgccgccaggccggaagtgcagctggttgaatctggcggaggactggttcaggctggcggatctctgagactgtcttgtgccgccagcggcagaacctttagcatgggctggtttagacaggcccctggcaaagagagagagttcgtcgccgccatcacatactctggcggcagcccttactacgccgactctgtgaagggcagattcaccatcagccgggacaacgccaagaacaccgtgtacctccagatgaacagcctgaagcctgaggacaccgccgtgtactactgcgccgccaatccaacatacggcagcgactggaacgccgagaattggggccagggaacccaagtgacagtgtctagcggtaccggcggaggcggatctggcggcggaggtagcggtggcggaggatctgaattcgacatccagatgacacagagccctagcagcctgtctgccagcgtgggagacagagtgaccatcacatgcaaggccagcgaccacatcaacaactggctggcctggtatcagcagaagcctggacaggcccctaagctgctgatctacggcgctaccacactggaaacaggcgtgcccagcagattttctggcagcggctctggcaccgactacaccctgacaatatccagcctccagcctgaggacttcgccacctactactgtcagcagagctggaacaccccttggacattcggccagggcaccaagctggaaatcaagagactcgaggacctgaagaacgtgttcccacctgaggtggccgtgttcgagcctagcgaggccgagatcagccacacccagaaagccaccctcgtgtgcctggctaccggcttctaccccgaccatgtggaactgtcttggtgggtcaacggcaaagaggtgcacagcggcgtgtctaccgacccccagccactgaaagaacagcccgccctgaacgacagccggtactgcctgagcagcagactgagagtgtccgccaccttctggcagaacccccggaaccacttcagatgccaggtgcagttctacggcctgagcgagaacgacgagtggacccaggacagagccaagcccgtgacccagatcgtgtctgccgaagcctggggcagagccgattgcggatccatcggctggctgttgctccaggcccctcggtgggtgttcaaggaggaagaccctattcacctgaggtgtcacagctggaagaacactgctctgcataaggtcacatatttacagaatggcaaaggcaggaagtattttcatcataattctgacttctacattccaaaagccacactcaaagacagcggctcctacttctgcagggggcttgttgggagtaaaaatgtgtcttcagagactgtgaacatcaccatcactcaaggtttggcagtgtcaaccatctcatcattctttccacctggctaccaagtgtccttctgcctggtcatggtgctgctgttcgccgtggataccggcctgtacttcagcgtcaagaccaacatccggtccagcaccagagactggaaggaccacaagttcaagtggcggaaggaccctcaggacaagagggccaagcgatctggatctggagcaacaaacttctcactactcaaacaagcaggtgacgtggaggagaatcccgggcctactagtatggactggatttggcgcatccttttccttgtcggcgctgctaccggcgcgcattccttcgaacaagttcagcttcaacagcctggcgctgagctggtcaaacctggcgcttctgtgaagatgagctgcaaagccagcggctacgccttcagcagctactggatcaactggatgaagcagaaacccggccagggactcgaatggatcggccaaatctatcccggcgacggcgacaccaactacaacggcaagttcaagggcagagccacactgaccgccgatacctctagcagcacagcctacatgcagctgagcagcctgaccagcgaagatagcgccgtgtacttctgtgcccggtccatcacaacagtcgtgggctgcgctatggactattggggccagggaacaagcgtgaccgtgtctagtacgcgtatccagaaccctgatcctgccgtgtaccagctgcgggatagcaagagcagcgacaagagcgtgtgtctgttcaccgacttcgacagccagaccaacgtgtcccagagcaaggactccgacgtgtacatcaccgataagaccgtgctggacatgcggagcatggacttcaagagcaactccgccgtggcctggtccaacaagtccgatttcgcctgcgccaacgccttcaacaacagcattatccccgaggacacattcttcccaagccccgagagcagctgcggtaccgtgcaccctgggccagaagttatcagcggagaaaaagttaccttttattgccgcctcgataccgctacctctatgttcctcttgctgaaagagggccgcagctctcacgtgcagcgaggctacggaaaggtccaagctgagtttcctctcggccccgtgaccaccgctcacaggggcacatatagatgttttggctcttataacaatcatgcctggtcattcccatccgagcctgtgaaactgctggtcacaggcgatattgagaatacctctctggccccagaagatcctacattccccgccgacacatggggaacatatctgctgacaaccgaaaccgggctgcaaaaggaccatgctctgtgggatcataccgctcagaatctgcttcggatggggcttgcattcctggtcctggtggctcttgtctggtttctggtcgaggactggctgtcccggaagagaaccagagaaagagcttccagggccagcacctgggaaggcagacgcagactgaatactcagaccctgcgcgccaagagaagcggatctggcgtgaagcagaccctgaatttcgacctgctgaagctggctggcgacgtggaatccaacccaggcccttctagaggccatatgaccgagtacaagcccacggtgcgcctcgccacccgcgacgacgtccccagggccgtacgcaccctcgccgccgcgttcgccgactaccccgccacgcgccacaccgtcgatccggaccgccacatcgagcgggtcaccgagctgcaagaactcttcctcacgcgcgtcgggctcgacatcggcaaggtgtgggtcgcggacgacggcgccgcggtggcggtctggaccacgccggagagcgtcgaagcgggggcggtgttcgccgagatcggcccgcgcatggccgagttgagcggttcccggctggccgcgcagcaacagatggaaggcctcctggcgccgcaccggcccaaggagcccgcgtggttcctggccaccgtcggcgtctcgcccgaccaccagggcaagggtctgggcagcgccgtcgtgctccccggagtggaggcggccgagcgcgccggggtgcccgccttcctggagacctccgcgccccgcaacctccccttctacgagcggctcggcttcaccgtcaccgccgacgtcgaggtgcccgaaggaccgcgcacctggtgcatgacccgcaagcccggtgcctga

SEQ ID NO: 1831 - DNA, 4098 bp, Artificial Sequence
  Synthetic Polynucleotide
atggccttaccagtgaccgccttgctcctgccgctggccttgctgctccacgccgccaggccggaagtgcagctggttgaatctggcggaggactggttcaggctggcggatctctgagactgtcttgtgccgccagcggcagaacctttagcatgggctggtttagacaggcccctggcaaagagagagagttcgtcgccgccatcacatactctggcggcagcccttactacgccgactctgtgaagggcagattcaccatcagccgggacaacgccaagaacaccgtgtacctccagatgaacagcctgaagcctgaggacaccgccgtgtactactgcgccgccaatccaacatacggcagcgactggaacgccgagaattggggccagggaacccaagtgacagtgtctagcggtaccggcggaggcggatctggcggcggaggtagcggtggcggaggatctgaattcgacatccagatgacacagagccctagcagcctgtctgccagcgtgggagacagagtgaccatcacatgcaaggccagcgaccacatcaacaactggctggcctggtatcagcagaagcctggacaggcccctaagctgctgatctacggcgctaccacactggaaacaggcgtgcccagcagattttctggcagcggctctggcaccgactacaccctgacaatatccagcctccagcctgaggacttcgccacctactactgtcagcagagctggaacaccccttggacattcggccagggcaccaagctggaaatcaagagactcgaggacctgaagaacgtgttcccacctgaggtggccgtgttcgagcctagcgaggccgagatcagccacacccagaaagccaccctcgtgtgcctggctaccggcttctaccccgaccatgtggaactgtcttggtgggtcaacggcaaagaggtgcacagcggcgtgtctaccgacccccagccactgaaagaacagcccgccctgaacgacagccggtactgcctgagcagcagactgagagtgtccgccaccttctggcagaacccccggaaccacttcagatgccaggtgcagttctacggcctgagcgagaacgacgagtggacccaggacagagccaagcccgtgacccagatcgtgtctgccgaagcctggggcagagccgattgcggatccatcggctggctgttgctccaggcccctcggtgggtgttcaaggaggaagaccctattcacctgaggtgtcacagctggaagaacactgctctgcataaggtcacatatttacagaatggcaaaggcaggaagtattttcatcataattctgacttctacattccaaaagccacactcaaagacagcggctcctacttctgcagggggcttgttgggagtaaaaatgtgtcttcagagactgtgaacatcaccatcactcaaggtttggcagtgtcaaccatctcatcattctttccacctggctaccaagtgtccttctgcctggtcatggtgctgctgttcgccgtggataccggcctgtacttcagcgtcaagaccaacatccggtccagcaccagagactggaaggaccacaagttcaagtggcggaaggaccctcaggacaagagggccaagcgatctggatctggagcaacaaacttctcactactcaaacaagcaggtgacgtggaggagaatcccgggcctactagtatggactggatttggcgcatccttttccttgtcggcgctgctaccggcgcgcattccgggcccgaagtgcaactggttgaatccggtggcggcctggtgcaagcaggcggatctctcagacttagctgtgccgcctccggcagaaccttcacaatgggatggtttaggcaggctccagggaaagagagagagttcgtcgccgccatctctctgtctcccacactggcctactacgccgactctgtgaaaggccggttcaccatctccagagataatgccaagaacaccgtggtgctgcaaatgaactctctgaaacccgaggatacagccctgtactattgtgccgctgaccggaagtccgtgatgagcatcagacccgattactggggacagggcacacaagtcacagtgtcctctggatccggcggcggaggatctggcggaggcggatctgggggcggaggctctttcgaacaagttcagcttcaacagcctggcgctgagctggtcaaacctggcgcttctgtgaagatgagctgcaaagccagcggctacgccttcagcagctactggatcaactggatgaagcagaaacccggccagggactcgaatggatcggccaaatctatcccggcgacggcgacaccaactacaacggcaagttcaagggcagagccacactgaccgccgatacctctagcagcacagcctacatgcagctgagcagcctgaccagcgaagatagcgccgtgtacttctgtgcccggtccatcacaacagtcgtgggctgcgctatggactattggggccagggaacaagcgtgaccgtgtctagtacgcgtatccagaaccctgatcctgccgtgtaccagctgcgggatagcaagagcagcgacaagagcgtgtgtctgttcaccgacttcgacagccagaccaacgtgtcccagagcaaggactccgacgtgtacatcaccgataagaccgtgctggacatgcggagcatggacttcaagagcaactccgccgtggcctggtccaacaagtccgatttcgcctgcgccaacgccttcaacaacagcattatccccgaggacacattcttcccaagccccgagagcagctgcggtaccgtgcaccctgggccagaagttatcagcggagaaaaagttaccttttattgccgcctcgataccgctacctctatgttcctcttgctgaaagagggccgcagctctcacgtgcagcgaggctacggaaaggtccaagctgagtttcctctcggccccgtgaccaccgctcacaggggcacatatagatgttttggctcttataacaatcatgcctggtcattcccatccgagcctgtgaaactgctggtcacaggcgatattgagaatacctctctggccccagaagatcctacattccccgccgacacatggggaacatatctgctgacaaccgaaaccgggctgcaaaaggaccatgctctgtgggatcataccgctcagaatctgcttcggatggggcttgcattcctggtcctggtggctcttgtctggtttctggtcgaggactggctgtcccggaagagaaccagagaaagagcttccagggccagcacctgggaaggcagacgcagactgaatactcagaccctgcgcgccaagagaagcggatctggcgtgaagcagaccctgaatttcgacctgctgaagctggctggcgacgtggaatccaacccaggcccttctagaggccatatgaccgagtacaagcccacggtgcgcctcgccacccgcgacgacgtccccagggccgtacgcaccctcgccgccgcgttcgccgactaccccgccacgcgccacaccgtcgatccggaccgccacatcgagcgggtcaccgagctgcaagaactcttcctcacgcgcgtcgggctcgacatcggcaaggtgtgggtcgcggacgacggcgccgcggtggcggtctggaccacgccggagagcgtcgaagcgggggcggtgttcgccgagatcggcccgcgcatggccgagttgagcggttcccggctggccgcgcagcaacagatggaaggcctcctggcgccgcaccggcccaaggagcccgcgtggttcctggccaccgtcggcgtctcgcccgaccaccagggcaagggtctgggcagcgccgtcgtgctccccggagtggaggcggccgagcgcgccggggtgcccgccttcctggagacctccgcgccccgcaacctccccttctacgagcggctcggcttcaccgtcaccgccgacgtcgaggtgcccgaaggaccgcgcacctggtgcatgacccgcaagcccggtgcctga

SEQ ID NO: 1832 - DNA, 3297 bp, Artificial Sequence
  Synthetic Polynucleotide
atggccttaccagtgaccgccttgctcctgccgctggccttgctgctccacgccgccaggccggaagtgcagctggttgaatctggcggaggactggttcaggctggcggatctctgagactgtcttgtgccgccagcggcagaacctttagcatgggctggtttagacaggcccctggcaaagagagagagttcgtcgccgccatcacatactctggcggcagcccttactacgccgactctgtgaagggcagattcaccatcagccgggacaacgccaagaacaccgtgtacctccagatgaacagcctgaagcctgaggacaccgccgtgtactactgcgccgccaatccaacatacggcagcgactggaacgccgagaattggggccagggaacccaagtgacagtgtctagcctcgaggacctgaagaacgtgttcccacctgaggtggccgtgttcgagcctagcgaggccgagatcagccacacccagaaagccaccctcgtgtgcctggctaccggcttctaccccgaccatgtggaactgtcttggtgggtcaacggcaaagaggtgcacagcggcgtgtctaccgacccccagccactgaaagaacagcccgccctgaacgacagccggtactgcctgagcagcagactgagagtgtccgccaccttctggcagaacccccggaaccacttcagatgccaggtgcagttctacggcctgagcgagaacgacgagtggacccaggacagagccaagcccgtgacccagatcgtgtctgccgaagcctggggcagagccgattgcggatccatcggctggctgttgctccaggcccctcggtgggtgttcaaggaggaagaccctattcacctgaggtgtcacagctggaagaacactgctctgcataaggtcacatatttacagaatggcaaaggcaggaagtattttcatcataattctgacttctacattccaaaagccacactcaaagacagcggctcctacttctgcagggggcttgttgggagtaaaaatgtgtcttcagagactgtgaacatcaccatcactcaaggtttggcagtgtcaaccatctcatcattctttccacctggctaccaagtgtccttctgcctggtcatggtgctgctgttcgccgtggataccggcctgtacttcagcgtcaagaccaacatccggtccagcaccagagactggaaggaccacaagttcaagtggcggaaggaccctcaggacaagagggccaagcgatctggatctggagcaacaaacttctcactactcaaacaagcaggtgacgtggaggagaatcccgggcctactagtatggactggatttggcgcatccttttccttgtcggcgctgctaccggcgcgcattccgggcccgaagtgcaactggttgaatccggtggcggcctggtgcaagcaggcggatctctcagacttagctgtgccgcctccggcagaaccttcacaatgggatggtttaggcaggctccagggaaagagagagagttcgtcgccgccatctctctgtctcccacactggcctactacgccgactctgtgaaaggccggttcaccatctccagagataatgccaagaacaccgtggtgctgcaaatgaactctctgaaacccgaggatacagccctgtactattgtgccgctgaccggaagtccgtgatgagcatcagacccgattactggggacagggcacacaagtcacagtgtcctctacgcgtatccagaaccctgatcctgccgtgtaccagctgcgggatagcaagagcagcgacaagagcgtgtgtctgttcaccgacttcgacagccagaccaacgtgtcccagagcaaggactccgacgtgtacatcaccgataagaccgtgctggacatgcggagcatggacttcaagagcaactccgccgtggcctggtccaacaagtccgatttcgcctgcgccaacgccttcaacaacagcattatccccgaggacacattcttcccaagccccgagagcagctgcggtaccgtgcaccctgggccagaagttatcagcggagaaaaagttaccttttattgccgcctcgataccgctacctctatgttcctcttgctgaaagagggccgcagctctcacgtgcagcgaggctacggaaaggtccaagctgagtttcctctcggccccgtgaccaccgctcacaggggcacatatagatgttttggctcttataacaatcatgcctggtcattcccatccgagcctgtgaaactgctggtcacaggcgatattgagaatacctctctggccccagaagatcctacattccccgccgacacatggggaacatatctgctgacaaccgaaaccgggctgcaaaaggaccatgctctgtgggatcataccgctcagaatctgcttcggatggggcttgcattcctggtcctggtggctcttgtctggtttctggtcgaggactggctgtcccggaagagaaccagagaaagagcttccagggccagcacctgggaaggcagacgcagactgaatactcagaccctgcgcgccaagagaagcggatctggcgtgaagcagaccctgaatttcgacctgctgaagctggctggcgacgtggaatccaacccaggcccttctagaggccatatgaccgagtacaagcccacggtgcgcctcgccacccgcgacgacgtccccagggccgtacgcaccctcgccgccgcgttcgccgactaccccgccacgcgccacaccgtcgatccggaccgccacatcgagcgggtcaccgagctgcaagaactcttcctcacgcgcgtcgggctcgacatcggcaaggtgtgggtcgcggacgacggcgccgcggtggcggtctggaccacgccggagagcgtcgaagcgggggcggtgttcgccgagatcggcccgcgcatggccgagttgagcggttcccggctggccgcgcagcaacagatggaaggcctcctggcgccgcaccggcccaaggagcccgcgtggttcctggccaccgtcggcgtctcgcccgaccaccagggcaagggtctgggcagcgccgtcgtgctccccggagtggaggcggccgagcgcgccggggtgcccgccttcctggagacctccgcgccccgcaacctccccttctacgagcggctcggcttcaccgtcaccgccgacgtcgaggtgcccgaaggaccgcgcacctggtgcatgacccgcaagcccggtgcctga

SEQ ID NO: 1833 - DNA, 1635 bp, Artificial Sequence; identical to SEQ ID NO: 1664
  Synthetic Polynucleotide

SEQ ID NO: 1834 - DNA, 2673 bp, Artificial Sequence
  Synthetic Polynucleotide
atggccttaccagtgaccgccttgctcctgccgctggccttgctgctccacgccgccaggccggacatccagatgacacagagccctagcagcctgtctgccagcgtgggagacagagtgaccatcacatgcaaggccagcgaccacatcaacaactggctggcctggtatcagcagaagcctggacaggcccctaagctgctgatctacggcgctaccacactggaaacaggcgtgcccagcagattttctggcagcggctctggcaccgactacaccctgacaatatccagcctccagcctgaggacttcgccacctactactgtcagcagagctggaacaccccttggacattcggccagggcaccaagctggaaatcaagagactcgagcaccccggacctgaagtgatctctggcgagaaagtgaccttctactgtcggctggataccgccaccagcatgtttctgctgctcaaagaaggccggtccagccacgtgcagcgcggatatggaaaagtgcaggccgagtttcccctgggacctgtgacaacagcccacagaggcacctacagatgcttcggcagctacaacaaccacgcttggagcttccctagcgagcccgtgaagttgcttgtgaccggcgacatcgagaacaccagtctggcccctgaggaccctacctttcctgccgatacctggggcacctacctgctgaccacagagacaggactccagaaagatcacgccctgtgggaccacacagcccagaacctgctgagaatgggcctcgcctttctggtgctggttgccctcgtgtggttcctggtggaagattggctgagccggaagcggacaagagagagagccagcagagcctctacctgggagggaagaagaaggctgaacacccagacacttagggccaagcgatctggatctggagcaacaaacttctcactactcaaacaagcaggtgacgtggaggagaatcccgggcctactagtatggactggatttggcgcatccttttccttgtcggcgctgctaccggcgcgcattccttcgaacaagttcagcttcaacagcctggcgctgagctggtcaaacctggcgcttctgtgaagatgagctgcaaagccagcggctacgccttcagcagctactggatcaactggatgaagcagaaacccggccagggactcgaatggatcggccaaatctatcccggcgacggcgacaccaactacaacggcaagttcaagggcagagccacactgaccgccgatacctctagcagcacagcctacatgcagctgagcagcctgaccagcgaagatagcgccgtgtacttctgtgcccggtccatcacaacagtcgtgggctgcgctatggactattggggccagggaacaagcgtgaccgtgtctagtacgcgtgtgcaccctgggccagaagttatcagcggagaaaaagttaccttttattgccgcctcgataccgctacctctatgttcctcttgctgaaagagggccgcagctctcacgtgcagcgaggctacggaaaggtccaagctgagtttcctctcggccccgtgaccaccgctcacaggggcacatatagatgttttggctcttataacaatcatgcctggtcattcccatccgagcctgtgaaactgctggtcacaggcgatattgagaatacctctctggccccagaagatcctacattccccgccgacacatggggaacatatctgctgacaaccgaaaccgggctgcaaaaggaccatgctctgtgggatcataccgctcagaatctgcttcggatggggcttgcattcctggtcctggtggctcttgtctggtttctggtcgaggactggctgtcccggaagagaaccagagaaagagcttccagggccagcacctgggaaggcagacgcagactgaatactcagaccctgcgcgccaagagaagcggatctggcgtgaagcagaccctgaatttcgacctgctgaagctggctggcgacgtggaatccaacccaggcccttctagaggccatatgaccgagtacaagcccacggtgcgcctcgccacccgcgacgacgtccccagggccgtacgcaccctcgccgccgcgttcgccgactaccccgccacgcgccacaccgtcgatccggaccgccacatcgagcgggtcaccgagctgcaagaactcttcctcacgcgcgtcgggctcgacatcggcaaggtgtgggtcgcggacgacggcgccgcggtggcggtctggaccacgccggagagcgtcgaagcgggggcggtgttcgccgagatcggcccgcgcatggccgagttgagcggttcccggctggccgcgcagcaacagatggaaggcctcctggcgccgcaccggcccaaggagcccgcgtggttcctggccaccgtcggcgtctcgcccgaccaccagggcaagggtctgggcagcgccgtcgtgctccccggagtggaggcggccgagcgcgccggggtgcccgccttcctggagacctccgcgccccgcaacctccccttctacgagcggctcggcttcaccgtcaccgccgacgtcgaggtgcccgaaggaccgcgcacctggtgcatgacccgcaagcccggtgcctga

SEQ ID NO: 1835 - DNA, 2835 bp, Artificial Sequence
  Synthetic Polynucleotide
atggccttaccagtgaccgccttgctcctgccgctggccttgctgctccacgccgccaggccggcatgcgaagtgcagctgcttgaaagtggcggcggactgattcagcctggcggatctctgagactgagctgtgccgccagcggcttcaccttttctagccacgccatgacctgggtccgacaggcacctggaaaagggcttgaatgggtgtccgccatcagcggctctggcgattacacacactacgccgacagcgtgaagggcagattcaccatcagcagagacaacagcaagaacaccgtgtacctccagatgaacagcctgagagccgaggacagcgccgtgtattattgcgccaaggatgaggatggcggcagcctgcttggacacagaggacaaggcaccctggtcaccgtttcttccggtaccggcggaggcggatctggcggcggaggtagcggtggcggaggatctgaattcggatctctcgagcaccccggacctgaagtgatctctggcgagaaagtgaccttctactgtcggctggataccgccaccagcatgtttctgctgctcaaagaaggccggtccagccacgtgcagcgcggatatggaaaagtgcaggccgagtttcccctgggacctgtgacaacagcccacagaggcacctacagatgcttcggcagctacaacaaccacgcttggagcttccctagcgagcccgtgaagttgcttgtgaccggcgacatcgagaacaccagtctggcccctgaggaccctacctttcctgccgatacctggggcacctacctgctgaccacagagacaggactccagaaagatcacgccctgtgggaccacacagcccagaacctgctgagaatgggcctcgcctttctggtgctggttgccctcgtgtggttcctggtggaagattggctgagccggaagcggacaagagagagagccagcagagcctctacctgggagggaagaagaaggctgaacacccagacacttagggccaagcgatctggatctggagcaacaaacttctcactactcaaacaagcaggtgacgtggaggagaatcccgggcctactagtgccaccatggactggatttggcgcatccttttccttgtcggcgctgctaccggcgcccattccgggcccgaagtgcagctggttgaatctggcggaggactggttcaggctggcggatctctgagactgtcttgtgccgccagcggcagaacctttagcatgggctggtttagacaggcccctggcaaagagagagagttcgtcgccgccatcacatactctggcggcagcccttactacgccgactctgtgaagggcagattcaccatcagccgggacaacgccaagaacaccgtgtacctccagatgaacagcctgaagcctgaggacaccgccgtgtactactgcgccgccaatccaacatacggcagcgactggaacgccgagaattggggccagggaacccaagtgacagtgtctagcggatccggcggcggaggatctggcggaggcggatctgggggcggaggctctttcgaaggcagcacgcgtgtgcaccctgggccagaagttatcagcggagaaaaagttaccttttattgccgcctcgataccgctacctctatgttcctcttgctgaaagagggccgcagctctcacgtgcagcgaggctacggaaaggtccaagctgagtttcctctcggccccgtgaccaccgctcacaggggcacatatagatgttttggctcttataacaatcatgcctggtcattcccatccgagcctgtgaaactgctggtcacaggcgatattgagaatacctctctggccccagaagatcctacattccccgccgacacatggggaacatatctgctgacaaccgaaaccgggctgcaaaaggaccatgctctgtgggatcataccgctcagaatctgcttcggatggggcttgcattcctggtcctggtggctcttgtctggtttctggtcgaggactggctgtcccggaagagaaccagagaaagagcttccagggccagcacctgggaaggcagacgcagactgaatactcagaccctgcgcgccaagagaagcggatctggcgtgaagcagaccctgaatttcgacctgctgaagctggctggcgacgtggaatccaacccaggcccttctagaggccatatgaccgagtacaagcccacggtgcgcctcgccacccgcgacgacgtccccagggccgtacgcaccctcgccgccgcgttcgccgactaccccgccacgcgccacaccgtcgatccggaccgccacatcgagcgggtcaccgagctgcaagaactcttcctcacgcgcgtcgggctcgacatcggcaaggtgtgggtcgcggacgacggcgccgcggtggcggtctggaccacgccggagagcgtcgaagcgggggcggtgttcgccgagatcggcccgcgcatggccgagttgagcggttcccggctggccgcgcagcaacagatggaaggcctcctggcgccgcaccggcccaaggagcccgcgtggttcctggccaccgtcggcgtctcgcccgaccaccagggcaagggtctgggcagcgccgtcgtgctccccggagtggaggcggccgagcgcgccggggtgcccgccttcctggagacctccgcgccccgcaacctccccttctacgagcggctcggcttcaccgtcaccgccgacgtcgaggtgcccgaaggaccgcgcacctggtgcatgacccgcaagcccggtgcctga

SEQ ID NO: 1836 - DNA, 3285 bp, Artificial Sequence
  Synthetic Polynucleotide
atggccttaccagtgaccgccttgctcctgccgctggccttgctgctccacgccgccaggccggacatccagatgacacagagccctagcagcctgtctgccagcgtgggagacagagtgaccatcacatgcaaggccagcgaccacatcaacaactggctggcctggtatcagcagaagcctggacaggcccctaagctgctgatctacggcgctaccacactggaaacaggcgtgcccagcagattttctggcagcggctctggcaccgactacaccctgacaatatccagcctccagcctgaggacttcgccacctactactgtcagcagagctggaacaccccttggacattcggccagggcaccaagctggaaatcaagagactcgagggacagcctaaggccaatcctaccgtgacactgttccctccaagcagcgaagaactccaggccaacaaggccacacttgtgtgcctgatctccgacttctaccctggggctgtgacagtggcttggaaggccgatggatctcctgtgaaagccggcgtggaaaccaccaagccatccaagcagagcaacaacaaatacgccgccagctcctacctgagcctgacacctgagcagtggaagtcccacagatcctacagctgccaagtgacccacgaaggcagcaccgtggaaaagacagtggcccctacagagtgcagcggatcccaccccggacctgaagtgatctctggcgagaaagtgaccttctactgtcggctggataccgccaccagcatgtttctgctgctcaaagaaggccggtccagccacgtgcagcgcggatatggaaaagtgcaggccgagtttcccctgggacctgtgacaacagcccacagaggcacctacagatgcttcggcagctacaacaaccacgcttggagcttccctagcgagcccgtgaagttgcttgtgaccggcgacatcgagaacaccagtctggcccctgaggaccctacctttcctgccgatacctggggcacctacctgctgaccacagagacaggactccagaaagatcacgccctgtgggaccacacagcccagaacctgctgagaatgggcctcgcctttctggtgctggttgccctcgtgtggttcctggtggaagattggctgagccggaagcggacaagagagagagccagcagagcctctacctgggagggaagaagaaggctgaacacccagacacttagggccaagcgatctggatctggagcaacaaacttctcactactcaaacaagcaggtgacgtggaggagaatcccgggcctactagtatggactggatttggcgcatccttttccttgtcggcgctgctaccggcgcgcattccttcgaacaagttcagcttcaacagcctggcgctgagctggtcaaacctggcgcttctgtgaagatgagctgcaaagccagcggctacgccttcagcagctactggatcaactggatgaagcagaaacccggccagggactcgaatggatcggccaaatctatcccggcgacggcgacaccaactacaacggcaagttcaagggcagagccacactgaccgccgatacctctagcagcacagcctacatgcagctgagcagcctgaccagcgaagatagcgccgtgtacttctgtgcccggtccatcacaacagtcgtgggctgcgctatggactattggggccagggaacaagcgtgaccgtgtctagtacgcgtgcctctacaaagggaccctccgtgtttcctctggctcccagcagcaagtctacaagcggaggaacagccgctctgggctgcctggtcaaggattactttcccgagcctgtgaccgtgtcctggaatagcggagcactgacaagcggcgtgcacacctttccagccgtgctgcaaagcagcggcctgtactctctgagcagcgtggtcacagtgcctagctctagcctgggcacccagacctacatctgcaatgtgaaccacaagcctagcaacaccaaggtggacaagagagtggaacccaagagctgtggtaccgtgcaccctgggccagaagttatcagcggagaaaaagttaccttttattgccgcctcgataccgctacctctatgttcctcttgctgaaagagggccgcagctctcacgtgcagcgaggctacggaaaggtccaagctgagtttcctctcggccccgtgaccaccgctcacaggggcacatatagatgttttggctcttataacaatcatgcctggtcattcccatccgagcctgtgaaactgctggtcacaggcgatattgagaatacctctctggccccagaagatcctacattccccgccgacacatggggaacatatctgctgacaaccgaaaccgggctgcaaaaggaccatgctctgtgggatcataccgctcagaatctgcttcggatggggcttgcattcctggtcctggtggctcttgtctggtttctggtcgaggactggctgtcccggaagagaaccagagaaagagcttccagggccagcacctgggaaggcagacgcagactgaatactcagaccctgcgcgccaagagaagcggatctggcgtgaagcagaccctgaatttcgacctgctgaagctggctggcgacgtggaatccaacccaggcccttctagaggcgggatccacaccatggctacctacgaggtgctgtgcgaggtggcaagaaagctgggcaccgacgacagagaagtggtgctgttcctgctgaacgtgttcatccctcagcctacactggcccagctgatcggtgcactgagagccctgaaagaggaaggccggctgacctttcctctgctggccgaatgcctgttcagagccggaagaagggatctgctgcgggacctgctgcatctggaccccagatttctggaaagacacctggccggcaccatgagctacttcagcccttaccagctgaccgtgctgcacgttgacggcgaactgtgcgccagagatattcggagcctgatcttcctgagcaaggacaccatcggcagccggtctacccctcagacatttctgcactgggtgtactgcatggaaaacctggacctgctcggccccacagatgtggatgccctgatgtccatgctgagaagcctgagcagagtggacctccagagacaggtgcagacactgatgggactgcacctgagcggacctagccacagccagcactacagacacacccct

SEQ ID NO: 1837 - DNA, 3444 bp, Artificial Sequence
  Synthetic Polynucleotide
atggccttaccagtgaccgccttgctcctgccgctggccttgctgctccacgccgccaggccggacatccagatgacacagagccctagcagcctgtctgccagcgtgggagacagagtgaccatcacatgcaaggccagcgaccacatcaacaactggctggcctggtatcagcagaagcctggacaggcccctaagctgctgatctacggcgctaccacactggaaacaggcgtgcccagcagattttctggcagcggctctggcaccgactacaccctgacaatatccagcctccagcctgaggacttcgccacctactactgtcagcagagctggaacaccccttggacattcggccagggcaccaagctggaaatcaagagactcgagggacagcctaaggccaatcctaccgtgacactgttccctccaagcagcgaagaactccaggccaacaaggccacacttgtgtgcctgatctccgacttctaccctggggctgtgacagtggcttggaaggccgatggatctcctgtgaaagccggcgtggaaaccaccaagccatccaagcagagcaacaacaaatacgccgccagctcctacctgagcctgacacctgagcagtggaagtcccacagatcctacagctgccaagtgacccacgaaggcagcaccgtggaaaagacagtggcccctacagagtgcagcggatcccaccccggacctgaagtgatctctggcgagaaagtgaccttctactgtcggctggataccgccaccagcatgtttctgctgctcaaagaaggccggtccagccacgtgcagcgcggatatggaaaagtgcaggccgagtttcccctgggacctgtgacaacagcccacagaggcacctacagatgcttcggcagctacaacaaccacgcttggagcttccctagcgagcccgtgaagttgcttgtgaccggcgacatcgagaacaccagtctggcccctgaggaccctacctttcctgccgatacctggggcacctacctgctgaccacagagacaggactccagaaagatcacgccctgtgggaccacacagcccagaacctgctgagaatgggcctcgcctttctggtgctggttgccctcgtgtggttcctggtggaagattggctgagccggaagcggacaagagagagagccagcagagcctctacctgggagggaagaagaaggctgaacacccagacacttagggccaagcgatctggatctggagcaacaaacttctcactactcaaacaagcaggtgacgtggaggagaatcccgggcctactagtatggactggatttggcgcatccttttccttgtcggcgctgctaccggcgcgcattccttcgaacaagttcagcttcaacagcctggcgctgagctggtcaaacctggcgcttctgtgaagatgagctgcaaagccagcggctacgccttcagcagctactggatcaactggatgaagcagaaacccggccagggactcgaatggatcggccaaatctatcccggcgacggcgacaccaactacaacggcaagttcaagggcagagccacactgaccgccgatacctctagcagcacagcctacatgcagctgagcagcctgaccagcgaagatagcgccgtgtacttctgtgcccggtccatcacaacagtcgtgggctgcgctatggactattggggccagggaacaagcgtgaccgtgtctagtacgcgtgcctctacaaagggaccctccgtgtttcctctggctcccagcagcaagtctacaagcggaggaacagccgctctgggctgcctggtcaaggattactttcccgagcctgtgaccgtgtcctggaatagcggagcactgacaagcggcgtgcacacctttccagccgtgctgcaaagcagcggcctgtactctctgagcagcgtggtcacagtgcctagctctagcctgggcacccagacctacatctgcaatgtgaaccacaagcctagcaacaccaaggtggacaagagagtggaacccaagagctgtggtaccgtgcaccctgggccagaagttatcagcggagaaaaagttaccttttattgccgcctcgataccgctacctctatgttcctcttgctgaaagagggccgcagctctcacgtgcagcgaggctacggaaaggtccaagctgagtttcctctcggccccgtgaccaccgctcacaggggcacatatagatgttttggctcttataacaatcatgcctggtcattcccatccgagcctgtgaaactgctggtcacaggcgatattgagaatacctctctggccccagaagatcctacattccccgccgacacatggggaacatatctgctgacaaccgaaaccgggctgcaaaaggaccatgctctgtgggatcataccgctcagaatctgcttcggatggggcttgcattcctggtcctggtggctcttgtctggtttctggtcgaggactggctgtcccggaagagaaccagagaaagagcttccagggccagcacctgggaaggcagacgcagactgaatactcagaccctgcgcgccaagagaagcggatctggcgtgaagcagaccctgaatttcgacctgctgaagctggctggcgacgtggaatccaacccaggcccttctagaggcgggatccacaccatgtccgactccaaggaggtccctagccttccatttttgcgacacttgctcgaagagttggacagccatgaggacagcttgctgctgtttctgtgtcacgacgcggccccgggctgcacgacggtcacgcaagctttgtgctcgcttagccaacagcgcaagctgaccctcgcggctctggtcgagatgctctacgtgctgcagcgtatggatcttctcaagagccgcttcgggctcagcaaggagggggccgagcaattgctgggcacaagctttctcacgcgctaccgcaagctcatggtttgcgtgggtgaggagctcgactcgagcgagctacgcgctctacgcttgttcgcgtgcaacctgaatccgagcctgagcacggcgctttctgagagcagccgctttgtcgagcttgtactcgcgcttgaaaacgtaggactcgtctcgccatcgagtgtttccgtgcttgcggacatgttgcgcactcttcggcgcctcgatttgtgccagcagcttgttgagtacgaacaacaagagcaagccaggtaccgttactgttacgcggcctcgccctcattgccagttcgtacgttacgtcgggggcacggcgcgagtgaacacgagcagctgtgcatgcccgtgcaagaatcctctgacagccccgagctgctgcgcacgcccgtacaagaatcctccagcgacagccccgagcaaacgact

SEQ ID NO: 1838 - DNA, 3312 bp, Artificial Sequence
  Synthetic Polynucleotide
atggccttaccagtgaccgccttgctcctgccgctggccttgctgctccacgccgccaggccggacatccagatgacacagagccctagcagcctgtctgccagcgtgggagacagagtgaccatcacatgcaaggccagcgaccacatcaacaactggctggcctggtatcagcagaagcctggacaggcccctaagctgctgatctacggcgctaccacactggaaacaggcgtgcccagcagattttctggcagcggctctggcaccgactacaccctgacaatatccagcctccagcctgaggacttcgccacctactactgtcagcagagctggaacaccccttggacattcggccagggcaccaagctggaaatcaagagactcgagggacagcctaaggccaatcctaccgtgacactgttccctccaagcagcgaagaactccaggccaacaaggccacacttgtgtgcctgatctccgacttctaccctggggctgtgacagtggcttggaaggccgatggatctcctgtgaaagccggcgtggaaaccaccaagccatccaagcagagcaacaacaaatacgccgccagctcctacctgagcctgacacctgagcagtggaagtcccacagatcctacagctgccaagtgacccacgaaggcagcaccgtggaaaagacagtggcccctacagagtgcagcggatcccaccccggacctgaagtgatctctggcgagaaagtgaccttctactgtcggctggataccgccaccagcatgtttctgctgctcaaagaaggccggtccagccacgtgcagcgcggatatggaaaagtgcaggccgagtttcccctgggacctgtgacaacagcccacagaggcacctacagatgcttcggcagctacaacaaccacgcttggagcttccctagcgagcccgtgaagttgcttgtgaccggcgacatcgagaacaccagtctggcccctgaggaccctacctttcctgccgatacctggggcacctacctgctgaccacagagacaggactccagaaagatcacgccctgtgggaccacacagcccagaacctgctgagaatgggcctcgcctttctggtgctggttgccctcgtgtggttcctggtggaagattggctgagccggaagcggacaagagagagagccagcagagcctctacctgggagggaagaagaaggctgaacacccagacacttagggccaagcgatctggatctggagcaacaaacttctcactactcaaacaagcaggtgacgtggaggagaatcccgggcctactagtatggactggatttggcgcatccttttccttgtcggcgctgctaccggcgcgcattccttcgaacaagttcagcttcaacagcctggcgctgagctggtcaaacctggcgcttctgtgaagatgagctgcaaagccagcggctacgccttcagcagctactggatcaactggatgaagcagaaacccggccagggactcgaatggatcggccaaatctatcccggcgacggcgacaccaactacaacggcaagttcaagggcagagccacactgaccgccgatacctctagcagcacagcctacatgcagctgagcagcctgaccagcgaagatagcgccgtgtacttctgtgcccggtccatcacaacagtcgtgggctgcgctatggactattggggccagggaacaagcgtgaccgtgtctagtacgcgtgcctctacaaagggaccctccgtgtttcctctggctcccagcagcaagtctacaagcggaggaacagccgctctgggctgcctggtcaaggattactttcccgagcctgtgaccgtgtcctggaatagcggagcactgacaagcggcgtgcacacctttccagccgtgctgcaaagcagcggcctgtactctctgagcagcgtggtcacagtgcctagctctagcctgggcacccagacctacatctgcaatgtgaaccacaagcctagcaacaccaaggtggacaagagagtggaacccaagagctgtggtaccgtgcaccctgggccagaagttatcagcggagaaaaagttaccttttattgccgcctcgataccgctacctctatgttcctcttgctgaaagagggccgcagctctcacgtgcagcgaggctacggaaaggtccaagctgagtttcctctcggccccgtgaccaccgctcacaggggcacatatagatgttttggctcttataacaatcatgcctggtcattcccatccgagcctgtgaaactgctggtcacaggcgatattgagaatacctctctggccccagaagatcctacattccccgccgacacatggggaacatatctgctgacaaccgaaaccgggctgcaaaaggaccatgctctgtgggatcataccgctcagaatctgcttcggatggggcttgcattcctggtcctggtggctcttgtctggtttctggtcgaggactggctgtcccggaagagaaccagagaaagagcttccagggccagcacctgggaaggcagacgcagactgaatactcagaccctgcgcgccaagagaagcggatctggcgtgaagcagaccctgaatttcgacctgctgaagctggctggcgacgtggaatccaacccaggcccttctagaggccatatgaccgagtacaagcccacggtgcgcctcgccacccgcgacgacgtccccagggccgtacgcaccctcgccgccgcgttcgccgactaccccgccacgcgccacaccgtcgatccggaccgccacatcgagcgggtcaccgagctgcaagaactcttcctcacgcgcgtcgggctcgacatcggcaaggtgtgggtcgcggacgacggcgccgcggtggcggtctggaccacgccggagagcgtcgaagcgggggcggtgttcgccgagatcggcccgcgcatggccgagttgagcggttcccggctggccgcgcagcaacagatggaaggcctcctggcgccgcaccggcccaaggagcccgcgtggttcctggccaccgtcggcgtctcgcccgaccaccagggcaagggtctgggcagcgccgtcgtgctccccggagtggaggcggccgagcgcgccggggtgcccgccttcctggagacctccgcgccccgcaacctccccttctacgagcggctcggcttcaccgtcaccgccgacgtcgaggtgcccgaaggaccgcgcacctggtgcatgacccgcaagcccggtgcctga

SEQ ID NO: 1839 - DNA, 3723 bp, Artificial Sequence
  Synthetic Polynucleotide
atggccttaccagtgaccgccttgctcctgccgctggccttgctgctccacgccgccaggccggaagtgcagctggttgaatctggcggaggactggttcaggctggcggatctctgagactgtcttgtgccgccagcggcagaacctttagcatgggctggtttagacaggcccctggcaaagagagagagttcgtcgccgccatcacatactctggcggcagcccttactacgccgactctgtgaagggcagattcaccatcagccgggacaacgccaagaacaccgtgtacctccagatgaacagcctgaagcctgaggacaccgccgtgtactactgcgccgccaatccaacatacggcagcgactggaacgccgagaattggggccagggaacccaagtgacagtgtctagcggtaccggcggaggcggatctggcggcggaggtagcggtggcggaggatctgaattcgacatccagatgacacagagccctagcagcctgtctgccagcgtgggagacagagtgaccatcacatgcaaggccagcgaccacatcaacaactggctggcctggtatcagcagaagcctggacaggcccctaagctgctgatctacggcgctaccacactggaaacaggcgtgcccagcagattttctggcagcggctctggcaccgactacaccctgacaatatccagcctccagcctgaggacttcgccacctactactgtcagcagagctggaacaccccttggacattcggccagggcaccaagctggaaatcaagagactcgagggacagcctaaggccaatcctaccgtgacactgttccctccaagcagcgaagaactccaggccaacaaggccacacttgtgtgcctgatctccgacttctaccctggggctgtgacagtggcttggaaggccgatggatctcctgtgaaagccggcgtggaaaccaccaagccatccaagcagagcaacaacaaatacgccgccagctcctacctgagcctgacacctgagcagtggaagtcccacagatcctacagctgccaagtgacccacgaaggcagcaccgtggaaaagacagtggcccctacagagtgcagcggatcccaccccggacctgaagtgatctctggcgagaaagtgaccttctactgtcggctggataccgccaccagcatgtttctgctgctcaaagaaggccggtccagccacgtgcagcgcggatatggaaaagtgcaggccgagtttcccctgggacctgtgacaacagcccacagaggcacctacagatgcttcggcagctacaacaaccacgcttggagcttccctagcgagcccgtgaagttgcttgtgaccggcgacatcgagaacaccagtctggcccctgaggaccctacctttcctgccgatacctggggcacctacctgctgaccacagagacaggactccagaaagatcacgccctgtgggaccacacagcccagaacctgctgagaatgggcctcgcctttctggtgctggttgccctcgtgtggttcctggtggaagattggctgagccggaagcggacaagagagagagccagcagagcctctacctgggagggaagaagaaggctgaacacccagacacttagggccaagcgatctggatctggagcaacaaacttctcactactcaaacaagcaggtgacgtggaggagaatcccgggcctactagtatggactggatttggcgcatccttttccttgtcggcgctgctaccggcgcgcattccttcgaacaagttcagcttcaacagcctggcgctgagctggtcaaacctggcgcttctgtgaagatgagctgcaaagccagcggctacgccttcagcagctactggatcaactggatgaagcagaaacccggccagggactcgaatggatcggccaaatctatcccggcgacggcgacaccaactacaacggcaagttcaagggcagagccacactgaccgccgatacctctagcagcacagcctacatgcagctgagcagcctgaccagcgaagatagcgccgtgtacttctgtgcccggtccatcacaacagtcgtgggctgcgctatggactattggggccagggaacaagcgtgaccgtgtctagtacgcgtgcctctacaaagggaccctccgtgtttcctctggctcccagcagcaagtctacaagcggaggaacagccgctctgggctgcctggtcaaggattactttcccgagcctgtgaccgtgtcctggaatagcggagcactgacaagcggcgtgcacacctttccagccgtgctgcaaagcagcggcctgtactctctgagcagcgtggtcacagtgcctagctctagcctgggcacccagacctacatctgcaatgtgaaccacaagcctagcaacaccaaggtggacaagagagtggaacccaagagctgtggtaccgtgcaccctgggccagaagttatcagcggagaaaaagttaccttttattgccgcctcgataccgctacctctatgttcctcttgctgaaagagggccgcagctctcacgtgcagcgaggctacggaaaggtccaagctgagtttcctctcggccccgtgaccaccgctcacaggggcacatatagatgttttggctcttataacaatcatgcctggtcattcccatccgagcctgtgaaactgctggtcacaggcgatattgagaatacctctctggccccagaagatcctacattccccgccgacacatggggaacatatctgctgacaaccgaaaccgggctgcaaaaggaccatgctctgtgggatcataccgctcagaatctgcttcggatggggcttgcattcctggtcctggtggctcttgtctggtttctggtcgaggactggctgtcccggaagagaaccagagaaagagcttccagggccagcacctgggaaggcagacgcagactgaatactcagaccctgcgcgccaagagaagcggatctggcgtgaagcagaccctgaatttcgacctgctgaagctggctggcgacgtggaatccaacccaggcccttctagaggccatatgaccgagtacaagcccacggtgcgcctcgccacccgcgacgacgtccccagggccgtacgcaccctcgccgccgcgttcgccgactaccccgccacgcgccacaccgtcgatccggaccgccacatcgagcgggtcaccgagctgcaagaactcttcctcacgcgcgtcgggctcgacatcggcaaggtgtgggtcgcggacgacggcgccgcggtggcggtctggaccacgccggagagcgtcgaagcgggggcggtgttcgccgagatcggcccgcgcatggccgagttgagcggttcccggctggccgcgcagcaacagatggaaggcctcctggcgccgcaccggcccaaggagcccgcgtggttcctggccaccgtcggcgtctcgcccgaccaccagggcaagggtctgggcagcgccgtcgtgctccccggagtggaggcggccgagcgcgccggggtgcccgccttcctggagacctccgcgccccgcaacctccccttctacgagcggctcggcttcaccgtcaccgccgacgtcgaggtgcccgaaggaccgcgcacctggtgcatgacccgcaagcccggtgcctga

SEQ ID NO: 1840 - DNA, 4134 bp, Artificial Sequence
  Synthetic Polynucleotide
atggccttaccagtgaccgccttgctcctgccgctggccttgctgctccacgccgccaggccggaagtgcagctggttgaatctggcggaggactggttcaggctggcggatctctgagactgtcttgtgccgccagcggcagaacctttagcatgggctggtttagacaggcccctggcaaagagagagagttcgtcgccgccatcacatactctggcggcagcccttactacgccgactctgtgaagggcagattcaccatcagccgggacaacgccaagaacaccgtgtacctccagatgaacagcctgaagcctgaggacaccgccgtgtactactgcgccgccaatccaacatacggcagcgactggaacgccgagaattggggccagggaacccaagtgacagtgtctagcggtaccggcggaggcggatctggcggcggaggtagcggtggcggaggatctgaattcgacatccagatgacacagagccctagcagcctgtctgccagcgtgggagacagagtgaccatcacatgcaaggccagcgaccacatcaacaactggctggcctggtatcagcagaagcctggacaggcccctaagctgctgatctacggcgctaccacactggaaacaggcgtgcccagcagattttctggcagcggctctggcaccgactacaccctgacaatatccagcctccagcctgaggacttcgccacctactactgtcagcagagctggaacaccccttggacattcggccagggcaccaagctggaaatcaagagactcgagggacagcctaaggccaatcctaccgtgacactgttccctccaagcagcgaagaactccaggccaacaaggccacacttgtgtgcctgatctccgacttctaccctggggctgtgacagtggcttggaaggccgatggatctcctgtgaaagccggcgtggaaaccaccaagccatccaagcagagcaacaacaaatacgccgccagctcctacctgagcctgacacctgagcagtggaagtcccacagatcctacagctgccaagtgacccacgaaggcagcaccgtggaaaagacagtggcccctacagagtgcagcggatcccaccccggacctgaagtgatctctggcgagaaagtgaccttctactgtcggctggataccgccaccagcatgtttctgctgctcaaagaaggccggtccagccacgtgcagcgcggatatggaaaagtgcaggccgagtttcccctgggacctgtgacaacagcccacagaggcacctacagatgcttcggcagctacaacaaccacgcttggagcttccctagcgagcccgtgaagttgcttgtgaccggcgacatcgagaacaccagtctggcccctgaggaccctacctttcctgccgatacctggggcacctacctgctgaccacagagacaggactccagaaagatcacgccctgtgggaccacacagcccagaacctgctgagaatgggcctcgcctttctggtgctggttgccctcgtgtggttcctggtggaagattggctgagccggaagcggacaagagagagagccagcagagcctctacctgggagggaagaagaaggctgaacacccagacacttagggccaagcgatctggatctggagcaacaaacttctcactactcaaacaagcaggtgacgtggaggagaatcccgggcctactagtatggactggatttggcgcatccttttccttgtcggcgctgctaccggcgcgcattccgggcccgaagtgcaactggttgaatccggtggcggcctggtgcaagcaggcggatctctcagacttagctgtgccgcctccggcagaaccttcacaatgggatggtttaggcaggctccagggaaagagagagagttcgtcgccgccatctctctgtctcccacactggcctactacgccgactctgtgaaaggccggttcaccatctccagagataatgccaagaacaccgtggtgctgcaaatgaactctctgaaacccgaggatacagccctgtactattgtgccgctgaccggaagtccgtgatgagcatcagacccgattactggggacagggcacacaagtcacagtgtcctctggatccggcggcggaggatctggcggaggcggatctgggggcggaggctctttcgaacaagttcagcttcaacagcctggcgctgagctggtcaaacctggcgcttctgtgaagatgagctgcaaagccagcggctacgccttcagcagctactggatcaactggatgaagcagaaacccggccagggactcgaatggatcggccaaatctatcccggcgacggcgacaccaactacaacggcaagttcaagggcagagccacactgaccgccgatacctctagcagcacagcctacatgcagctgagcagcctgaccagcgaagatagcgccgtgtacttctgtgcccggtccatcacaacagtcgtgggctgcgctatggactattggggccagggaacaagcgtgaccgtgtctagtacgcgtgcctctacaaagggaccctccgtgtttcctctggctcccagcagcaagtctacaagcggaggaacagccgctctgggctgcctggtcaaggattactttcccgagcctgtgaccgtgtcctggaatagcggagcactgacaagcggcgtgcacacctttccagccgtgctgcaaagcagcggcctgtactctctgagcagcgtggtcacagtgcctagctctagcctgggcacccagacctacatctgcaatgtgaaccacaagcctagcaacaccaaggtggacaagagagtggaacccaagagctgtggtaccgtgcaccctgggccagaagttatcagcggagaaaaagttaccttttattgccgcctcgataccgctacctctatgttcctcttgctgaaagagggccgcagctctcacgtgcagcgaggctacggaaaggtccaagctgagtttcctctcggccccgtgaccaccgctcacaggggcacatatagatgttttggctcttataacaatcatgcctggtcattcccatccgagcctgtgaaactgctggtcacaggcgatattgagaatacctctctggccccagaagatcctacattccccgccgacacatggggaacatatctgctgacaaccgaaaccgggctgcaaaaggaccatgctctgtgggatcataccgctcagaatctgcttcggatggggcttgcattcctggtcctggtggctcttgtctggtttctggtcgaggactggctgtcccggaagagaaccagagaaagagcttccagggccagcacctgggaaggcagacgcagactgaatactcagaccctgcgcgccaagagaagcggatctggcgtgaagcagaccctgaatttcgacctgctgaagctggctggcgacgtggaatccaacccaggcccttctagaggccatatgaccgagtacaagcccacggtgcgcctcgccacccgcgacgacgtccccagggccgtacgcaccctcgccgccgcgttcgccgactaccccgccacgcgccacaccgtcgatccggaccgccacatcgagcgggtcaccgagctgcaagaactcttcctcacgcgcgtcgggctcgacatcggcaaggtgtgggtcgcggacgacggcgccgcggtggcggtctggaccacgccggagagcgtcgaagcgggggcggtgttcgccgagatcggcccgcgcatggccgagttgagcggttcccggctggccgcgcagcaacagatggaaggcctcctggcgccgcaccggcccaaggagcccgcgtggttcctggccaccgtcggcgtctcgcccgaccaccagggcaagggtctgggcagcgccgtcgtgctccccggagtggaggcggccgagcgcgccggggtgcccgccttcctggagacctccgcgccccgcaacctccccttctacgagcggctcggcttcaccgtcaccgccgacgtcgaggtgcccgaaggaccgcgcacctggtgcatgacccgcaagcccggtgcctga

SEQ ID NO: 1841 - DNA, 3333 bp, Artificial Sequence
  Synthetic Polynucleotide
atggccttaccagtgaccgccttgctcctgccgctggccttgctgctccacgccgccaggccggaagtgcagctggttgaatctggcggaggactggttcaggctggcggatctctgagactgtcttgtgccgccagcggcagaacctttagcatgggctggtttagacaggcccctggcaaagagagagagttcgtcgccgccatcacatactctggcggcagcccttactacgccgactctgtgaagggcagattcaccatcagccgggacaacgccaagaacaccgtgtacctccagatgaacagcctgaagcctgaggacaccgccgtgtactactgcgccgccaatccaacatacggcagcgactggaacgccgagaattggggccagggaacccaagtgacagtgtctagcctcgagggacagcctaaggccaatcctaccgtgacactgttccctccaagcagcgaagaactccaggccaacaaggccacacttgtgtgcctgatctccgacttctaccctggggctgtgacagtggcttggaaggccgatggatctcctgtgaaagccggcgtggaaaccaccaagccatccaagcagagcaacaacaaatacgccgccagctcctacctgagcctgacacctgagcagtggaagtcccacagatcctacagctgccaagtgacccacgaaggcagcaccgtggaaaagacagtggcccctacagagtgcagcggatcccaccccggacctgaagtgatctctggcgagaaagtgaccttctactgtcggctggataccgccaccagcatgtttctgctgctcaaagaaggccggtccagccacgtgcagcgcggatatggaaaagtgcaggccgagtttcccctgggacctgtgacaacagcccacagaggcacctacagatgcttcggcagctacaacaaccacgcttggagcttccctagcgagcccgtgaagttgcttgtgaccggcgacatcgagaacaccagtctggcccctgaggaccctacctttcctgccgatacctggggcacctacctgctgaccacagagacaggactccagaaagatcacgccctgtgggaccacacagcccagaacctgctgagaatgggcctcgcctttctggtgctggttgccctcgtgtggttcctggtggaagattggctgagccggaagcggacaagagagagagccagcagagcctctacctgggagggaagaagaaggctgaacacccagacacttagggccaagcgatctggatctggagcaacaaacttctcactactcaaacaagcaggtgacgtggaggagaatcccgggcctactagtatggactggatttggcgcatccttttccttgtcggcgctgctaccggcgcgcattccgggcccgaagtgcaactggttgaatccggtggcggcctggtgcaagcaggcggatctctcagacttagctgtgccgcctccggcagaaccttcacaatgggatggtttaggcaggctccagggaaagagagagagttcgtcgccgccatctctctgtctcccacactggcctactacgccgactctgtgaaaggccggttcaccatctccagagataatgccaagaacaccgtggtgctgcaaatgaactctctgaaacccgaggatacagccctgtactattgtgccgctgaccggaagtccgtgatgagcatcagacccgattactggggacagggcacacaagtcacagtgtcctctacgcgtgcctctacaaagggaccctccgtgtttcctctggctcccagcagcaagtctacaagcggaggaacagccgctctgggctgcctggtcaaggattactttcccgagcctgtgaccgtgtcctggaatagcggagcactgacaagcggcgtgcacacctttccagccgtgctgcaaagcagcggcctgtactctctgagcagcgtggtcacagtgcctagctctagcctgggcacccagacctacatctgcaatgtgaaccacaagcctagcaacaccaaggtggacaagagagtggaacccaagagctgtggtaccgtgcaccctgggccagaagttatcagcggagaaaaagttaccttttattgccgcctcgataccgctacctctatgttcctcttgctgaaagagggccgcagctctcacgtgcagcgaggctacggaaaggtccaagctgagtttcctctcggccccgtgaccaccgctcacaggggcacatatagatgttttggctcttataacaatcatgcctggtcattcccatccgagcctgtgaaactgctggtcacaggcgatattgagaatacctctctggccccagaagatcctacattccccgccgacacatggggaacatatctgctgacaaccgaaaccgggctgcaaaaggaccatgctctgtgggatcataccgctcagaatctgcttcggatggggcttgcattcctggtcctggtggctcttgtctggtttctggtcgaggactggctgtcccggaagagaaccagagaaagagcttccagggccagcacctgggaaggcagacgcagactgaatactcagaccctgcgcgccaagagaagcggatctggcgtgaagcagaccctgaatttcgacctgctgaagctggctggcgacgtggaatccaacccaggcccttctagaggccatatgaccgagtacaagcccacggtgcgcctcgccacccgcgacgacgtccccagggccgtacgcaccctcgccgccgcgttcgccgactaccccgccacgcgccacaccgtcgatccggaccgccacatcgagcgggtcaccgagctgcaagaactcttcctcacgcgcgtcgggctcgacatcggcaaggtgtgggtcgcggacgacggcgccgcggtggcggtctggaccacgccggagagcgtcgaagcgggggcggtgttcgccgagatcggcccgcgcatggccgagttgagcggttcccggctggccgcgcagcaacagatggaaggcctcctggcgccgcaccggcccaaggagcccgcgtggttcctggccaccgtcggcgtctcgcccgaccaccagggcaagggtctgggcagcgccgtcgtgctccccggagtggaggcggccgagcgcgccggggtgcccgccttcctggagacctccgcgccccgcaacctccccttctacgagcggctcggcttcaccgtcaccgccgacgtcgaggtgcccgaaggaccgcgcacctggtgcatgacccgcaagcccggtgcctga

SEQ ID NO: 1842 - DNA, 3357 bp, Artificial Sequence
  Synthetic Polynucleotide
atggccttaccagtgaccgccttgctcctgccgctggccttgctgctccacgccgccaggccggacatccagatgacacagagccctagcagcctgtctgccagcgtgggagacagagtgaccatcacatgcaaggccagcgaccacatcaacaactggctggcctggtatcagcagaagcctggacaggcccctaagctgctgatctacggcgctaccacactggaaacaggcgtgcccagcagattttctggcagcggctctggcaccgactacaccctgacaatatccagcctccagcctgaggacttcgccacctactactgtcagcagagctggaacaccccttggacattcggccagggcaccaagctggaaatcaagagactcgaggacctgaagaacgtgttcccacctgaggtggccgtgttcgagcctagcgaggccgagatcagccacacccagaaagccaccctcgtgtgcctggctaccggcttctaccccgaccatgtggaactgtcttggtgggtcaacggcaaagaggtgcacagcggcgtgtctaccgacccccagccactgaaagaacagcccgccctgaacgacagccggtactgcctgagcagcagactgagagtgtccgccaccttctggcagaacccccggaaccacttcagatgccaggtgcagttctacggcctgagcgagaacgacgagtggacccaggacagagccaagcccgtgacccagatcgtgtctgccgaagcctggggcagagccgattgcggatcccaccccggacctgaagtgatctctggcgagaaagtgaccttctactgtcggctggataccgccaccagcatgtttctgctgctcaaagaaggccggtccagccacgtgcagcgcggatatggaaaagtgcaggccgagtttcccctgggacctgtgacaacagcccacagaggcacctacagatgcttcggcagctacaacaaccacgcttggagcttccctagcgagcccgtgaagttgcttgtgaccggcgacatcgagaacaccagtctggcccctgaggaccctacctttcctgccgatacctggggcacctacctgctgaccacagagacaggactccagaaagatcacgccctgtgggaccacacagcccagaacctgctgagaatgggcctcgcctttctggtgctggttgccctcgtgtggttcctggtggaagattggctgagccggaagcggacaagagagagagccagcagagcctctacctgggagggaagaagaaggctgaacacccagacacttagggccaagcgatctggatctggagcaacaaacttctcactactcaaacaagcaggtgacgtggaggagaatcccgggcctactagtatggactggatttggcgcatccttttccttgtcggcgctgctaccggcgcgcattccttcgaacaagttcagcttcaacagcctggcgctgagctggtcaaacctggcgcttctgtgaagatgagctgcaaagccagcggctacgccttcagcagctactggatcaactggatgaagcagaaacccggccagggactcgaatggatcggccaaatctatcccggcgacggcgacaccaactacaacggcaagttcaagggcagagccacactgaccgccgatacctctagcagcacagcctacatgcagctgagcagcctgaccagcgaagatagcgccgtgtacttctgtgcccggtccatcacaacagtcgtgggctgcgctatggactattggggccagggaacaagcgtgaccgtgtctagtacgcgtatccagaaccctgatcctgccgtgtaccagctgcgggatagcaagagcagcgacaagagcgtgtgtctgttcaccgacttcgacagccagaccaacgtgtcccagagcaaggactccgacgtgtacatcaccgataagaccgtgctggacatgcggagcatggacttcaagagcaactccgccgtggcctggtccaacaagtccgatttcgcctgcgccaacgccttcaacaacagcattatccccgaggacacattcttcccaagccccgagagcagctgcggtaccgtgcaccctgggccagaagttatcagcggagaaaaagttaccttttattgccgcctcgataccgctacctctatgttcctcttgctgaaagagggccgcagctctcacgtgcagcgaggctacggaaaggtccaagctgagtttcctctcggccccgtgaccaccgctcacaggggcacatatagatgttttggctcttataacaatcatgcctggtcattcccatccgagcctgtgaaactgctggtcacaggcgatattgagaatacctctctggccccagaagatcctacattccccgccgacacatggggaacatatctgctgacaaccgaaaccgggctgcaaaaggaccatgctctgtgggatcataccgctcagaatctgcttcggatggggcttgcattcctggtcctggtggctcttgtctggtttctggtcgaggactggctgtcccggaagagaaccagagaaagagcttccagggccagcacctgggaaggcagacgcagactgaatactcagaccctgcgcgccaagagaagcggatctggcgtgaagcagaccctgaatttcgacctgctgaagctggctggcgacgtggaatccaacccaggcccttctagaggccatatgaccgagtacaagcccacggtgcgcctcgccacccgcgacgacgtccccagggccgtacgcaccctcgccgccgcgttcgccgactaccccgccacgcgccacaccgtcgatccggaccgccacatcgagcgggtcaccgagctgcaagaactcttcctcacgcgcgtcgggctcgacatcggcaaggtgtgggtcgcggacgacggcgccgcggtggcggtctggaccacgccggagagcgtcgaagcgggggcggtgttcgccgagatcggcccgcgcatggccgagttgagcggttcccggctggccgcgcagcaacagatggaaggcctcctggcgccgcaccggcccaaggagcccgcgtggttcctggccaccgtcggcgtctcgcccgaccaccagggcaagggtctgggcagcgccgtcgtgctccccggagtggaggcggccgagcgcgccggggtgcccgccttcctggagacctccgcgccccgcaacctccccttctacgagcggctcggcttcaccgtcaccgccgacgtcgaggtgcccgaaggaccgcgcacctggtgcatgacccgcaagcccggtgcctga

SEQ ID NO: 1843 - DNA, 3768 bp, Artificial Sequence
  Synthetic Polynucleotide
atggccttaccagtgaccgccttgctcctgccgctggccttgctgctccacgccgccaggccggaagtgcagctggttgaatctggcggaggactggttcaggctggcggatctctgagactgtcttgtgccgccagcggcagaacctttagcatgggctggtttagacaggcccctggcaaagagagagagttcgtcgccgccatcacatactctggcggcagcccttactacgccgactctgtgaagggcagattcaccatcagccgggacaacgccaagaacaccgtgtacctccagatgaacagcctgaagcctgaggacaccgccgtgtactactgcgccgccaatccaacatacggcagcgactggaacgccgagaattggggccagggaacccaagtgacagtgtctagcggtaccggcggaggcggatctggcggcggaggtagcggtggcggaggatctgaattcgacatccagatgacacagagccctagcagcctgtctgccagcgtgggagacagagtgaccatcacatgcaaggccagcgaccacatcaacaactggctggcctggtatcagcagaagcctggacaggcccctaagctgctgatctacggcgctaccacactggaaacaggcgtgcccagcagattttctggcagcggctctggcaccgactacaccctgacaatatccagcctccagcctgaggacttcgccacctactactgtcagcagagctggaacaccccttggacattcggccagggcaccaagctggaaatcaagagactcgaggacctgaagaacgtgttcccacctgaggtggccgtgttcgagcctagcgaggccgagatcagccacacccagaaagccaccctcgtgtgcctggctaccggcttctaccccgaccatgtggaactgtcttggtgggtcaacggcaaagaggtgcacagcggcgtgtctaccgacccccagccactgaaagaacagcccgccctgaacgacagccggtactgcctgagcagcagactgagagtgtccgccaccttctggcagaacccccggaaccacttcagatgccaggtgcagttctacggcctgagcgagaacgacgagtggacccaggacagagccaagcccgtgacccagatcgtgtctgccgaagcctggggcagagccgattgcggatcccaccccggacctgaagtgatctctggcgagaaagtgaccttctactgtcggctggataccgccaccagcatgtttctgctgctcaaagaaggccggtccagccacgtgcagcgcggatatggaaaagtgcaggccgagtttcccctgggacctgtgacaacagcccacagaggcacctacagatgcttcggcagctacaacaaccacgcttggagcttccctagcgagcccgtgaagttgcttgtgaccggcgacatcgagaacaccagtctggcccctgaggaccctacctttcctgccgatacctggggcacctacctgctgaccacagagacaggactccagaaagatcacgccctgtgggaccacacagcccagaacctgctgagaatgggcctcgcctttctggtgctggttgccctcgtgtggttcctggtggaagattggctgagccggaagcggacaagagagagagccagcagagcctctacctgggagggaagaagaaggctgaacacccagacacttagggccaagcgatctggatctggagcaacaaacttctcactactcaaacaagcaggtgacgtggaggagaatcccgggcctactagtatggactggatttggcgcatccttttccttgtcggcgctgctaccggcgcgcattccttcgaacaagttcagcttcaacagcctggcgctgagctggtcaaacctggcgcttctgtgaagatgagctgcaaagccagcggctacgccttcagcagctactggatcaactggatgaagcagaaacccggccagggactcgaatggatcggccaaatctatcccggcgacggcgacaccaactacaacggcaagttcaagggcagagccacactgaccgccgatacctctagcagcacagcctacatgcagctgagcagcctgaccagcgaagatagcgccgtgtacttctgtgcccggtccatcacaacagtcgtgggctgcgctatggactattggggccagggaacaagcgtgaccgtgtctagtacgcgtatccagaaccctgatcctgccgtgtaccagctgcgggatagcaagagcagcgacaagagcgtgtgtctgttcaccgacttcgacagccagaccaacgtgtcccagagcaaggactccgacgtgtacatcaccgataagaccgtgctggacatgcggagcatggacttcaagagcaactccgccgtggcctggtccaacaagtccgatttcgcctgcgccaacgccttcaacaacagcattatccccgaggacacattcttcccaagccccgagagcagctgcggtaccgtgcaccctgggccagaagttatcagcggagaaaaagttaccttttattgccgcctcgataccgctacctctatgttcctcttgctgaaagagggccgcagctctcacgtgcagcgaggctacggaaaggtccaagctgagtttcctctcggccccgtgaccaccgctcacaggggcacatatagatgttttggctcttataacaatcatgcctggtcattcccatccgagcctgtgaaactgctggtcacaggcgatattgagaatacctctctggccccagaagatcctacattccccgccgacacatggggaacatatctgctgacaaccgaaaccgggctgcaaaaggaccatgctctgtgggatcataccgctcagaatctgcttcggatggggcttgcattcctggtcctggtggctcttgtctggtttctggtcgaggactggctgtcccggaagagaaccagagaaagagcttccagggccagcacctgggaaggcagacgcagactgaatactcagaccctgcgcgccaagagaagcggatctggcgtgaagcagaccctgaatttcgacctgctgaagctggctggcgacgtggaatccaacccaggcccttctagaggccatatgaccgagtacaagcccacggtgcgcctcgccacccgcgacgacgtccccagggccgtacgcaccctcgccgccgcgttcgccgactaccccgccacgcgccacaccgtcgatccggaccgccacatcgagcgggtcaccgagctgcaagaactcttcctcacgcgcgtcgggctcgacatcggcaaggtgtgggtcgcggacgacggcgccgcggtggcggtctggaccacgccggagagcgtcgaagcgggggcggtgttcgccgagatcggcccgcgcatggccgagttgagcggttcccggctggccgcgcagcaacagatggaaggcctcctggcgccgcaccggcccaaggagcccgcgtggttcctggccaccgtcggcgtctcgcccgaccaccagggcaagggtctgggcagcgccgtcgtgctccccggagtggaggcggccgagcgcgccggggtgcccgccttcctggagacctccgcgccccgcaacctccccttctacgagcggctcggcttcaccgtcaccgccgacgtcgaggtgcccgaaggaccgcgcacctggtgcatgacccgcaagcccggtgcctga

SEQ ID NO: 1844 - DNA, 4179 bp, Artificial Sequence
  Synthetic Polynucleotide
atggccttaccagtgaccgccttgctcctgccgctggccttgctgctccacgccgccaggccggaagtgcagctggttgaatctggcggaggactggttcaggctggcggatctctgagactgtcttgtgccgccagcggcagaacctttagcatgggctggtttagacaggcccctggcaaagagagagagttcgtcgccgccatcacatactctggcggcagcccttactacgccgactctgtgaagggcagattcaccatcagccgggacaacgccaagaacaccgtgtacctccagatgaacagcctgaagcctgaggacaccgccgtgtactactgcgccgccaatccaacatacggcagcgactggaacgccgagaattggggccagggaacccaagtgacagtgtctagcggtaccggcggaggcggatctggcggcggaggtagcggtggcggaggatctgaattcgacatccagatgacacagagccctagcagcctgtctgccagcgtgggagacagagtgaccatcacatgcaaggccagcgaccacatcaacaactggctggcctggtatcagcagaagcctggacaggcccctaagctgctgatctacggcgctaccacactggaaacaggcgtgcccagcagattttctggcagcggctctggcaccgactacaccctgacaatatccagcctccagcctgaggacttcgccacctactactgtcagcagagctggaacaccccttggacattcggccagggcaccaagctggaaatcaagagactcgaggacctgaagaacgtgttcccacctgaggtggccgtgttcgagcctagcgaggccgagatcagccacacccagaaagccaccctcgtgtgcctggctaccggcttctaccccgaccatgtggaactgtcttggtgggtcaacggcaaagaggtgcacagcggcgtgtctaccgacccccagccactgaaagaacagcccgccctgaacgacagccggtactgcctgagcagcagactgagagtgtccgccaccttctggcagaacccccggaaccacttcagatgccaggtgcagttctacggcctgagcgagaacgacgagtggacccaggacagagccaagcccgtgacccagatcgtgtctgccgaagcctggggcagagccgattgcggatcccaccccggacctgaagtgatctctggcgagaaagtgaccttctactgtcggctggataccgccaccagcatgtttctgctgctcaaagaaggccggtccagccacgtgcagcgcggatatggaaaagtgcaggccgagtttcccctgggacctgtgacaacagcccacagaggcacctacagatgcttcggcagctacaacaaccacgcttggagcttccctagcgagcccgtgaagttgcttgtgaccggcgacatcgagaacaccagtctggcccctgaggaccctacctttcctgccgatacctggggcacctacctgctgaccacagagacaggactccagaaagatcacgccctgtgggaccacacagcccagaacctgctgagaatgggcctcgcctttctggtgctggttgccctcgtgtggttcctggtggaagattggctgagccggaagcggacaagagagagagccagcagagcctctacctgggagggaagaagaaggctgaacacccagacacttagggccaagcgatctggatctggagcaacaaacttctcactactcaaacaagcaggtgacgtggaggagaatcccgggcctactagtatggactggatttggcgcatccttttccttgtcggcgctgctaccggcgcgcattccgggcccgaagtgcaactggttgaatccggtggcggcctggtgcaagcaggcggatctctcagacttagctgtgccgcctccggcagaaccttcacaatgggatggtttaggcaggctccagggaaagagagagagttcgtcgccgccatctctctgtctcccacactggcctactacgccgactctgtgaaaggccggttcaccatctccagagataatgccaagaacaccgtggtgctgcaaatgaactctctgaaacccgaggatacagccctgtactattgtgccgctgaccggaagtccgtgatgagcatcagacccgattactggggacagggcacacaagtcacagtgtcctctggatccggcggcggaggatctggcggaggcggatctgggggcggaggctctttcgaacaagttcagcttcaacagcctggcgctgagctggtcaaacctggcgcttctgtgaagatgagctgcaaagccagcggctacgccttcagcagctactggatcaactggatgaagcagaaacccggccagggactcgaatggatcggccaaatctatcccggcgacggcgacaccaactacaacggcaagttcaagggcagagccacactgaccgccgatacctctagcagcacagcctacatgcagctgagcagcctgaccagcgaagatagcgccgtgtacttctgtgcccggtccatcacaacagtcgtgggctgcgctatggactattggggccagggaacaagcgtgaccgtgtctagtacgcgtatccagaaccctgatcctgccgtgtaccagctgcgggatagcaagagcagcgacaagagcgtgtgtctgttcaccgacttcgacagccagaccaacgtgtcccagagcaaggactccgacgtgtacatcaccgataagaccgtgctggacatgcggagcatggacttcaagagcaactccgccgtggcctggtccaacaagtccgatttcgcctgcgccaacgccttcaacaacagcattatccccgaggacacattcttcccaagccccgagagcagctgcggtaccgtgcaccctgggccagaagttatcagcggagaaaaagttaccttttattgccgcctcgataccgctacctctatgttcctcttgctgaaagagggccgcagctctcacgtgcagcgaggctacggaaaggtccaagctgagtttcctctcggccccgtgaccaccgctcacaggggcacatatagatgttttggctcttataacaatcatgcctggtcattcccatccgagcctgtgaaactgctggtcacaggcgatattgagaatacctctctggccccagaagatcctacattccccgccgacacatggggaacatatctgctgacaaccgaaaccgggctgcaaaaggaccatgctctgtgggatcataccgctcagaatctgcttcggatggggcttgcattcctggtcctggtggctcttgtctggtttctggtcgaggactggctgtcccggaagagaaccagagaaagagcttccagggccagcacctgggaaggcagacgcagactgaatactcagaccctgcgcgccaagagaagcggatctggcgtgaagcagaccctgaatttcgacctgctgaagctggctggcgacgtggaatccaacccaggcccttctagaggccatatgaccgagtacaagcccacggtgcgcctcgccacccgcgacgacgtccccagggccgtacgcaccctcgccgccgcgttcgccgactaccccgccacgcgccacaccgtcgatccggaccgccacatcgagcgggtcaccgagctgcaagaactcttcctcacgcgcgtcgggctcgacatcggcaaggtgtgggtcgcggacgacggcgccgcggtggcggtctggaccacgccggagagcgtcgaagcgggggcggtgttcgccgagatcggcccgcgcatggccgagttgagcggttcccggctggccgcgcagcaacagatggaaggcctcctggcgccgcaccggcccaaggagcccgcgtggttcctggccaccgtcggcgtctcgcccgaccaccagggcaagggtctgggcagcgccgtcgtgctccccggagtggaggcggccgagcgcgccggggtgcccgccttcctggagacctccgcgccccgcaacctccccttctacgagcggctcggcttcaccgtcaccgccgacgtcgaggtgcccgaaggaccgcgcacctggtgcatgacccgcaagcccggtgcctga

SEQ ID NO: 1845 - DNA, 3378 bp, Artificial Sequence
  Synthetic Polynucleotide
atggccttaccagtgaccgccttgctcctgccgctggccttgctgctccacgccgccaggccggaagtgcagctggttgaatctggcggaggactggttcaggctggcggatctctgagactgtcttgtgccgccagcggcagaacctttagcatgggctggtttagacaggcccctggcaaagagagagagttcgtcgccgccatcacatactctggcggcagcccttactacgccgactctgtgaagggcagattcaccatcagccgggacaacgccaagaacaccgtgtacctccagatgaacagcctgaagcctgaggacaccgccgtgtactactgcgccgccaatccaacatacggcagcgactggaacgccgagaattggggccagggaacccaagtgacagtgtctagcctcgaggacctgaagaacgtgttcccacctgaggtggccgtgttcgagcctagcgaggccgagatcagccacacccagaaagccaccctcgtgtgcctggctaccggcttctaccccgaccatgtggaactgtcttggtgggtcaacggcaaagaggtgcacagcggcgtgtctaccgacccccagccactgaaagaacagcccgccctgaacgacagccggtactgcctgagcagcagactgagagtgtccgccaccttctggcagaacccccggaaccacttcagatgccaggtgcagttctacggcctgagcgagaacgacgagtggacccaggacagagccaagcccgtgacccagatcgtgtctgccgaagcctggggcagagccgattgcggatcccaccccggacctgaagtgatctctggcgagaaagtgaccttctactgtcggctggataccgccaccagcatgtttctgctgctcaaagaaggccggtccagccacgtgcagcgcggatatggaaaagtgcaggccgagtttcccctgggacctgtgacaacagcccacagaggcacctacagatgcttcggcagctacaacaaccacgcttggagcttccctagcgagcccgtgaagttgcttgtgaccggcgacatcgagaacaccagtctggcccctgaggaccctacctttcctgccgatacctggggcacctacctgctgaccacagagacaggactccagaaagatcacgccctgtgggaccacacagcccagaacctgctgagaatgggcctcgcctttctggtgctggttgccctcgtgtggttcctggtggaagattggctgagccggaagcggacaagagagagagccagcagagcctctacctgggagggaagaagaaggctgaacacccagacacttagggccaagcgatctggatctggagcaacaaacttctcactactcaaacaagcaggtgacgtggaggagaatcccgggcctactagtatggactggatttggcgcatccttttccttgtcggcgctgctaccggcgcgcattccgggcccgaagtgcaactggttgaatccggtggcggcctggtgcaagcaggcggatctctcagacttagctgtgccgcctccggcagaaccttcacaatgggatggtttaggcaggctccagggaaagagagagagttcgtcgccgccatctctctgtctcccacactggcctactacgccgactctgtgaaaggccggttcaccatctccagagataatgccaagaacaccgtggtgctgcaaatgaactctctgaaacccgaggatacagccctgtactattgtgccgctgaccggaagtccgtgatgagcatcagacccgattactggggacagggcacacaagtcacagtgtcctctacgcgtatccagaaccctgatcctgccgtgtaccagctgcgggatagcaagagcagcgacaagagcgtgtgtctgttcaccgacttcgacagccagaccaacgtgtcccagagcaaggactccgacgtgtacatcaccgataagaccgtgctggacatgcggagcatggacttcaagagcaactccgccgtggcctggtccaacaagtccgatttcgcctgcgccaacgccttcaacaacagcattatccccgaggacacattcttcccaagccccgagagcagctgcggtaccgtgcaccctgggccagaagttatcagcggagaaaaagttaccttttattgccgcctcgataccgctacctctatgttcctcttgctgaaagagggccgcagctctcacgtgcagcgaggctacggaaaggtccaagctgagtttcctctcggccccgtgaccaccgctcacaggggcacatatagatgttttggctcttataacaatcatgcctggtcattcccatccgagcctgtgaaactgctggtcacaggcgatattgagaatacctctctggccccagaagatcctacattccccgccgacacatggggaacatatctgctgacaaccgaaaccgggctgcaaaaggaccatgctctgtgggatcataccgctcagaatctgcttcggatggggcttgcattcctggtcctggtggctcttgtctggtttctggtcgaggactggctgtcccggaagagaaccagagaaagagcttccagggccagcacctgggaaggcagacgcagactgaatactcagaccctgcgcgccaagagaagcggatctggcgtgaagcagaccctgaatttcgacctgctgaagctggctggcgacgtggaatccaacccaggcccttctagaggccatatgaccgagtacaagcccacggtgcgcctcgccacccgcgacgacgtccccagggccgtacgcaccctcgccgccgcgttcgccgactaccccgccacgcgccacaccgtcgatccggaccgccacatcgagcgggtcaccgagctgcaagaactcttcctcacgcgcgtcgggctcgacatcggcaaggtgtgggtcgcggacgacggcgccgcggtggcggtctggaccacgccggagagcgtcgaagcgggggcggtgttcgccgagatcggcccgcgcatggccgagttgagcggttcccggctggccgcgcagcaacagatggaaggcctcctggcgccgcaccggcccaaggagcccgcgtggttcctggccaccgtcggcgtctcgcccgaccaccagggcaagggtctgggcagcgccgtcgtgctccccggagtggaggcggccgagcgcgccggggtgcccgccttcctggagacctccgcgccccgcaacctccccttctacgagcggctcggcttcaccgtcaccgccgacgtcgaggtgcccgaaggaccgcgcacctggtgcatgacccgcaagcccggtgcctga

SEQ ID NO: 1846 - DNA, 1716 bp, Artificial Sequence
  Synthetic Polynucleotide
atggccttaccagtgaccgccttgctcctgccgctggccttgctgctccacgccgccaggccggcatgcgaagtgcagctgcttgaaagtggcggcggactgattcagcctggcggatctctgagactgagctgtgccgccagcggcttcaccttttctagccacgccatgacctgggtccgacaggcacctggaaaagggcttgaatgggtgtccgccatcagcggctctggcgattacacacactacgccgacagcgtgaagggcagattcaccatcagcagagacaacagcaagaacaccgtgtacctccagatgaacagcctgagagccgaggacagcgccgtgtattattgcgccaaggatgaggatggcggcagcctgcttggacacagaggacaaggcaccctggtcaccgtttcttccggtaccggcggaggcggatctggcggcggaggtagcggtggcggaggatctgaattcggatctctcgagcaccccggacctgaagtgatctctggcgagaaagtgaccttctactgtcggctggataccgccaccagcatgtttctgctgctcaaagaaggccggtccagccacgtgcagcgcggatatggaaaagtgcaggccgagtttcccctgggacctgtgacaacagcccacagaggcacctacagatgcttcggcagctacaacaaccacgcttggagcttccctagcgagcccgtgaagttgcttgtgaccggcgacatcgagaacaccagtctggcccctgaggaccctacctttcctgccgatacctggggcacctacctgctgaccacagagacaggactccagaaagatcacgccctgtgggaccacacagcccagaacctgctgagaatgggcctcgcctttctggtgctggttgccctcgtgtggttcctggtggaagattggctgagccggaagcggacaagagagagagccagcagagcctctacctgggagggaagaagaaggctgaacacccagacacttagggccaagcgatctggatctggagcaacaaacttctcactactcaaacaagcaggtgacgtggaggagaatcccgggcctactagaggccatatgaccgagtacaagcccacggtgcgcctcgccacccgcgacgacgtccccagggccgtacgcaccctcgccgccgcgttcgccgactaccccgccacgcgccacaccgtcgatccggaccgccacatcgagcgggtcaccgagctgcaagaactcttcctcacgcgcgtcgggctcgacatcggcaaggtgtgggtcgcggacgacggcgccgcggtggcggtctggaccacgccggagagcgtcgaagcgggggcggtgttcgccgagatcggcccgcgcatggccgagttgagcggttcccggctggccgcgcagcaacagatggaaggcctcctggcgccgcaccggcccaaggagcccgcgtggttcctggccaccgtcggcgtctcgcccgaccaccagggcaagggtctgggcagcgccgtcgtgctccccggagtggaggcggccgagcgcgccggggtgcccgccttcctggagacctccgcgccccgcaacctccccttctacgagcggctcggcttcaccgtcaccgccgacgtcgaggtgcccgaaggaccgcgcacctggtgcatgacccgcaagcccggtgcctga

SEQ ID NO: 1847 - DNA, 2340 bp, Artificial Sequence
  Synthetic Polynucleotide
atggccttaccagtgaccgccttgctcctgccgctggccttgctgctccacgccgccaggccggacatccagatgacacagagccctagcagcctgtctgccagcgtgggagacagagtgaccatcacatgcaaggccagcgaccacatcaacaactggctggcctggtatcagcagaagcctggacaggcccctaagctgctgatctacggcgctaccacactggaaacaggcgtgcccagcagattttctggcagcggctctggcaccgactacaccctgacaatatccagcctccagcctgaggacttcgccacctactactgtcagcagagctggaacaccccttggacattcggccagggcaccaagctggaaatcaagagactcgagatcggctggctgttgctccaggcccctcggtgggtgttcaaggaggaagaccctattcacctgaggtgtcacagctggaagaacactgctctgcataaggtcacatatttacagaatggcaaaggcaggaagtattttcatcataattctgacttctacattccaaaagccacactcaaagacagcggctcctacttctgcagggggcttgttgggagtaaaaatgtgtcttcagagactgtgaacatcaccatcactcaaggtttggcagtgtcaaccatctcatcattctttccacctggctaccaagtgtccttctgcctggtcatggtgctgctgttcgccgtggataccggcctgtacttcagcgtcaagaccaacatccggtccagcaccagagactggaaggaccacaagttcaagtggcggaaggaccctcaggacaagagggccaagcgatctggatctggagcaacaaacttctcactactcaaacaagcaggtgacgtggaggagaatcccgggcctactagtatggactggatttggcgcatccttttccttgtcggcgctgctaccggcgcgcattccttcgaacaagttcagcttcaacagcctggcgctgagctggtcaaacctggcgcttctgtgaagatgagctgcaaagccagcggctacgccttcagcagctactggatcaactggatgaagcagaaacccggccagggactcgaatggatcggccaaatctatcccggcgacggcgacaccaactacaacggcaagttcaagggcagagccacactgaccgccgatacctctagcagcacagcctacatgcagctgagcagcctgaccagcgaagatagcgccgtgtacttctgtgcccggtccatcacaacagtcgtgggctgcgctatggactattggggccagggaacaagcgtgaccgtgtctagtacgcgtggcgatattgagaatacctctctggccccagaagatcctacattccccgccgacacatggggaacatatctgctgacaaccgaaaccgggctgcaaaaggaccatgctctgtgggatcataccgctcagaatctgcttcggatggggcttgcattcctggtcctggtggctcttgtctggtttctggtcgaggactggctgtcccggaagagaaccagagaaagagcttccagggccagcacctgggaaggcagacgcagactgaatactcagaccctgcgcgccaagagaagcggatctggcgtgaagcagaccctgaatttcgacctgctgaagctggctggcgacgtggaatccaacccaggcccttctagaggccatatgaccgagtacaagcccacggtgcgcctcgccacccgcgacgacgtccccagggccgtacgcaccctcgccgccgcgttcgccgactaccccgccacgcgccacaccgtcgatccggaccgccacatcgagcgggtcaccgagctgcaagaactcttcctcacgcgcgtcgggctcgacatcggcaaggtgtgggtcgcggacgacggcgccgcggtggcggtctggaccacgccggagagcgtcgaagcgggggcggtgttcgccgagatcggcccgcgcatggccgagttgagcggttcccggctggccgcgcagcaacagatggaaggcctcctggcgccgcaccggcccaaggagcccgcgtggttcctggccaccgtcggcgtctcgcccgaccaccagggcaagggtctgggcagcgccgtcgtgctccccggagtggaggcggccgagcgcgccggggtgcccgccttcctggagacctccgcgccccgcaacctccccttctacgagcggctcggcttcaccgtcaccgccgacgtcgaggtgcccgaaggaccgcgcacctggtgcatgacccgcaagcccggtgcctga

SEQ ID NO: 1848 - DNA, 2502 bp, Artificial Sequence
  Synthetic Polynucleotide
atggccttaccagtgaccgccttgctcctgccgctggccttgctgctccacgccgccaggccggcatgcgaagtgcagctgcttgaaagtggcggcggactgattcagcctggcggatctctgagactgagctgtgccgccagcggcttcaccttttctagccacgccatgacctgggtccgacaggcacctggaaaagggcttgaatgggtgtccgccatcagcggctctggcgattacacacactacgccgacagcgtgaagggcagattcaccatcagcagagacaacagcaagaacaccgtgtacctccagatgaacagcctgagagccgaggacagcgccgtgtattattgcgccaaggatgaggatggcggcagcctgcttggacacagaggacaaggcaccctggtcaccgtttcttccggtaccggcggaggcggatctggcggcggaggtagcggtggcggaggatctgaattcggatctctcgagatcggctggctgttgctccaggcccctcggtgggtgttcaaggaggaagaccctattcacctgaggtgtcacagctggaagaacactgctctgcataaggtcacatatttacagaatggcaaaggcaggaagtattttcatcataattctgacttctacattccaaaagccacactcaaagacagcggctcctacttctgcagggggcttgttgggagtaaaaatgtgtcttcagagactgtgaacatcaccatcactcaaggtttggcagtgtcaaccatctcatcattctttccacctggctaccaagtgtccttctgcctggtcatggtgctgctgttcgccgtggataccggcctgtacttcagcgtcaagaccaacatccggtccagcaccagagactggaaggaccacaagttcaagtggcggaaggaccctcaggacaagagggccaagcgatctggatctggagcaacaaacttctcactactcaaacaagcaggtgacgtggaggagaatcccgggcctactagtgccaccatggactggatttggcgcatccttttccttgtcggcgctgctaccggcgcccattccgggcccgaagtgcagctggttgaatctggcggaggactggttcaggctggcggatctctgagactgtcttgtgccgccagcggcagaacctttagcatgggctggtttagacaggcccctggcaaagagagagagttcgtcgccgccatcacatactctggcggcagcccttactacgccgactctgtgaagggcagattcaccatcagccgggacaacgccaagaacaccgtgtacctccagatgaacagcctgaagcctgaggacaccgccgtgtactactgcgccgccaatccaacatacggcagcgactggaacgccgagaattggggccagggaacccaagtgacagtgtctagcggatccggcggcggaggatctggcggaggcggatctgggggcggaggctctttcgaaggcagcacgcgtggcgatattgagaatacctctctggccccagaagatcctacattccccgccgacacatggggaacatatctgctgacaaccgaaaccgggctgcaaaaggaccatgctctgtgggatcataccgctcagaatctgcttcggatggggcttgcattcctggtcctggtggctcttgtctggtttctggtcgaggactggctgtcccggaagagaaccagagaaagagcttccagggccagcacctgggaaggcagacgcagactgaatactcagaccctgcgcgccaagagaagcggatctggcgtgaagcagaccctgaatttcgacctgctgaagctggctggcgacgtggaatccaacccaggcccttctagaggccatatgaccgagtacaagcccacggtgcgcctcgccacccgcgacgacgtccccagggccgtacgcaccctcgccgccgcgttcgccgactaccccgccacgcgccacaccgtcgatccggaccgccacatcgagcgggtcaccgagctgcaagaactcttcctcacgcgcgtcgggctcgacatcggcaaggtgtgggtcgcggacgacggcgccgcggtggcggtctggaccacgccggagagcgtcgaagcgggggcggtgttcgccgagatcggcccgcgcatggccgagttgagcggttcccggctggccgcgcagcaacagatggaaggcctcctggcgccgcaccggcccaaggagcccgcgtggttcctggccaccgtcggcgtctcgcccgaccaccagggcaagggtctgggcagcgccgtcgtgctccccggagtggaggcggccgagcgcgccggggtgcccgccttcctggagacctccgcgccccgcaacctccccttctacgagcggctcggcttcaccgtcaccgccgacgtcgaggtgcccgaaggaccgcgcacctggtgcatgacccgcaagcccggtgcctga

SEQ ID NO: 1849 - DNA, 2952 bp, Artificial Sequence
  Synthetic Polynucleotide
atggccttaccagtgaccgccttgctcctgccgctggccttgctgctccacgccgccaggccggacatccagatgacacagagccctagcagcctgtctgccagcgtgggagacagagtgaccatcacatgcaaggccagcgaccacatcaacaactggctggcctggtatcagcagaagcctggacaggcccctaagctgctgatctacggcgctaccacactggaaacaggcgtgcccagcagattttctggcagcggctctggcaccgactacaccctgacaatatccagcctccagcctgaggacttcgccacctactactgtcagcagagctggaacaccccttggacattcggccagggcaccaagctggaaatcaagagactcgagggacagcctaaggccaatcctaccgtgacactgttccctccaagcagcgaagaactccaggccaacaaggccacacttgtgtgcctgatctccgacttctaccctggggctgtgacagtggcttggaaggccgatggatctcctgtgaaagccggcgtggaaaccaccaagccatccaagcagagcaacaacaaatacgccgccagctcctacctgagcctgacacctgagcagtggaagtcccacagatcctacagctgccaagtgacccacgaaggcagcaccgtggaaaagacagtggcccctacagagtgcagcggatccatcggctggctgttgctccaggcccctcggtgggtgttcaaggaggaagaccctattcacctgaggtgtcacagctggaagaacactgctctgcataaggtcacatatttacagaatggcaaaggcaggaagtattttcatcataattctgacttctacattccaaaagccacactcaaagacagcggctcctacttctgcagggggcttgttgggagtaaaaatgtgtcttcagagactgtgaacatcaccatcactcaaggtttggcagtgtcaaccatctcatcattctttccacctggctaccaagtgtccttctgcctggtcatggtgctgctgttcgccgtggataccggcctgtacttcagcgtcaagaccaacatccggtccagcaccagagactggaaggaccacaagttcaagtggcggaaggaccctcaggacaagagggccaagcgatctggatctggagcaacaaacttctcactactcaaacaagcaggtgacgtggaggagaatcccgggcctactagtatggactggatttggcgcatccttttccttgtcggcgctgctaccggcgcgcattccttcgaacaagttcagcttcaacagcctggcgctgagctggtcaaacctggcgcttctgtgaagatgagctgcaaagccagcggctacgccttcagcagctactggatcaactggatgaagcagaaacccggccagggactcgaatggatcggccaaatctatcccggcgacggcgacaccaactacaacggcaagttcaagggcagagccacactgaccgccgatacctctagcagcacagcctacatgcagctgagcagcctgaccagcgaagatagcgccgtgtacttctgtgcccggtccatcacaacagtcgtgggctgcgctatggactattggggccagggaacaagcgtgaccgtgtctagtacgcgtgcctctacaaagggaccctccgtgtttcctctggctcccagcagcaagtctacaagcggaggaacagccgctctgggctgcctggtcaaggattactttcccgagcctgtgaccgtgtcctggaatagcggagcactgacaagcggcgtgcacacctttccagccgtgctgcaaagcagcggcctgtactctctgagcagcgtggtcacagtgcctagctctagcctgggcacccagacctacatctgcaatgtgaaccacaagcctagcaacaccaaggtggacaagagagtggaacccaagagctgtggtaccggcgatattgagaatacctctctggccccagaagatcctacattccccgccgacacatggggaacatatctgctgacaaccgaaaccgggctgcaaaaggaccatgctctgtgggatcataccgctcagaatctgcttcggatggggcttgcattcctggtcctggtggctcttgtctggtttctggtcgaggactggctgtcccggaagagaaccagagaaagagcttccagggccagcacctgggaaggcagacgcagactgaatactcagaccctgcgcgccaagagaagcggatctggcgtgaagcagaccctgaatttcgacctgctgaagctggctggcgacgtggaatccaacccaggcccttctagaggcgggatccacaccatggctacctacgaggtgctgtgcgaggtggcaagaaagctgggcaccgacgacagagaagtggtgctgttcctgctgaacgtgttcatccctcagcctacactggcccagctgatcggtgcactgagagccctgaaagaggaaggccggctgacctttcctctgctggccgaatgcctgttcagagccggaagaagggatctgctgcgggacctgctgcatctggaccccagatttctggaaagacacctggccggcaccatgagctacttcagcccttaccagctgaccgtgctgcacgttgacggcgaactgtgcgccagagatattcggagcctgatcttcctgagcaaggacaccatcggcagccggtctacccctcagacatttctgcactgggtgtactgcatggaaaacctggacctgctcggccccacagatgtggatgccctgatgtccatgctgagaagcctgagcagagtggacctccagagacaggtgcagacactgatgggactgcacctgagcggacctagccacagccagcactacagacacacccct

SEQ ID NO: 1850 - DNA, 3111 bp, Artificial Sequence
  Synthetic Polynucleotide
atggccttaccagtgaccgccttgctcctgccgctggccttgctgctccacgccgccaggccggacatccagatgacacagagccctagcagcctgtctgccagcgtgggagacagagtgaccatcacatgcaaggccagcgaccacatcaacaactggctggcctggtatcagcagaagcctggacaggcccctaagctgctgatctacggcgctaccacactggaaacaggcgtgcccagcagattttctggcagcggctctggcaccgactacaccctgacaatatccagcctccagcctgaggacttcgccacctactactgtcagcagagctggaacaccccttggacattcggccagggcaccaagctggaaatcaagagactcgagggacagcctaaggccaatcctaccgtgacactgttccctccaagcagcgaagaactccaggccaacaaggccacacttgtgtgcctgatctccgacttctaccctggggctgtgacagtggcttggaaggccgatggatctcctgtgaaagccggcgtggaaaccaccaagccatccaagcagagcaacaacaaatacgccgccagctcctacctgagcctgacacctgagcagtggaagtcccacagatcctacagctgccaagtgacccacgaaggcagcaccgtggaaaagacagtggcccctacagagtgcagcggatccatcggctggctgttgctccaggcccctcggtgggtgttcaaggaggaagaccctattcacctgaggtgtcacagctggaagaacactgctctgcataaggtcacatatttacagaatggcaaaggcaggaagtattttcatcataattctgacttctacattccaaaagccacactcaaagacagcggctcctacttctgcagggggcttgttgggagtaaaaatgtgtcttcagagactgtgaacatcaccatcactcaaggtttggcagtgtcaaccatctcatcattctttccacctggctaccaagtgtccttctgcctggtcatggtgctgctgttcgccgtggataccggcctgtacttcagcgtcaagaccaacatccggtccagcaccagagactggaaggaccacaagttcaagtggcggaaggaccctcaggacaagagggccaagcgatctggatctggagcaacaaacttctcactactcaaacaagcaggtgacgtggaggagaatcccgggcctactagtatggactggatttggcgcatccttttccttgtcggcgctgctaccggcgcgcattccttcgaacaagttcagcttcaacagcctggcgctgagctggtcaaacctggcgcttctgtgaagatgagctgcaaagccagcggctacgccttcagcagctactggatcaactggatgaagcagaaacccggccagggactcgaatggatcggccaaatctatcccggcgacggcgacaccaactacaacggcaagttcaagggcagagccacactgaccgccgatacctctagcagcacagcctacatgcagctgagcagcctgaccagcgaagatagcgccgtgtacttctgtgcccggtccatcacaacagtcgtgggctgcgctatggactattggggccagggaacaagcgtgaccgtgtctagtacgcgtgcctctacaaagggaccctccgtgtttcctctggctcccagcagcaagtctacaagcggaggaacagccgctctgggctgcctggtcaaggattactttcccgagcctgtgaccgtgtcctggaatagcggagcactgacaagcggcgtgcacacctttccagccgtgctgcaaagcagcggcctgtactctctgagcagcgtggtcacagtgcctagctctagcctgggcacccagacctacatctgcaatgtgaaccacaagcctagcaacaccaaggtggacaagagagtggaacccaagagctgtggtaccggcgatattgagaatacctctctggccccagaagatcctacattccccgccgacacatggggaacatatctgctgacaaccgaaaccgggctgcaaaaggaccatgctctgtgggatcataccgctcagaatctgcttcggatggggcttgcattcctggtcctggtggctcttgtctggtttctggtcgaggactggctgtcccggaagagaaccagagaaagagcttccagggccagcacctgggaaggcagacgcagactgaatactcagaccctgcgcgccaagagaagcggatctggcgtgaagcagaccctgaatttcgacctgctgaagctggctggcgacgtggaatccaacccaggcccttctagaggcgggatccacaccatgtccgactccaaggaggtccctagccttccatttttgcgacacttgctcgaagagttggacagccatgaggacagcttgctgctgtttctgtgtcacgacgcggccccgggctgcacgacggtcacgcaagctttgtgctcgcttagccaacagcgcaagctgaccctcgcggctctggtcgagatgctctacgtgctgcagcgtatggatcttctcaagagccgcttcgggctcagcaaggagggggccgagcaattgctgggcacaagctttctcacgcgctaccgcaagctcatggtttgcgtgggtgaggagctcgactcgagcgagctacgcgctctacgcttgttcgcgtgcaacctgaatccgagcctgagcacggcgctttctgagagcagccgctttgtcgagcttgtactcgcgcttgaaaacgtaggactcgtctcgccatcgagtgtttccgtgcttgcggacatgttgcgcactcttcggcgcctcgatttgtgccagcagcttgttgagtacgaacaacaagagcaagccaggtaccgttactgttacgcggcctcgccctcattgccagttcgtacgttacgtcgggggcacggcgcgagtgaacacgagcagctgtgcatgcccgtgcaagaatcctctgacagccccgagctgctgcgcacgcccgtacaagaatcctccagcgacagccccgagcaaacgact

SEQ ID NO: 1851 - DNA, 2979 bp, Artificial Sequence
  Synthetic Polynucleotide
atggccttaccagtgaccgccttgctcctgccgctggccttgctgctccacgccgccaggccggacatccagatgacacagagccctagcagcctgtctgccagcgtgggagacagagtgaccatcacatgcaaggccagcgaccacatcaacaactggctggcctggtatcagcagaagcctggacaggcccctaagctgctgatctacggcgctaccacactggaaacaggcgtgcccagcagattttctggcagcggctctggcaccgactacaccctgacaatatccagcctccagcctgaggacttcgccacctactactgtcagcagagctggaacaccccttggacattcggccagggcaccaagctggaaatcaagagactcgagggacagcctaaggccaatcctaccgtgacactgttccctccaagcagcgaagaactccaggccaacaaggccacacttgtgtgcctgatctccgacttctaccctggggctgtgacagtggcttggaaggccgatggatctcctgtgaaagccggcgtggaaaccaccaagccatccaagcagagcaacaacaaatacgccgccagctcctacctgagcctgacacctgagcagtggaagtcccacagatcctacagctgccaagtgacccacgaaggcagcaccgtggaaaagacagtggcccctacagagtgcagcggatccatcggctggctgttgctccaggcccctcggtgggtgttcaaggaggaagaccctattcacctgaggtgtcacagctggaagaacactgctctgcataaggtcacatatttacagaatggcaaaggcaggaagtattttcatcataattctgacttctacattccaaaagccacactcaaagacagcggctcctacttctgcagggggcttgttgggagtaaaaatgtgtcttcagagactgtgaacatcaccatcactcaaggtttggcagtgtcaaccatctcatcattctttccacctggctaccaagtgtccttctgcctggtcatggtgctgctgttcgccgtggataccggcctgtacttcagcgtcaagaccaacatccggtccagcaccagagactggaaggaccacaagttcaagtggcggaaggaccctcaggacaagagggccaagcgatctggatctggagcaacaaacttctcactactcaaacaagcaggtgacgtggaggagaatcccgggcctactagtatggactggatttggcgcatccttttccttgtcggcgctgctaccggcgcgcattccttcgaacaagttcagcttcaacagcctggcgctgagctggtcaaacctggcgcttctgtgaagatgagctgcaaagccagcggctacgccttcagcagctactggatcaactggatgaagcagaaacccggccagggactcgaatggatcggccaaatctatcccggcgacggcgacaccaactacaacggcaagttcaagggcagagccacactgaccgccgatacctctagcagcacagcctacatgcagctgagcagcctgaccagcgaagatagcgccgtgtacttctgtgcccggtccatcacaacagtcgtgggctgcgctatggactattggggccagggaacaagcgtgaccgtgtctagtacgcgtgcctctacaaagggaccctccgtgtttcctctggctcccagcagcaagtctacaagcggaggaacagccgctctgggctgcctggtcaaggattactttcccgagcctgtgaccgtgtcctggaatagcggagcactgacaagcggcgtgcacacctttccagccgtgctgcaaagcagcggcctgtactctctgagcagcgtggtcacagtgcctagctctagcctgggcacccagacctacatctgcaatgtgaaccacaagcctagcaacaccaaggtggacaagagagtggaacccaagagctgtggtaccggcgatattgagaatacctctctggccccagaagatcctacattccccgccgacacatggggaacatatctgctgacaaccgaaaccgggctgcaaaaggaccatgctctgtgggatcataccgctcagaatctgcttcggatggggcttgcattcctggtcctggtggctcttgtctggtttctggtcgaggactggctgtcccggaagagaaccagagaaagagcttccagggccagcacctgggaaggcagacgcagactgaatactcagaccctgcgcgccaagagaagcggatctggcgtgaagcagaccctgaatttcgacctgctgaagctggctggcgacgtggaatccaacccaggcccttctagaggccatatgaccgagtacaagcccacggtgcgcctcgccacccgcgacgacgtccccagggccgtacgcaccctcgccgccgcgttcgccgactaccccgccacgcgccacaccgtcgatccggaccgccacatcgagcgggtcaccgagctgcaagaactcttcctcacgcgcgtcgggctcgacatcggcaaggtgtgggtcgcggacgacggcgccgcggtggcggtctggaccacgccggagagcgtcgaagcgggggcggtgttcgccgagatcggcccgcgcatggccgagttgagcggttcccggctggccgcgcagcaacagatggaaggcctcctggcgccgcaccggcccaaggagcccgcgtggttcctggccaccgtcggcgtctcgcccgaccaccagggcaagggtctgggcagcgccgtcgtgctccccggagtggaggcggccgagcgcgccggggtgcccgccttcctggagacctccgcgccccgcaacctccccttctacgagcggctcggcttcaccgtcaccgccgacgtcgaggtgcccgaaggaccgcgcacctggtgcatgacccgcaagcccggtgcctga

SEQ ID NO: 1852 - DNA, 3390 bp, Artificial Sequence
  Synthetic Polynucleotide
atggccttaccagtgaccgccttgctcctgccgctggccttgctgctccacgccgccaggccggaagtgcagctggttgaatctggcggaggactggttcaggctggcggatctctgagactgtcttgtgccgccagcggcagaacctttagcatgggctggtttagacaggcccctggcaaagagagagagttcgtcgccgccatcacatactctggcggcagcccttactacgccgactctgtgaagggcagattcaccatcagccgggacaacgccaagaacaccgtgtacctccagatgaacagcctgaagcctgaggacaccgccgtgtactactgcgccgccaatccaacatacggcagcgactggaacgccgagaattggggccagggaacccaagtgacagtgtctagcggtaccggcggaggcggatctggcggcggaggtagcggtggcggaggatctgaattcgacatccagatgacacagagccctagcagcctgtctgccagcgtgggagacagagtgaccatcacatgcaaggccagcgaccacatcaacaactggctggcctggtatcagcagaagcctggacaggcccctaagctgctgatctacggcgctaccacactggaaacaggcgtgcccagcagattttctggcagcggctctggcaccgactacaccctgacaatatccagcctccagcctgaggacttcgccacctactactgtcagcagagctggaacaccccttggacattcggccagggcaccaagctggaaatcaagagactcgagggacagcctaaggccaatcctaccgtgacactgttccctccaagcagcgaagaactccaggccaacaaggccacacttgtgtgcctgatctccgacttctaccctggggctgtgacagtggcttggaaggccgatggatctcctgtgaaagccggcgtggaaaccaccaagccatccaagcagagcaacaacaaatacgccgccagctcctacctgagcctgacacctgagcagtggaagtcccacagatcctacagctgccaagtgacccacgaaggcagcaccgtggaaaagacagtggcccctacagagtgcagcggatccatcggctggctgttgctccaggcccctcggtgggtgttcaaggaggaagaccctattcacctgaggtgtcacagctggaagaacactgctctgcataaggtcacatatttacagaatggcaaaggcaggaagtattttcatcataattctgacttctacattccaaaagccacactcaaagacagcggctcctacttctgcagggggcttgttgggagtaaaaatgtgtcttcagagactgtgaacatcaccatcactcaaggtttggcagtgtcaaccatctcatcattctttccacctggctaccaagtgtccttctgcctggtcatggtgctgctgttcgccgtggataccggcctgtacttcagcgtcaagaccaacatccggtccagcaccagagactggaaggaccacaagttcaagtggcggaaggaccctcaggacaagagggccaagcgatctggatctggagcaacaaacttctcactactcaaacaagcaggtgacgtggaggagaatcccgggcctactagtatggactggatttggcgcatccttttccttgtcggcgctgctaccggcgcgcattccttcgaacaagttcagcttcaacagcctggcgctgagctggtcaaacctggcgcttctgtgaagatgagctgcaaagccagcggctacgccttcagcagctactggatcaactggatgaagcagaaacccggccagggactcgaatggatcggccaaatctatcccggcgacggcgacaccaactacaacggcaagttcaagggcagagccacactgaccgccgatacctctagcagcacagcctacatgcagctgagcagcctgaccagcgaagatagcgccgtgtacttctgtgcccggtccatcacaacagtcgtgggctgcgctatggactattggggccagggaacaagcgtgaccgtgtctagtacgcgtgcctctacaaagggaccctccgtgtttcctctggctcccagcagcaagtctacaagcggaggaacagccgctctgggctgcctggtcaaggattactttcccgagcctgtgaccgtgtcctggaatagcggagcactgacaagcggcgtgcacacctttccagccgtgctgcaaagcagcggcctgtactctctgagcagcgtggtcacagtgcctagctctagcctgggcacccagacctacatctgcaatgtgaaccacaagcctagcaacaccaaggtggacaagagagtggaacccaagagctgtggtaccggcgatattgagaatacctctctggccccagaagatcctacattccccgccgacacatggggaacatatctgctgacaaccgaaaccgggctgcaaaaggaccatgctctgtgggatcataccgctcagaatctgcttcggatggggcttgcattcctggtcctggtggctcttgtctggtttctggtcgaggactggctgtcccggaagagaaccagagaaagagcttccagggccagcacctgggaaggcagacgcagactgaatactcagaccctgcgcgccaagagaagcggatctggcgtgaagcagaccctgaatttcgacctgctgaagctggctggcgacgtggaatccaacccaggcccttctagaggccatatgaccgagtacaagcccacggtgcgcctcgccacccgcgacgacgtccccagggccgtacgcaccctcgccgccgcgttcgccgactaccccgccacgcgccacaccgtcgatccggaccgccacatcgagcgggtcaccgagctgcaagaactcttcctcacgcgcgtcgggctcgacatcggcaaggtgtgggtcgcggacgacggcgccgcggtggcggtctggaccacgccggagagcgtcgaagcgggggcggtgttcgccgagatcggcccgcgcatggccgagttgagcggttcccggctggccgcgcagcaacagatggaaggcctcctggcgccgcaccggcccaaggagcccgcgtggttcctggccaccgtcggcgtctcgcccgaccaccagggcaagggtctgggcagcgccgtcgtgctccccggagtggaggcggccgagcgcgccggggtgcccgccttcctggagacctccgcgccccgcaacctccccttctacgagcggctcggcttcaccgtcaccgccgacgtcgaggtgcccgaaggaccgcgcacctggtgcatgacccgcaagcccggtgcctga

SEQ ID NO: 1853 - DNA, 3801 bp, Artificial Sequence
  Synthetic Polynucleotide
atggccttaccagtgaccgccttgctcctgccgctggccttgctgctccacgccgccaggccggaagtgcagctggttgaatctggcggaggactggttcaggctggcggatctctgagactgtcttgtgccgccagcggcagaacctttagcatgggctggtttagacaggcccctggcaaagagagagagttcgtcgccgccatcacatactctggcggcagcccttactacgccgactctgtgaagggcagattcaccatcagccgggacaacgccaagaacaccgtgtacctccagatgaacagcctgaagcctgaggacaccgccgtgtactactgcgccgccaatccaacatacggcagcgactggaacgccgagaattggggccagggaacccaagtgacagtgtctagcggtaccggcggaggcggatctggcggcggaggtagcggtggcggaggatctgaattcgacatccagatgacacagagccctagcagcctgtctgccagcgtgggagacagagtgaccatcacatgcaaggccagcgaccacatcaacaactggctggcctggtatcagcagaagcctggacaggcccctaagctgctgatctacggcgctaccacactggaaacaggcgtgcccagcagattttctggcagcggctctggcaccgactacaccctgacaatatccagcctccagcctgaggacttcgccacctactactgtcagcagagctggaacaccccttggacattcggccagggcaccaagctggaaatcaagagactcgagggacagcctaaggccaatcctaccgtgacactgttccctccaagcagcgaagaactccaggccaacaaggccacacttgtgtgcctgatctccgacttctaccctggggctgtgacagtggcttggaaggccgatggatctcctgtgaaagccggcgtggaaaccaccaagccatccaagcagagcaacaacaaatacgccgccagctcctacctgagcctgacacctgagcagtggaagtcccacagatcctacagctgccaagtgacccacgaaggcagcaccgtggaaaagacagtggcccctacagagtgcagcggatccatcggctggctgttgctccaggcccctcggtgggtgttcaaggaggaagaccctattcacctgaggtgtcacagctggaagaacactgctctgcataaggtcacatatttacagaatggcaaaggcaggaagtattttcatcataattctgacttctacattccaaaagccacactcaaagacagcggctcctacttctgcagggggcttgttgggagtaaaaatgtgtcttcagagactgtgaacatcaccatcactcaaggtttggcagtgtcaaccatctcatcattctttccacctggctaccaagtgtccttctgcctggtcatggtgctgctgttcgccgtggataccggcctgtacttcagcgtcaagaccaacatccggtccagcaccagagactggaaggaccacaagttcaagtggcggaaggaccctcaggacaagagggccaagcgatctggatctggagcaacaaacttctcactactcaaacaagcaggtgacgtggaggagaatcccgggcctactagtatggactggatttggcgcatccttttccttgtcggcgctgctaccggcgcgcattccgggcccgaagtgcaactggttgaatccggtggcggcctggtgcaagcaggcggatctctcagacttagctgtgccgcctccggcagaaccttcacaatgggatggtttaggcaggctccagggaaagagagagagttcgtcgccgccatctctctgtctcccacactggcctactacgccgactctgtgaaaggccggttcaccatctccagagataatgccaagaacaccgtggtgctgcaaatgaactctctgaaacccgaggatacagccctgtactattgtgccgctgaccggaagtccgtgatgagcatcagacccgattactggggacagggcacacaagtcacagtgtcctctggatccggcggcggaggatctggcggaggcggatctgggggcggaggctctttcgaacaagttcagcttcaacagcctggcgctgagctggtcaaacctggcgcttctgtgaagatgagctgcaaagccagcggctacgccttcagcagctactggatcaactggatgaagcagaaacccggccagggactcgaatggatcggccaaatctatcccggcgacggcgacaccaactacaacggcaagttcaagggcagagccacactgaccgccgatacctctagcagcacagcctacatgcagctgagcagcctgaccagcgaagatagcgccgtgtacttctgtgcccggtccatcacaacagtcgtgggctgcgctatggactattggggccagggaacaagcgtgaccgtgtctagtacgcgtgcctctacaaagggaccctccgtgtttcctctggctcccagcagcaagtctacaagcggaggaacagccgctctgggctgcctggtcaaggattactttcccgagcctgtgaccgtgtcctggaatagcggagcactgacaagcggcgtgcacacctttccagccgtgctgcaaagcagcggcctgtactctctgagcagcgtggtcacagtgcctagctctagcctgggcacccagacctacatctgcaatgtgaaccacaagcctagcaacaccaaggtggacaagagagtggaacccaagagctgtggtaccggcgatattgagaatacctctctggccccagaagatcctacattccccgccgacacatggggaacatatctgctgacaaccgaaaccgggctgcaaaaggaccatgctctgtgggatcataccgctcagaatctgcttcggatggggcttgcattcctggtcctggtggctcttgtctggtttctggtcgaggactggctgtcccggaagagaaccagagaaagagcttccagggccagcacctgggaaggcagacgcagactgaatactcagaccctgcgcgccaagagaagcggatctggcgtgaagcagaccctgaatttcgacctgctgaagctggctggcgacgtggaatccaacccaggcccttctagaggccatatgaccgagtacaagcccacggtgcgcctcgccacccgcgacgacgtccccagggccgtacgcaccctcgccgccgcgttcgccgactaccccgccacgcgccacaccgtcgatccggaccgccacatcgagcgggtcaccgagctgcaagaactcttcctcacgcgcgtcgggctcgacatcggcaaggtgtgggtcgcggacgacggcgccgcggtggcggtctggaccacgccggagagcgtcgaagcgggggcggtgttcgccgagatcggcccgcgcatggccgagttgagcggttcccggctggccgcgcagcaacagatggaaggcctcctggcgccgcaccggcccaaggagcccgcgtggttcctggccaccgtcggcgtctcgcccgaccaccagggcaagggtctgggcagcgccgtcgtgctccccggagtggaggcggccgagcgcgccggggtgcccgccttcctggagacctccgcgccccgcaacctccccttctacgagcggctcggcttcaccgtcaccgccgacgtcgaggtgcccgaaggaccgcgcacctggtgcatgacccgcaagcccggtgcctga

SEQ ID NO: 1854 - DNA, 3000 bp, Artificial Sequence
  Synthetic Polynucleotide
atggccttaccagtgaccgccttgctcctgccgctggccttgctgctccacgccgccaggccggaagtgcagctggttgaatctggcggaggactggttcaggctggcggatctctgagactgtcttgtgccgccagcggcagaacctttagcatgggctggtttagacaggcccctggcaaagagagagagttcgtcgccgccatcacatactctggcggcagcccttactacgccgactctgtgaagggcagattcaccatcagccgggacaacgccaagaacaccgtgtacctccagatgaacagcctgaagcctgaggacaccgccgtgtactactgcgccgccaatccaacatacggcagcgactggaacgccgagaattggggccagggaacccaagtgacagtgtctagcctcgagggacagcctaaggccaatcctaccgtgacactgttccctccaagcagcgaagaactccaggccaacaaggccacacttgtgtgcctgatctccgacttctaccctggggctgtgacagtggcttggaaggccgatggatctcctgtgaaagccggcgtggaaaccaccaagccatccaagcagagcaacaacaaatacgccgccagctcctacctgagcctgacacctgagcagtggaagtcccacagatcctacagctgccaagtgacccacgaaggcagcaccgtggaaaagacagtggcccctacagagtgcagcggatccatcggctggctgttgctccaggcccctcggtgggtgttcaaggaggaagaccctattcacctgaggtgtcacagctggaagaacactgctctgcataaggtcacatatttacagaatggcaaaggcaggaagtattttcatcataattctgacttctacattccaaaagccacactcaaagacagcggctcctacttctgcagggggcttgttgggagtaaaaatgtgtcttcagagactgtgaacatcaccatcactcaaggtttggcagtgtcaaccatctcatcattctttccacctggctaccaagtgtccttctgcctggtcatggtgctgctgttcgccgtggataccggcctgtacttcagcgtcaagaccaacatccggtccagcaccagagactggaaggaccacaagttcaagtggcggaaggaccctcaggacaagagggccaagcgatctggatctggagcaacaaacttctcactactcaaacaagcaggtgacgtggaggagaatcccgggcctactagtatggactggatttggcgcatccttttccttgtcggcgctgctaccggcgcgcattccgggcccgaagtgcaactggttgaatccggtggcggcctggtgcaagcaggcggatctctcagacttagctgtgccgcctccggcagaaccttcacaatgggatggtttaggcaggctccagggaaagagagagagttcgtcgccgccatctctctgtctcccacactggcctactacgccgactctgtgaaaggccggttcaccatctccagagataatgccaagaacaccgtggtgctgcaaatgaactctctgaaacccgaggatacagccctgtactattgtgccgctgaccggaagtccgtgatgagcatcagacccgattactggggacagggcacacaagtcacagtgtcctctacgcgtgcctctacaaagggaccctccgtgtttcctctggctcccagcagcaagtctacaagcggaggaacagccgctctgggctgcctggtcaaggattactttcccgagcctgtgaccgtgtcctggaatagcggagcactgacaagcggcgtgcacacctttccagccgtgctgcaaagcagcggcctgtactctctgagcagcgtggtcacagtgcctagctctagcctgggcacccagacctacatctgcaatgtgaaccacaagcctagcaacaccaaggtggacaagagagtggaacccaagagctgtggtaccggcgatattgagaatacctctctggccccagaagatcctacattccccgccgacacatggggaacatatctgctgacaaccgaaaccgggctgcaaaaggaccatgctctgtgggatcataccgctcagaatctgcttcggatggggcttgcattcctggtcctggtggctcttgtctggtttctggtcgaggactggctgtcccggaagagaaccagagaaagagcttccagggccagcacctgggaaggcagacgcagactgaatactcagaccctgcgcgccaagagaagcggatctggcgtgaagcagaccctgaatttcgacctgctgaagctggctggcgacgtggaatccaacccaggcccttctagaggccatatgaccgagtacaagcccacggtgcgcctcgccacccgcgacgacgtccccagggccgtacgcaccctcgccgccgcgttcgccgactaccccgccacgcgccacaccgtcgatccggaccgccacatcgagcgggtcaccgagctgcaagaactcttcctcacgcgcgtcgggctcgacatcggcaaggtgtgggtcgcggacgacggcgccgcggtggcggtctggaccacgccggagagcgtcgaagcgggggcggtgttcgccgagatcggcccgcgcatggccgagttgagcggttcccggctggccgcgcagcaacagatggaaggcctcctggcgccgcaccggcccaaggagcccgcgtggttcctggccaccgtcggcgtctcgcccgaccaccagggcaagggtctgggcagcgccgtcgtgctccccggagtggaggcggccgagcgcgccggggtgcccgccttcctggagacctccgcgccccgcaacctccccttctacgagcggctcggcttcaccgtcaccgccgacgtcgaggtgcccgaaggaccgcgcacctggtgcatgacccgcaagcccggtgcctga

SEQ ID NO: 1855 - DNA, 3024 bp, Artificial Sequence
  Synthetic Polynucleotide
atggccttaccagtgaccgccttgctcctgccgctggccttgctgctccacgccgccaggccggacatccagatgacacagagccctagcagcctgtctgccagcgtgggagacagagtgaccatcacatgcaaggccagcgaccacatcaacaactggctggcctggtatcagcagaagcctggacaggcccctaagctgctgatctacggcgctaccacactggaaacaggcgtgcccagcagattttctggcagcggctctggcaccgactacaccctgacaatatccagcctccagcctgaggacttcgccacctactactgtcagcagagctggaacaccccttggacattcggccagggcaccaagctggaaatcaagagactcgaggacctgaagaacgtgttcccacctgaggtggccgtgttcgagcctagcgaggccgagatcagccacacccagaaagccaccctcgtgtgcctggctaccggcttctaccccgaccatgtggaactgtcttggtgggtcaacggcaaagaggtgcacagcggcgtgtctaccgacccccagccactgaaagaacagcccgccctgaacgacagccggtactgcctgagcagcagactgagagtgtccgccaccttctggcagaacccccggaaccacttcagatgccaggtgcagttctacggcctgagcgagaacgacgagtggacccaggacagagccaagcccgtgacccagatcgtgtctgccgaagcctggggcagagccgattgcggatccatcggctggctgttgctccaggcccctcggtgggtgttcaaggaggaagaccctattcacctgaggtgtcacagctggaagaacactgctctgcataaggtcacatatttacagaatggcaaaggcaggaagtattttcatcataattctgacttctacattccaaaagccacactcaaagacagcggctcctacttctgcagggggcttgttgggagtaaaaatgtgtcttcagagactgtgaacatcaccatcactcaaggtttggcagtgtcaaccatctcatcattctttccacctggctaccaagtgtccttctgcctggtcatggtgctgctgttcgccgtggataccggcctgtacttcagcgtcaagaccaacatccggtccagcaccagagactggaaggaccacaagttcaagtggcggaaggaccctcaggacaagagggccaagcgatctggatctggagcaacaaacttctcactactcaaacaagcaggtgacgtggaggagaatcccgggcctactagtatggactggatttggcgcatccttttccttgtcggcgctgctaccggcgcgcattccttcgaacaagttcagcttcaacagcctggcgctgagctggtcaaacctggcgcttctgtgaagatgagctgcaaagccagcggctacgccttcagcagctactggatcaactggatgaagcagaaacccggccagggactcgaatggatcggccaaatctatcccggcgacggcgacaccaactacaacggcaagttcaagggcagagccacactgaccgccgatacctctagcagcacagcctacatgcagctgagcagcctgaccagcgaagatagcgccgtgtacttctgtgcccggtccatcacaacagtcgtgggctgcgctatggactattggggccagggaacaagcgtgaccgtgtctagtacgcgtatccagaaccctgatcctgccgtgtaccagctgcgggatagcaagagcagcgacaagagcgtgtgtctgttcaccgacttcgacagccagaccaacgtgtcccagagcaaggactccgacgtgtacatcaccgataagaccgtgctggacatgcggagcatggacttcaagagcaactccgccgtggcctggtccaacaagtccgatttcgcctgcgccaacgccttcaacaacagcattatccccgaggacacattcttcccaagccccgagagcagctgcggtaccggcgatattgagaatacctctctggccccagaagatcctacattccccgccgacacatggggaacatatctgctgacaaccgaaaccgggctgcaaaaggaccatgctctgtgggatcataccgctcagaatctgcttcggatggggcttgcattcctggtcctggtggctcttgtctggtttctggtcgaggactggctgtcccggaagagaaccagagaaagagcttccagggccagcacctgggaaggcagacgcagactgaatactcagaccctgcgcgccaagagaagcggatctggcgtgaagcagaccctgaatttcgacctgctgaagctggctggcgacgtggaatccaacccaggcccttctagaggccatatgaccgagtacaagcccacggtgcgcctcgccacccgcgacgacgtccccagggccgtacgcaccctcgccgccgcgttcgccgactaccccgccacgcgccacaccgtcgatccggaccgccacatcgagcgggtcaccgagctgcaagaactcttcctcacgcgcgtcgggctcgacatcggcaaggtgtgggtcgcggacgacggcgccgcggtggcggtctggaccacgccggagagcgtcgaagcgggggcggtgttcgccgagatcggcccgcgcatggccgagttgagcggttcccggctggccgcgcagcaacagatggaaggcctcctggcgccgcaccggcccaaggagcccgcgtggttcctggccaccgtcggcgtctcgcccgaccaccagggcaagggtctgggcagcgccgtcgtgctccccggagtggaggcggccgagcgcgccggggtgcccgccttcctggagacctccgcgccccgcaacctccccttctacgagcggctcggcttcaccgtcaccgccgacgtcgaggtgcccgaaggaccgcgcacctggtgcatgacccgcaagcccggtgcctga

SEQ ID NO: 1856 - DNA, 3435 bp, Artificial Sequence
  Synthetic Polynucleotide
atggccttaccagtgaccgccttgctcctgccgctggccttgctgctccacgccgccaggccggaagtgcagctggttgaatctggcggaggactggttcaggctggcggatctctgagactgtcttgtgccgccagcggcagaacctttagcatgggctggtttagacaggcccctggcaaagagagagagttcgtcgccgccatcacatactctggcggcagcccttactacgccgactctgtgaagggcagattcaccatcagccgggacaacgccaagaacaccgtgtacctccagatgaacagcctgaagcctgaggacaccgccgtgtactactgcgccgccaatccaacatacggcagcgactggaacgccgagaattggggccagggaacccaagtgacagtgtctagcggtaccggcggaggcggatctggcggcggaggtagcggtggcggaggatctgaattcgacatccagatgacacagagccctagcagcctgtctgccagcgtgggagacagagtgaccatcacatgcaaggccagcgaccacatcaacaactggctggcctggtatcagcagaagcctggacaggcccctaagctgctgatctacggcgctaccacactggaaacaggcgtgcccagcagattttctggcagcggctctggcaccgactacaccctgacaatatccagcctccagcctgaggacttcgccacctactactgtcagcagagctggaacaccccttggacattcggccagggcaccaagctggaaatcaagagactcgaggacctgaagaacgtgttcccacctgaggtggccgtgttcgagcctagcgaggccgagatcagccacacccagaaagccaccctcgtgtgcctggctaccggcttctaccccgaccatgtggaactgtcttggtgggtcaacggcaaagaggtgcacagcggcgtgtctaccgacccccagccactgaaagaacagcccgccctgaacgacagccggtactgcctgagcagcagactgagagtgtccgccaccttctggcagaacccccggaaccacttcagatgccaggtgcagttctacggcctgagcgagaacgacgagtggacccaggacagagccaagcccgtgacccagatcgtgtctgccgaagcctggggcagagccgattgcggatccatcggctggctgttgctccaggcccctcggtgggtgttcaaggaggaagaccctattcacctgaggtgtcacagctggaagaacactgctctgcataaggtcacatatttacagaatggcaaaggcaggaagtattttcatcataattctgacttctacattccaaaagccacactcaaagacagcggctcctacttctgcagggggcttgttgggagtaaaaatgtgtcttcagagactgtgaacatcaccatcactcaaggtttggcagtgtcaaccatctcatcattctttccacctggctaccaagtgtccttctgcctggtcatggtgctgctgttcgccgtggataccggcctgtacttcagcgtcaagaccaacatccggtccagcaccagagactggaaggaccacaagttcaagtggcggaaggaccctcaggacaagagggccaagcgatctggatctggagcaacaaacttctcactactcaaacaagcaggtgacgtggaggagaatcccgggcctactagtatggactggatttggcgcatccttttccttgtcggcgctgctaccggcgcgcattccttcgaacaagttcagcttcaacagcctggcgctgagctggtcaaacctggcgcttctgtgaagatgagctgcaaagccagcggctacgccttcagcagctactggatcaactggatgaagcagaaacccggccagggactcgaatggatcggccaaatctatcccggcgacggcgacaccaactacaacggcaagttcaagggcagagccacactgaccgccgatacctctagcagcacagcctacatgcagctgagcagcctgaccagcgaagatagcgccgtgtacttctgtgcccggtccatcacaacagtcgtgggctgcgctatggactattggggccagggaacaagcgtgaccgtgtctagtacgcgtatccagaaccctgatcctgccgtgtaccagctgcgggatagcaagagcagcgacaagagcgtgtgtctgttcaccgacttcgacagccagaccaacgtgtcccagagcaaggactccgacgtgtacatcaccgataagaccgtgctggacatgcggagcatggacttcaagagcaactccgccgtggcctggtccaacaagtccgatttcgcctgcgccaacgccttcaacaacagcattatccccgaggacacattcttcccaagccccgagagcagctgcggtaccggcgatattgagaatacctctctggccccagaagatcctacattccccgccgacacatggggaacatatctgctgacaaccgaaaccgggctgcaaaaggaccatgctctgtgggatcataccgctcagaatctgcttcggatggggcttgcattcctggtcctggtggctcttgtctggtttctggtcgaggactggctgtcccggaagagaaccagagaaagagcttccagggccagcacctgggaaggcagacgcagactgaatactcagaccctgcgcgccaagagaagcggatctggcgtgaagcagaccctgaatttcgacctgctgaagctggctggcgacgtggaatccaacccaggcccttctagaggccatatgaccgagtacaagcccacggtgcgcctcgccacccgcgacgacgtccccagggccgtacgcaccctcgccgccgcgttcgccgactaccccgccacgcgccacaccgtcgatccggaccgccacatcgagcgggtcaccgagctgcaagaactcttcctcacgcgcgtcgggctcgacatcggcaaggtgtgggtcgcggacgacggcgccgcggtggcggtctggaccacgccggagagcgtcgaagcgggggcggtgttcgccgagatcggcccgcgcatggccgagttgagcggttcccggctggccgcgcagcaacagatggaaggcctcctggcgccgcaccggcccaaggagcccgcgtggttcctggccaccgtcggcgtctcgcccgaccaccagggcaagggtctgggcagcgccgtcgtgctccccggagtggaggcggccgagcgcgccggggtgcccgccttcctggagacctccgcgccccgcaacctccccttctacgagcggctcggcttcaccgtcaccgccgacgtcgaggtgcccgaaggaccgcgcacctggtgcatgacccgcaagcccggtgcctga

SEQ ID NO: 1857 - DNA, 3846 bp, Artificial Sequence
  Synthetic Polynucleotide
atggccttaccagtgaccgccttgctcctgccgctggccttgctgctccacgccgccaggccggaagtgcagctggttgaatctggcggaggactggttcaggctggcggatctctgagactgtcttgtgccgccagcggcagaacctttagcatgggctggtttagacaggcccctggcaaagagagagagttcgtcgccgccatcacatactctggcggcagcccttactacgccgactctgtgaagggcagattcaccatcagccgggacaacgccaagaacaccgtgtacctccagatgaacagcctgaagcctgaggacaccgccgtgtactactgcgccgccaatccaacatacggcagcgactggaacgccgagaattggggccagggaacccaagtgacagtgtctagcggtaccggcggaggcggatctggcggcggaggtagcggtggcggaggatctgaattcgacatccagatgacacagagccctagcagcctgtctgccagcgtgggagacagagtgaccatcacatgcaaggccagcgaccacatcaacaactggctggcctggtatcagcagaagcctggacaggcccctaagctgctgatctacggcgctaccacactggaaacaggcgtgcccagcagattttctggcagcggctctggcaccgactacaccctgacaatatccagcctccagcctgaggacttcgccacctactactgtcagcagagctggaacaccccttggacattcggccagggcaccaagctggaaatcaagagactcgaggacctgaagaacgtgttcccacctgaggtggccgtgttcgagcctagcgaggccgagatcagccacacccagaaagccaccctcgtgtgcctggctaccggcttctaccccgaccatgtggaactgtcttggtgggtcaacggcaaagaggtgcacagcggcgtgtctaccgacccccagccactgaaagaacagcccgccctgaacgacagccggtactgcctgagcagcagactgagagtgtccgccaccttctggcagaacccccggaaccacttcagatgccaggtgcagttctacggcctgagcgagaacgacgagtggacccaggacagagccaagcccgtgacccagatcgtgtctgccgaagcctggggcagagccgattgcggatccatcggctggctgttgctccaggcccctcggtgggtgttcaaggaggaagaccctattcacctgaggtgtcacagctggaagaacactgctctgcataaggtcacatatttacagaatggcaaaggcaggaagtattttcatcataattctgacttctacattccaaaagccacactcaaagacagcggctcctacttctgcagggggcttgttgggagtaaaaatgtgtcttcagagactgtgaacatcaccatcactcaaggtttggcagtgtcaaccatctcatcattctttccacctggctaccaagtgtccttctgcctggtcatggtgctgctgttcgccgtggataccggcctgtacttcagcgtcaagaccaacatccggtccagcaccagagactggaaggaccacaagttcaagtggcggaaggaccctcaggacaagagggccaagcgatctggatctggagcaacaaacttctcactactcaaacaagcaggtgacgtggaggagaatcccgggcctactagtatggactggatttggcgcatccttttccttgtcggcgctgctaccggcgcgcattccgggcccgaagtgcaactggttgaatccggtggcggcctggtgcaagcaggcggatctctcagacttagctgtgccgcctccggcagaaccttcacaatgggatggtttaggcaggctccagggaaagagagagagttcgtcgccgccatctctctgtctcccacactggcctactacgccgactctgtgaaaggccggttcaccatctccagagataatgccaagaacaccgtggtgctgcaaatgaactctctgaaacccgaggatacagccctgtactattgtgccgctgaccggaagtccgtgatgagcatcagacccgattactggggacagggcacacaagtcacagtgtcctctggatccggcggcggaggatctggcggaggcggatctgggggcggaggctctttcgaacaagttcagcttcaacagcctggcgctgagctggtcaaacctggcgcttctgtgaagatgagctgcaaagccagcggctacgccttcagcagctactggatcaactggatgaagcagaaacccggccagggactcgaatggatcggccaaatctatcccggcgacggcgacaccaactacaacggcaagttcaagggcagagccacactgaccgccgatacctctagcagcacagcctacatgcagctgagcagcctgaccagcgaagatagcgccgtgtacttctgtgcccggtccatcacaacagtcgtgggctgcgctatggactattggggccagggaacaagcgtgaccgtgtctagtacgcgtatccagaaccctgatcctgccgtgtaccagctgcgggatagcaagagcagcgacaagagcgtgtgtctgttcaccgacttcgacagccagaccaacgtgtcccagagcaaggactccgacgtgtacatcaccgataagaccgtgctggacatgcggagcatggacttcaagagcaactccgccgtggcctggtccaacaagtccgatttcgcctgcgccaacgccttcaacaacagcattatccccgaggacacattcttcccaagccccgagagcagctgcggtaccggcgatattgagaatacctctctggccccagaagatcctacattccccgccgacacatggggaacatatctgctgacaaccgaaaccgggctgcaaaaggaccatgctctgtgggatcataccgctcagaatctgcttcggatggggcttgcattcctggtcctggtggctcttgtctggtttctggtcgaggactggctgtcccggaagagaaccagagaaagagcttccagggccagcacctgggaaggcagacgcagactgaatactcagaccctgcgcgccaagagaagcggatctggcgtgaagcagaccctgaatttcgacctgctgaagctggctggcgacgtggaatccaacccaggcccttctagaggccatatgaccgagtacaagcccacggtgcgcctcgccacccgcgacgacgtccccagggccgtacgcaccctcgccgccgcgttcgccgactaccccgccacgcgccacaccgtcgatccggaccgccacatcgagcgggtcaccgagctgcaagaactcttcctcacgcgcgtcgggctcgacatcggcaaggtgtgggtcgcggacgacggcgccgcggtggcggtctggaccacgccggagagcgtcgaagcgggggcggtgttcgccgagatcggcccgcgcatggccgagttgagcggttcccggctggccgcgcagcaacagatggaaggcctcctggcgccgcaccggcccaaggagcccgcgtggttcctggccaccgtcggcgtctcgcccgaccaccagggcaagggtctgggcagcgccgtcgtgctccccggagtggaggcggccgagcgcgccggggtgcccgccttcctggagacctccgcgccccgcaacctccccttctacgagcggctcggcttcaccgtcaccgccgacgtcgaggtgcccgaaggaccgcgcacctggtgcatgacccgcaagcccggtgcctga

SEQ ID NO: 1858 - DNA, 3045 bp, Artificial Sequence
  Synthetic Polynucleotide
atggccttaccagtgaccgccttgctcctgccgctggccttgctgctccacgccgccaggccggaagtgcagctggttgaatctggcggaggactggttcaggctggcggatctctgagactgtcttgtgccgccagcggcagaacctttagcatgggctggtttagacaggcccctggcaaagagagagagttcgtcgccgccatcacatactctggcggcagcccttactacgccgactctgtgaagggcagattcaccatcagccgggacaacgccaagaacaccgtgtacctccagatgaacagcctgaagcctgaggacaccgccgtgtactactgcgccgccaatccaacatacggcagcgactggaacgccgagaattggggccagggaacccaagtgacagtgtctagcctcgaggacctgaagaacgtgttcccacctgaggtggccgtgttcgagcctagcgaggccgagatcagccacacccagaaagccaccctcgtgtgcctggctaccggcttctaccccgaccatgtggaactgtcttggtgggtcaacggcaaagaggtgcacagcggcgtgtctaccgacccccagccactgaaagaacagcccgccctgaacgacagccggtactgcctgagcagcagactgagagtgtccgccaccttctggcagaacccccggaaccacttcagatgccaggtgcagttctacggcctgagcgagaacgacgagtggacccaggacagagccaagcccgtgacccagatcgtgtctgccgaagcctggggcagagccgattgcggatccatcggctggctgttgctccaggcccctcggtgggtgttcaaggaggaagaccctattcacctgaggtgtcacagctggaagaacactgctctgcataaggtcacatatttacagaatggcaaaggcaggaagtattttcatcataattctgacttctacattccaaaagccacactcaaagacagcggctcctacttctgcagggggcttgttgggagtaaaaatgtgtcttcagagactgtgaacatcaccatcactcaaggtttggcagtgtcaaccatctcatcattctttccacctggctaccaagtgtccttctgcctggtcatggtgctgctgttcgccgtggataccggcctgtacttcagcgtcaagaccaacatccggtccagcaccagagactggaaggaccacaagttcaagtggcggaaggaccctcaggacaagagggccaagcgatctggatctggagcaacaaacttctcactactcaaacaagcaggtgacgtggaggagaatcccgggcctactagtatggactggatttggcgcatccttttccttgtcggcgctgctaccggcgcgcattccgggcccgaagtgcaactggttgaatccggtggcggcctggtgcaagcaggcggatctctcagacttagctgtgccgcctccggcagaaccttcacaatgggatggtttaggcaggctccagggaaagagagagagttcgtcgccgccatctctctgtctcccacactggcctactacgccgactctgtgaaaggccggttcaccatctccagagataatgccaagaacaccgtggtgctgcaaatgaactctctgaaacccgaggatacagccctgtactattgtgccgctgaccggaagtccgtgatgagcatcagacccgattactggggacagggcacacaagtcacagtgtcctctacgcgtatccagaaccctgatcctgccgtgtaccagctgcgggatagcaagagcagcgacaagagcgtgtgtctgttcaccgacttcgacagccagaccaacgtgtcccagagcaaggactccgacgtgtacatcaccgataagaccgtgctggacatgcggagcatggacttcaagagcaactccgccgtggcctggtccaacaagtccgatttcgcctgcgccaacgccttcaacaacagcattatccccgaggacacattcttcccaagccccgagagcagctgcggtaccggcgatattgagaatacctctctggccccagaagatcctacattccccgccgacacatggggaacatatctgctgacaaccgaaaccgggctgcaaaaggaccatgctctgtgggatcataccgctcagaatctgcttcggatggggcttgcattcctggtcctggtggctcttgtctggtttctggtcgaggactggctgtcccggaagagaaccagagaaagagcttccagggccagcacctgggaaggcagacgcagactgaatactcagaccctgcgcgccaagagaagcggatctggcgtgaagcagaccctgaatttcgacctgctgaagctggctggcgacgtggaatccaacccaggcccttctagaggccatatgaccgagtacaagcccacggtgcgcctcgccacccgcgacgacgtccccagggccgtacgcaccctcgccgccgcgttcgccgactaccccgccacgcgccacaccgtcgatccggaccgccacatcgagcgggtcaccgagctgcaagaactcttcctcacgcgcgtcgggctcgacatcggcaaggtgtgggtcgcggacgacggcgccgcggtggcggtctggaccacgccggagagcgtcgaagcgggggcggtgttcgccgagatcggcccgcgcatggccgagttgagcggttcccggctggccgcgcagcaacagatggaaggcctcctggcgccgcaccggcccaaggagcccgcgtggttcctggccaccgtcggcgtctcgcccgaccaccagggcaagggtctgggcagcgccgtcgtgctccccggagtggaggcggccgagcgcgccggggtgcccgccttcctggagacctccgcgccccgcaacctccccttctacgagcggctcggcttcaccgtcaccgccgacgtcgaggtgcccgaaggaccgcgcacctggtgcatgacccgcaagcccggtgcctga

SEQ ID NO: 1859 - DNA, 1635 bp, Artificial Sequence; identical to SEQ ID NO: 1664
  Synthetic Polynucleotide

SEQ ID NO: 1860 - DNA, 2172 bp, Artificial Sequence
  Synthetic Polynucleotide
atggccttaccagtgaccgccttgctcctgccgctggccttgctgctccacgccgccaggccggacatccagatgacacagagccctagcagcctgtctgccagcgtgggagacagagtgaccatcacatgcaaggccagcgaccacatcaacaactggctggcctggtatcagcagaagcctggacaggcccctaagctgctgatctacggcgctaccacactggaaacaggcgtgcccagcagattttctggcagcggctctggcaccgactacaccctgacaatatccagcctccagcctgaggacttcgccacctactactgtcagcagagctggaacaccccttggacattcggccagggcaccaagctggaaatcaagagactcgagggcgacatcgagaacaccagtctggcccctgaggaccctacctttcctgccgatacctggggcacctacctgctgaccacagagacaggactccagaaagatcacgccctgtgggaccacacagcccagaacctgctgagaatgggcctcgcctttctggtgctggttgccctcgtgtggttcctggtggaagattggctgagccggaagcggacaagagagagagccagcagagcctctacctgggagggaagaagaaggctgaacacccagacacttagggccaagcgatctggatctggagcaacaaacttctcactactcaaacaagcaggtgacgtggaggagaatcccgggcctactagtatggactggatttggcgcatccttttccttgtcggcgctgctaccggcgcgcattccttcgaacaagttcagcttcaacagcctggcgctgagctggtcaaacctggcgcttctgtgaagatgagctgcaaagccagcggctacgccttcagcagctactggatcaactggatgaagcagaaacccggccagggactcgaatggatcggccaaatctatcccggcgacggcgacaccaactacaacggcaagttcaagggcagagccacactgaccgccgatacctctagcagcacagcctacatgcagctgagcagcctgaccagcgaagatagcgccgtgtacttctgtgcccggtccatcacaacagtcgtgggctgcgctatggactattggggccagggaacaagcgtgaccgtgtctagtacgcgtggcgatattgagaatacctctctggccccagaagatcctacattccccgccgacacatggggaacatatctgctgacaaccgaaaccgggctgcaaaaggaccatgctctgtgggatcataccgctcagaatctgcttcggatggggcttgcattcctggtcctggtggctcttgtctggtttctggtcgaggactggctgtcccggaagagaaccagagaaagagcttccagggccagcacctgggaaggcagacgcagactgaatactcagaccctgcgcgccaagagaagcggatctggcgtgaagcagaccctgaatttcgacctgctgaagctggctggcgacgtggaatccaacccaggcccttctagaggccatatgaccgagtacaagcccacggtgcgcctcgccacccgcgacgacgtccccagggccgtacgcaccctcgccgccgcgttcgccgactaccccgccacgcgccacaccgtcgatccggaccgccacatcgagcgggtcaccgagctgcaagaactcttcctcacgcgcgtcgggctcgacatcggcaaggtgtgggtcgcggacgacggcgccgcggtggcggtctggaccacgccggagagcgtcgaagcgggggcggtgttcgccgagatcggcccgcgcatggccgagttgagcggttcccggctggccgcgcagcaacagatggaaggcctcctggcgccgcaccggcccaaggagcccgcgtggttcctggccaccgtcggcgtctcgcccgaccaccagggcaagggtctgggcagcgccgtcgtgctccccggagtggaggcggccgagcgcgccggggtgcccgccttcctggagacctccgcgccccgcaacctccccttctacgagcggctcggcttcaccgtcaccgccgacgtcgaggtgcccgaaggaccgcgcacctggtgcatgacccgcaagcccggtgcctga

SEQ ID NO: 1861 - DNA, 2334 bp, Artificial Sequence
  Synthetic Polynucleotide
atggccttaccagtgaccgccttgctcctgccgctggccttgctgctccacgccgccaggccggcatgcgaagtgcagctgcttgaaagtggcggcggactgattcagcctggcggatctctgagactgagctgtgccgccagcggcttcaccttttctagccacgccatgacctgggtccgacaggcacctggaaaagggcttgaatgggtgtccgccatcagcggctctggcgattacacacactacgccgacagcgtgaagggcagattcaccatcagcagagacaacagcaagaacaccgtgtacctccagatgaacagcctgagagccgaggacagcgccgtgtattattgcgccaaggatgaggatggcggcagcctgcttggacacagaggacaaggcaccctggtcaccgtttcttccggtaccggcggaggcggatctggcggcggaggtagcggtggcggaggatctgaattcggatctctcgagggcgacatcgagaacaccagtctggcccctgaggaccctacctttcctgccgatacctggggcacctacctgctgaccacagagacaggactccagaaagatcacgccctgtgggaccacacagcccagaacctgctgagaatgggcctcgcctttctggtgctggttgccctcgtgtggttcctggtggaagattggctgagccggaagcggacaagagagagagccagcagagcctctacctgggagggaagaagaaggctgaacacccagacacttagggccaagcgatctggatctggagcaacaaacttctcactactcaaacaagcaggtgacgtggaggagaatcccgggcctactagtgccaccatggactggatttggcgcatccttttccttgtcggcgctgctaccggcgcccattccgggcccgaagtgcagctggttgaatctggcggaggactggttcaggctggcggatctctgagactgtcttgtgccgccagcggcagaacctttagcatgggctggtttagacaggcccctggcaaagagagagagttcgtcgccgccatcacatactctggcggcagcccttactacgccgactctgtgaagggcagattcaccatcagccgggacaacgccaagaacaccgtgtacctccagatgaacagcctgaagcctgaggacaccgccgtgtactactgcgccgccaatccaacatacggcagcgactggaacgccgagaattggggccagggaacccaagtgacagtgtctagcggatccggcggcggaggatctggcggaggcggatctgggggcggaggctctttcgaaggcagcacgcgtggcgatattgagaatacctctctggccccagaagatcctacattccccgccgacacatggggaacatatctgctgacaaccgaaaccgggctgcaaaaggaccatgctctgtgggatcataccgctcagaatctgcttcggatggggcttgcattcctggtcctggtggctcttgtctggtttctggtcgaggactggctgtcccggaagagaaccagagaaagagcttccagggccagcacctgggaaggcagacgcagactgaatactcagaccctgcgcgccaagagaagcggatctggcgtgaagcagaccctgaatttcgacctgctgaagctggctggcgacgtggaatccaacccaggcccttctagaggccatatgaccgagtacaagcccacggtgcgcctcgccacccgcgacgacgtccccagggccgtacgcaccctcgccgccgcgttcgccgactaccccgccacgcgccacaccgtcgatccggaccgccacatcgagcgggtcaccgagctgcaagaactcttcctcacgcgcgtcgggctcgacatcggcaaggtgtgggtcgcggacgacggcgccgcggtggcggtctggaccacgccggagagcgtcgaagcgggggcggtgttcgccgagatcggcccgcgcatggccgagttgagcggttcccggctggccgcgcagcaacagatggaaggcctcctggcgccgcaccggcccaaggagcccgcgtggttcctggccaccgtcggcgtctcgcccgaccaccagggcaagggtctgggcagcgccgtcgtgctccccggagtggaggcggccgagcgcgccggggtgcccgccttcctggagacctccgcgccccgcaacctccccttctacgagcggctcggcttcaccgtcaccgccgacgtcgaggtgcccgaaggaccgcgcacctggtgcatgacccgcaagcccggtgcctga

SEQ ID NO: 1862 - DNA, 2784 bp, Artificial Sequence
  Synthetic Polynucleotide
atggccttaccagtgaccgccttgctcctgccgctggccttgctgctccacgccgccaggccggacatccagatgacacagagccctagcagcctgtctgccagcgtgggagacagagtgaccatcacatgcaaggccagcgaccacatcaacaactggctggcctggtatcagcagaagcctggacaggcccctaagctgctgatctacggcgctaccacactggaaacaggcgtgcccagcagattttctggcagcggctctggcaccgactacaccctgacaatatccagcctccagcctgaggacttcgccacctactactgtcagcagagctggaacaccccttggacattcggccagggcaccaagctggaaatcaagagactcgagggacagcctaaggccaatcctaccgtgacactgttccctccaagcagcgaagaactccaggccaacaaggccacacttgtgtgcctgatctccgacttctaccctggggctgtgacagtggcttggaaggccgatggatctcctgtgaaagccggcgtggaaaccaccaagccatccaagcagagcaacaacaaatacgccgccagctcctacctgagcctgacacctgagcagtggaagtcccacagatcctacagctgccaagtgacccacgaaggcagcaccgtggaaaagacagtggcccctacagagtgcagcggatccggcgacatcgagaacaccagtctggcccctgaggaccctacctttcctgccgatacctggggcacctacctgctgaccacagagacaggactccagaaagatcacgccctgtgggaccacacagcccagaacctgctgagaatgggcctcgcctttctggtgctggttgccctcgtgtggttcctggtggaagattggctgagccggaagcggacaagagagagagccagcagagcctctacctgggagggaagaagaaggctgaacacccagacacttagggccaagcgatctggatctggagcaacaaacttctcactactcaaacaagcaggtgacgtggaggagaatcccgggcctactagtatggactggatttggcgcatccttttccttgtcggcgctgctaccggcgcgcattccttcgaacaagttcagcttcaacagcctggcgctgagctggtcaaacctggcgcttctgtgaagatgagctgcaaagccagcggctacgccttcagcagctactggatcaactggatgaagcagaaacccggccagggactcgaatggatcggccaaatctatcccggcgacggcgacaccaactacaacggcaagttcaagggcagagccacactgaccgccgatacctctagcagcacagcctacatgcagctgagcagcctgaccagcgaagatagcgccgtgtacttctgtgcccggtccatcacaacagtcgtgggctgcgctatggactattggggccagggaacaagcgtgaccgtgtctagtacgcgtgcctctacaaagggaccctccgtgtttcctctggctcccagcagcaagtctacaagcggaggaacagccgctctgggctgcctggtcaaggattactttcccgagcctgtgaccgtgtcctggaatagcggagcactgacaagcggcgtgcacacctttccagccgtgctgcaaagcagcggcctgtactctctgagcagcgtggtcacagtgcctagctctagcctgggcacccagacctacatctgcaatgtgaaccacaagcctagcaacaccaaggtggacaagagagtggaacccaagagctgtggtaccggcgatattgagaatacctctctggccccagaagatcctacattccccgccgacacatggggaacatatctgctgacaaccgaaaccgggctgcaaaaggaccatgctctgtgggatcataccgctcagaatctgcttcggatggggcttgcattcctggtcctggtggctcttgtctggtttctggtcgaggactggctgtcccggaagagaaccagagaaagagcttccagggccagcacctgggaaggcagacgcagactgaatactcagaccctgcgcgccaagagaagcggatctggcgtgaagcagaccctgaatttcgacctgctgaagctggctggcgacgtggaatccaacccaggcccttctagaggcgggatccacaccatggctacctacgaggtgctgtgcgaggtggcaagaaagctgggcaccgacgacagagaagtggtgctgttcctgctgaacgtgttcatccctcagcctacactggcccagctgatcggtgcactgagagccctgaaagaggaaggccggctgacctttcctctgctggccgaatgcctgttcagagccggaagaagggatctgctgcgggacctgctgcatctggaccccagatttctggaaagacacctggccggcaccatgagctacttcagcccttaccagctgaccgtgctgcacgttgacggcgaactgtgcgccagagatattcggagcctgatcttcctgagcaaggacaccatcggcagccggtctacccctcagacatttctgcactgggtgtactgcatggaaaacctggacctgctcggccccacagatgtggatgccctgatgtccatgctgagaagcctgagcagagtggacctccagagacaggtgcagacactgatgggactgcacctgagcggacctagccacagccagcactacagacacacccct

SEQ ID NO: 1863 - DNA, 2943 bp, Artificial Sequence
  Synthetic Polynucleotide
atggccttaccagtgaccgccttgctcctgccgctggccttgctgctccacgccgccaggccggacatccagatgacacagagccctagcagcctgtctgccagcgtgggagacagagtgaccatcacatgcaaggccagcgaccacatcaacaactggctggcctggtatcagcagaagcctggacaggcccctaagctgctgatctacggcgctaccacactggaaacaggcgtgcccagcagattttctggcagcggctctggcaccgactacaccctgacaatatccagcctccagcctgaggacttcgccacctactactgtcagcagagctggaacaccccttggacattcggccagggcaccaagctggaaatcaagagactcgagggacagcctaaggccaatcctaccgtgacactgttccctccaagcagcgaagaactccaggccaacaaggccacacttgtgtgcctgatctccgacttctaccctggggctgtgacagtggcttggaaggccgatggatctcctgtgaaagccggcgtggaaaccaccaagccatccaagcagagcaacaacaaatacgccgccagctcctacctgagcctgacacctgagcagtggaagtcccacagatcctacagctgccaagtgacccacgaaggcagcaccgtggaaaagacagtggcccctacagagtgcagcggatccggcgacatcgagaacaccagtctggcccctgaggaccctacctttcctgccgatacctggggcacctacctgctgaccacagagacaggactccagaaagatcacgccctgtgggaccacacagcccagaacctgctgagaatgggcctcgcctttctggtgctggttgccctcgtgtggttcctggtggaagattggctgagccggaagcggacaagagagagagccagcagagcctctacctgggagggaagaagaaggctgaacacccagacacttagggccaagcgatctggatctggagcaacaaacttctcactactcaaacaagcaggtgacgtggaggagaatcccgggcctactagtatggactggatttggcgcatccttttccttgtcggcgctgctaccggcgcgcattccttcgaacaagttcagcttcaacagcctggcgctgagctggtcaaacctggcgcttctgtgaagatgagctgcaaagccagcggctacgccttcagcagctactggatcaactggatgaagcagaaacccggccagggactcgaatggatcggccaaatctatcccggcgacggcgacaccaactacaacggcaagttcaagggcagagccacactgaccgccgatacctctagcagcacagcctacatgcagctgagcagcctgaccagcgaagatagcgccgtgtacttctgtgcccggtccatcacaacagtcgtgggctgcgctatggactattggggccagggaacaagcgtgaccgtgtctagtacgcgtgcctctacaaagggaccctccgtgtttcctctggctcccagcagcaagtctacaagcggaggaacagccgctctgggctgcctggtcaaggattactttcccgagcctgtgaccgtgtcctggaatagcggagcactgacaagcggcgtgcacacctttccagccgtgctgcaaagcagcggcctgtactctctgagcagcgtggtcacagtgcctagctctagcctgggcacccagacctacatctgcaatgtgaaccacaagcctagcaacaccaaggtggacaagagagtggaacccaagagctgtggtaccggcgatattgagaatacctctctggccccagaagatcctacattccccgccgacacatggggaacatatctgctgacaaccgaaaccgggctgcaaaaggaccatgctctgtgggatcataccgctcagaatctgcttcggatggggcttgcattcctggtcctggtggctcttgtctggtttctggtcgaggactggctgtcccggaagagaaccagagaaagagcttccagggccagcacctgggaaggcagacgcagactgaatactcagaccctgcgcgccaagagaagcggatctggcgtgaagcagaccctgaatttcgacctgctgaagctggctggcgacgtggaatccaacccaggcccttctagaggcgggatccacaccatgtccgactccaaggaggtccctagccttccatttttgcgacacttgctcgaagagttggacagccatgaggacagcttgctgctgtttctgtgtcacgacgcggccccgggctgcacgacggtcacgcaagctttgtgctcgcttagccaacagcgcaagctgaccctcgcggctctggtcgagatgctctacgtgctgcagcgtatggatcttctcaagagccgcttcgggctcagcaaggagggggccgagcaattgctgggcacaagctttctcacgcgctaccgcaagctcatggtttgcgtgggtgaggagctcgactcgagcgagctacgcgctctacgcttgttcgcgtgcaacctgaatccgagcctgagcacggcgctttctgagagcagccgctttgtcgagcttgtactcgcgcttgaaaacgtaggactcgtctcgccatcgagtgtttccgtgcttgcggacatgttgcgcactcttcggcgcctcgatttgtgccagcagcttgttgagtacgaacaacaagagcaagccaggtaccgttactgttacgcggcctcgccctcattgccagttcgtacgttacgtcgggggcacggcgcgagtgaacacgagcagctgtgcatgcccgtgcaagaatcctctgacagccccgagctgctgcgcacgcccgtacaagaatcctccagcgacagccccgagcaaacgact

SEQ ID NO: 1864 - DNA, 2811 bp, Artificial Sequence
  Synthetic Polynucleotide
atggccttaccagtgaccgccttgctcctgccgctggccttgctgctccacgccgccaggccggacatccagatgacacagagccctagcagcctgtctgccagcgtgggagacagagtgaccatcacatgcaaggccagcgaccacatcaacaactggctggcctggtatcagcagaagcctggacaggcccctaagctgctgatctacggcgctaccacactggaaacaggcgtgcccagcagattttctggcagcggctctggcaccgactacaccctgacaatatccagcctccagcctgaggacttcgccacctactactgtcagcagagctggaacaccccttggacattcggccagggcaccaagctggaaatcaagagactcgagggacagcctaaggccaatcctaccgtgacactgttccctccaagcagcgaagaactccaggccaacaaggccacacttgtgtgcctgatctccgacttctaccctggggctgtgacagtggcttggaaggccgatggatctcctgtgaaagccggcgtggaaaccaccaagccatccaagcagagcaacaacaaatacgccgccagctcctacctgagcctgacacctgagcagtggaagtcccacagatcctacagctgccaagtgacccacgaaggcagcaccgtggaaaagacagtggcccctacagagtgcagcggatccggcgacatcgagaacaccagtctggcccctgaggaccctacctttcctgccgatacctggggcacctacctgctgaccacagagacaggactccagaaagatcacgccctgtgggaccacacagcccagaacctgctgagaatgggcctcgcctttctggtgctggttgccctcgtgtggttcctggtggaagattggctgagccggaagcggacaagagagagagccagcagagcctctacctgggagggaagaagaaggctgaacacccagacacttagggccaagcgatctggatctggagcaacaaacttctcactactcaaacaagcaggtgacgtggaggagaatcccgggcctactagtatggactggatttggcgcatccttttccttgtcggcgctgctaccggcgcgcattccttcgaacaagttcagcttcaacagcctggcgctgagctggtcaaacctggcgcttctgtgaagatgagctgcaaagccagcggctacgccttcagcagctactggatcaactggatgaagcagaaacccggccagggactcgaatggatcggccaaatctatcccggcgacggcgacaccaactacaacggcaagttcaagggcagagccacactgaccgccgatacctctagcagcacagcctacatgcagctgagcagcctgaccagcgaagatagcgccgtgtacttctgtgcccggtccatcacaacagtcgtgggctgcgctatggactattggggccagggaacaagcgtgaccgtgtctagtacgcgtgcctctacaaagggaccctccgtgtttcctctggctcccagcagcaagtctacaagcggaggaacagccgctctgggctgcctggtcaaggattactttcccgagcctgtgaccgtgtcctggaatagcggagcactgacaagcggcgtgcacacctttccagccgtgctgcaaagcagcggcctgtactctctgagcagcgtggtcacagtgcctagctctagcctgggcacccagacctacatctgcaatgtgaaccacaagcctagcaacaccaaggtggacaagagagtggaacccaagagctgtggtaccggcgatattgagaatacctctctggccccagaagatcctacattccccgccgacacatggggaacatatctgctgacaaccgaaaccgggctgcaaaaggaccatgctctgtgggatcataccgctcagaatctgcttcggatggggcttgcattcctggtcctggtggctcttgtctggtttctggtcgaggactggctgtcccggaagagaaccagagaaagagcttccagggccagcacctgggaaggcagacgcagactgaatactcagaccctgcgcgccaagagaagcggatctggcgtgaagcagaccctgaatttcgacctgctgaagctggctggcgacgtggaatccaacccaggcccttctagaggccatatgaccgagtacaagcccacggtgcgcctcgccacccgcgacgacgtccccagggccgtacgcaccctcgccgccgcgttcgccgactaccccgccacgcgccacaccgtcgatccggaccgccacatcgagcgggtcaccgagctgcaagaactcttcctcacgcgcgtcgggctcgacatcggcaaggtgtgggtcgcggacgacggcgccgcggtggcggtctggaccacgccggagagcgtcgaagcgggggcggtgttcgccgagatcggcccgcgcatggccgagttgagcggttcccggctggccgcgcagcaacagatggaaggcctcctggcgccgcaccggcccaaggagcccgcgtggttcctggccaccgtcggcgtctcgcccgaccaccagggcaagggtctgggcagcgccgtcgtgctccccggagtggaggcggccgagcgcgccggggtgcccgccttcctggagacctccgcgccccgcaacctccccttctacgagcggctcggcttcaccgtcaccgccgacgtcgaggtgcccgaaggaccgcgcacctggtgcatgacccgcaagcccggtgcctga

SEQ ID NO: 1865 - DNA, 3222 bp, Artificial Sequence
  Synthetic Polynucleotide
atggccttaccagtgaccgccttgctcctgccgctggccttgctgctccacgccgccaggccggaagtgcagctggttgaatctggcggaggactggttcaggctggcggatctctgagactgtcttgtgccgccagcggcagaacctttagcatgggctggtttagacaggcccctggcaaagagagagagttcgtcgccgccatcacatactctggcggcagcccttactacgccgactctgtgaagggcagattcaccatcagccgggacaacgccaagaacaccgtgtacctccagatgaacagcctgaagcctgaggacaccgccgtgtactactgcgccgccaatccaacatacggcagcgactggaacgccgagaattggggccagggaacccaagtgacagtgtctagcggtaccggcggaggcggatctggcggcggaggtagcggtggcggaggatctgaattcgacatccagatgacacagagccctagcagcctgtctgccagcgtgggagacagagtgaccatcacatgcaaggccagcgaccacatcaacaactggctggcctggtatcagcagaagcctggacaggcccctaagctgctgatctacggcgctaccacactggaaacaggcgtgcccagcagattttctggcagcggctctggcaccgactacaccctgacaatatccagcctccagcctgaggacttcgccacctactactgtcagcagagctggaacaccccttggacattcggccagggcaccaagctggaaatcaagagactcgagggacagcctaaggccaatcctaccgtgacactgttccctccaagcagcgaagaactccaggccaacaaggccacacttgtgtgcctgatctccgacttctaccctggggctgtgacagtggcttggaaggccgatggatctcctgtgaaagccggcgtggaaaccaccaagccatccaagcagagcaacaacaaatacgccgccagctcctacctgagcctgacacctgagcagtggaagtcccacagatcctacagctgccaagtgacccacgaaggcagcaccgtggaaaagacagtggcccctacagagtgcagcggatccggcgacatcgagaacaccagtctggcccctgaggaccctacctttcctgccgatacctggggcacctacctgctgaccacagagacaggactccagaaagatcacgccctgtgggaccacacagcccagaacctgctgagaatgggcctcgcctttctggtgctggttgccctcgtgtggttcctggtggaagattggctgagccggaagcggacaagagagagagccagcagagcctctacctgggagggaagaagaaggctgaacacccagacacttagggccaagcgatctggatctggagcaacaaacttctcactactcaaacaagcaggtgacgtggaggagaatcccgggcctactagtatggactggatttggcgcatccttttccttgtcggcgctgctaccggcgcgcattccttcgaacaagttcagcttcaacagcctggcgctgagctggtcaaacctggcgcttctgtgaagatgagctgcaaagccagcggctacgccttcagcagctactggatcaactggatgaagcagaaacccggccagggactcgaatggatcggccaaatctatcccggcgacggcgacaccaactacaacggcaagttcaagggcagagccacactgaccgccgatacctctagcagcacagcctacatgcagctgagcagcctgaccagcgaagatagcgccgtgtacttctgtgcccggtccatcacaacagtcgtgggctgcgctatggactattggggccagggaacaagcgtgaccgtgtctagtacgcgtgcctctacaaagggaccctccgtgtttcctctggctcccagcagcaagtctacaagcggaggaacagccgctctgggctgcctggtcaaggattactttcccgagcctgtgaccgtgtcctggaatagcggagcactgacaagcggcgtgcacacctttccagccgtgctgcaaagcagcggcctgtactctctgagcagcgtggtcacagtgcctagctctagcctgggcacccagacctacatctgcaatgtgaaccacaagcctagcaacaccaaggtggacaagagagtggaacccaagagctgtggtaccggcgatattgagaatacctctctggccccagaagatcctacattccccgccgacacatggggaacatatctgctgacaaccgaaaccgggctgcaaaaggaccatgctctgtgggatcataccgctcagaatctgcttcggatggggcttgcattcctggtcctggtggctcttgtctggtttctggtcgaggactggctgtcccggaagagaaccagagaaagagcttccagggccagcacctgggaaggcagacgcagactgaatactcagaccctgcgcgccaagagaagcggatctggcgtgaagcagaccctgaatttcgacctgctgaagctggctggcgacgtggaatccaacccaggcccttctagaggccatatgaccgagtacaagcccacggtgcgcctcgccacccgcgacgacgtccccagggccgtacgcaccctcgccgccgcgttcgccgactaccccgccacgcgccacaccgtcgatccggaccgccacatcgagcgggtcaccgagctgcaagaactcttcctcacgcgcgtcgggctcgacatcggcaaggtgtgggtcgcggacgacggcgccgcggtggcggtctggaccacgccggagagcgtcgaagcgggggcggtgttcgccgagatcggcccgcgcatggccgagttgagcggttcccggctggccgcgcagcaacagatggaaggcctcctggcgccgcaccggcccaaggagcccgcgtggttcctggccaccgtcggcgtctcgcccgaccaccagggcaagggtctgggcagcgccgtcgtgctccccggagtggaggcggccgagcgcgccggggtgcccgccttcctggagacctccgcgccccgcaacctccccttctacgagcggctcggcttcaccgtcaccgccgacgtcgaggtgcccgaaggaccgcgcacctggtgcatgacccgcaagcccggtgcctga

SEQ ID NO: 1866 - DNA, 3633 bp, Artificial Sequence
  Synthetic Polynucleotide
atggccttaccagtgaccgccttgctcctgccgctggccttgctgctccacgccgccaggccggaagtgcagctggttgaatctggcggaggactggttcaggctggcggatctctgagactgtcttgtgccgccagcggcagaacctttagcatgggctggtttagacaggcccctggcaaagagagagagttcgtcgccgccatcacatactctggcggcagcccttactacgccgactctgtgaagggcagattcaccatcagccgggacaacgccaagaacaccgtgtacctccagatgaacagcctgaagcctgaggacaccgccgtgtactactgcgccgccaatccaacatacggcagcgactggaacgccgagaattggggccagggaacccaagtgacagtgtctagcggtaccggcggaggcggatctggcggcggaggtagcggtggcggaggatctgaattcgacatccagatgacacagagccctagcagcctgtctgccagcgtgggagacagagtgaccatcacatgcaaggccagcgaccacatcaacaactggctggcctggtatcagcagaagcctggacaggcccctaagctgctgatctacggcgctaccacactggaaacaggcgtgcccagcagattttctggcagcggctctggcaccgactacaccctgacaatatccagcctccagcctgaggacttcgccacctactactgtcagcagagctggaacaccccttggacattcggccagggcaccaagctggaaatcaagagactcgagggacagcctaaggccaatcctaccgtgacactgttccctccaagcagcgaagaactccaggccaacaaggccacacttgtgtgcctgatctccgacttctaccctggggctgtgacagtggcttggaaggccgatggatctcctgtgaaagccggcgtggaaaccaccaagccatccaagcagagcaacaacaaatacgccgccagctcctacctgagcctgacacctgagcagtggaagtcccacagatcctacagctgccaagtgacccacgaaggcagcaccgtggaaaagacagtggcccctacagagtgcagcggatccggcgacatcgagaacaccagtctggcccctgaggaccctacctttcctgccgatacctggggcacctacctgctgaccacagagacaggactccagaaagatcacgccctgtgggaccacacagcccagaacctgctgagaatgggcctcgcctttctggtgctggttgccctcgtgtggttcctggtggaagattggctgagccggaagcggacaagagagagagccagcagagcctctacctgggagggaagaagaaggctgaacacccagacacttagggccaagcgatctggatctggagcaacaaacttctcactactcaaacaagcaggtgacgtggaggagaatcccgggcctactagtatggactggatttggcgcatccttttccttgtcggcgctgctaccggcgcgcattccgggcccgaagtgcaactggttgaatccggtggcggcctggtgcaagcaggcggatctctcagacttagctgtgccgcctccggcagaaccttcacaatgggatggtttaggcaggctccagggaaagagagagagttcgtcgccgccatctctctgtctcccacactggcctactacgccgactctgtgaaaggccggttcaccatctccagagataatgccaagaacaccgtggtgctgcaaatgaactctctgaaacccgaggatacagccctgtactattgtgccgctgaccggaagtccgtgatgagcatcagacccgattactggggacagggcacacaagtcacagtgtcctctggatccggcggcggaggatctggcggaggcggatctgggggcggaggctctttcgaacaagttcagcttcaacagcctggcgctgagctggtcaaacctggcgcttctgtgaagatgagctgcaaagccagcggctacgccttcagcagctactggatcaactggatgaagcagaaacccggccagggactcgaatggatcggccaaatctatcccggcgacggcgacaccaactacaacggcaagttcaagggcagagccacactgaccgccgatacctctagcagcacagcctacatgcagctgagcagcctgaccagcgaagatagcgccgtgtacttctgtgcccggtccatcacaacagtcgtgggctgcgctatggactattggggccagggaacaagcgtgaccgtgtctagtacgcgtgcctctacaaagggaccctccgtgtttcctctggctcccagcagcaagtctacaagcggaggaacagccgctctgggctgcctggtcaaggattactttcccgagcctgtgaccgtgtcctggaatagcggagcactgacaagcggcgtgcacacctttccagccgtgctgcaaagcagcggcctgtactctctgagcagcgtggtcacagtgcctagctctagcctgggcacccagacctacatctgcaatgtgaaccacaagcctagcaacaccaaggtggacaagagagtggaacccaagagctgtggtaccggcgatattgagaatacctctctggccccagaagatcctacattccccgccgacacatggggaacatatctgctgacaaccgaaaccgggctgcaaaaggaccatgctctgtgggatcataccgctcagaatctgcttcggatggggcttgcattcctggtcctggtggctcttgtctggtttctggtcgaggactggctgtcccggaagagaaccagagaaagagcttccagggccagcacctgggaaggcagacgcagactgaatactcagaccctgcgcgccaagagaagcggatctggcgtgaagcagaccctgaatttcgacctgctgaagctggctggcgacgtggaatccaacccaggcccttctagaggccatatgaccgagtacaagcccacggtgcgcctcgccacccgcgacgacgtccccagggccgtacgcaccctcgccgccgcgttcgccgactaccccgccacgcgccacaccgtcgatccggaccgccacatcgagcgggtcaccgagctgcaagaactcttcctcacgcgcgtcgggctcgacatcggcaaggtgtgggtcgcggacgacggcgccgcggtggcggtctggaccacgccggagagcgtcgaagcgggggcggtgttcgccgagatcggcccgcgcatggccgagttgagcggttcccggctggccgcgcagcaacagatggaaggcctcctggcgccgcaccggcccaaggagcccgcgtggttcctggccaccgtcggcgtctcgcccgaccaccagggcaagggtctgggcagcgccgtcgtgctccccggagtggaggcggccgagcgcgccggggtgcccgccttcctggagacctccgcgccccgcaacctccccttctacgagcggctcggcttcaccgtcaccgccgacgtcgaggtgcccgaaggaccgcgcacctggtgcatgacccgcaagcccggtgcctga

SEQ ID NO: 1867 - DNA, 2832 bp, Artificial Sequence
  Synthetic Polynucleotide
atggccttaccagtgaccgccttgctcctgccgctggccttgctgctccacgccgccaggccggaagtgcagctggttgaatctggcggaggactggttcaggctggcggatctctgagactgtcttgtgccgccagcggcagaacctttagcatgggctggtttagacaggcccctggcaaagagagagagttcgtcgccgccatcacatactctggcggcagcccttactacgccgactctgtgaagggcagattcaccatcagccgggacaacgccaagaacaccgtgtacctccagatgaacagcctgaagcctgaggacaccgccgtgtactactgcgccgccaatccaacatacggcagcgactggaacgccgagaattggggccagggaacccaagtgacagtgtctagcctcgagggacagcctaaggccaatcctaccgtgacactgttccctccaagcagcgaagaactccaggccaacaaggccacacttgtgtgcctgatctccgacttctaccctggggctgtgacagtggcttggaaggccgatggatctcctgtgaaagccggcgtggaaaccaccaagccatccaagcagagcaacaacaaatacgccgccagctcctacctgagcctgacacctgagcagtggaagtcccacagatcctacagctgccaagtgacccacgaaggcagcaccgtggaaaagacagtggcccctacagagtgcagcggatccggcgacatcgagaacaccagtctggcccctgaggaccctacctttcctgccgatacctggggcacctacctgctgaccacagagacaggactccagaaagatcacgccctgtgggaccacacagcccagaacctgctgagaatgggcctcgcctttctggtgctggttgccctcgtgtggttcctggtggaagattggctgagccggaagcggacaagagagagagccagcagagcctctacctgggagggaagaagaaggctgaacacccagacacttagggccaagcgatctggatctggagcaacaaacttctcactactcaaacaagcaggtgacgtggaggagaatcccgggcctactagtatggactggatttggcgcatccttttccttgtcggcgctgctaccggcgcgcattccgggcccgaagtgcaactggttgaatccggtggcggcctggtgcaagcaggcggatctctcagacttagctgtgccgcctccggcagaaccttcacaatgggatggtttaggcaggctccagggaaagagagagagttcgtcgccgccatctctctgtctcccacactggcctactacgccgactctgtgaaaggccggttcaccatctccagagataatgccaagaacaccgtggtgctgcaaatgaactctctgaaacccgaggatacagccctgtactattgtgccgctgaccggaagtccgtgatgagcatcagacccgattactggggacagggcacacaagtcacagtgtcctctacgcgtgcctctacaaagggaccctccgtgtttcctctggctcccagcagcaagtctacaagcggaggaacagccgctctgggctgcctggtcaaggattactttcccgagcctgtgaccgtgtcctggaatagcggagcactgacaagcggcgtgcacacctttccagccgtgctgcaaagcagcggcctgtactctctgagcagcgtggtcacagtgcctagctctagcctgggcacccagacctacatctgcaatgtgaaccacaagcctagcaacaccaaggtggacaagagagtggaacccaagagctgtggtaccggcgatattgagaatacctctctggccccagaagatcctacattccccgccgacacatggggaacatatctgctgacaaccgaaaccgggctgcaaaaggaccatgctctgtgggatcataccgctcagaatctgcttcggatggggcttgcattcctggtcctggtggctcttgtctggtttctggtcgaggactggctgtcccggaagagaaccagagaaagagcttccagggccagcacctgggaaggcagacgcagactgaatactcagaccctgcgcgccaagagaagcggatctggcgtgaagcagaccctgaatttcgacctgctgaagctggctggcgacgtggaatccaacccaggcccttctagaggccatatgaccgagtacaagcccacggtgcgcctcgccacccgcgacgacgtccccagggccgtacgcaccctcgccgccgcgttcgccgactaccccgccacgcgccacaccgtcgatccggaccgccacatcgagcgggtcaccgagctgcaagaactcttcctcacgcgcgtcgggctcgacatcggcaaggtgtgggtcgcggacgacggcgccgcggtggcggtctggaccacgccggagagcgtcgaagcgggggcggtgttcgccgagatcggcccgcgcatggccgagttgagcggttcccggctggccgcgcagcaacagatggaaggcctcctggcgccgcaccggcccaaggagcccgcgtggttcctggccaccgtcggcgtctcgcccgaccaccagggcaagggtctgggcagcgccgtcgtgctccccggagtggaggcggccgagcgcgccggggtgcccgccttcctggagacctccgcgccccgcaacctccccttctacgagcggctcggcttcaccgtcaccgccgacgtcgaggtgcccgaaggaccgcgcacctggtgcatgacccgcaagcccggtgcctga

SEQ ID NO: 1868 - DNA, 2856 bp, Artificial Sequence
  Synthetic Polynucleotide
atggccttaccagtgaccgccttgctcctgccgctggccttgctgctccacgccgccaggccggacatccagatgacacagagccctagcagcctgtctgccagcgtgggagacagagtgaccatcacatgcaaggccagcgaccacatcaacaactggctggcctggtatcagcagaagcctggacaggcccctaagctgctgatctacggcgctaccacactggaaacaggcgtgcccagcagattttctggcagcggctctggcaccgactacaccctgacaatatccagcctccagcctgaggacttcgccacctactactgtcagcagagctggaacaccccttggacattcggccagggcaccaagctggaaatcaagagactcgaggacctgaagaacgtgttcccacctgaggtggccgtgttcgagcctagcgaggccgagatcagccacacccagaaagccaccctcgtgtgcctggctaccggcttctaccccgaccatgtggaactgtcttggtgggtcaacggcaaagaggtgcacagcggcgtgtctaccgacccccagccactgaaagaacagcccgccctgaacgacagccggtactgcctgagcagcagactgagagtgtccgccaccttctggcagaacccccggaaccacttcagatgccaggtgcagttctacggcctgagcgagaacgacgagtggacccaggacagagccaagcccgtgacccagatcgtgtctgccgaagcctggggcagagccgattgcggatccggcgacatcgagaacaccagtctggcccctgaggaccctacctttcctgccgatacctggggcacctacctgctgaccacagagacaggactccagaaagatcacgccctgtgggaccacacagcccagaacctgctgagaatgggcctcgcctttctggtgctggttgccctcgtgtggttcctggtggaagattggctgagccggaagcggacaagagagagagccagcagagcctctacctgggagggaagaagaaggctgaacacccagacacttagggccaagcgatctggatctggagcaacaaacttctcactactcaaacaagcaggtgacgtggaggagaatcccgggcctactagtatggactggatttggcgcatccttttccttgtcggcgctgctaccggcgcgcattccttcgaacaagttcagcttcaacagcctggcgctgagctggtcaaacctggcgcttctgtgaagatgagctgcaaagccagcggctacgccttcagcagctactggatcaactggatgaagcagaaacccggccagggactcgaatggatcggccaaatctatcccggcgacggcgacaccaactacaacggcaagttcaagggcagagccacactgaccgccgatacctctagcagcacagcctacatgcagctgagcagcctgaccagcgaagatagcgccgtgtacttctgtgcccggtccatcacaacagtcgtgggctgcgctatggactattggggccagggaacaagcgtgaccgtgtctagtacgcgtatccagaaccctgatcctgccgtgtaccagctgcgggatagcaagagcagcgacaagagcgtgtgtctgttcaccgacttcgacagccagaccaacgtgtcccagagcaaggactccgacgtgtacatcaccgataagaccgtgctggacatgcggagcatggacttcaagagcaactccgccgtggcctggtccaacaagtccgatttcgcctgcgccaacgccttcaacaacagcattatccccgaggacacattcttcccaagccccgagagcagctgcggtaccggcgatattgagaatacctctctggccccagaagatcctacattccccgccgacacatggggaacatatctgctgacaaccgaaaccgggctgcaaaaggaccatgctctgtgggatcataccgctcagaatctgcttcggatggggcttgcattcctggtcctggtggctcttgtctggtttctggtcgaggactggctgtcccggaagagaaccagagaaagagcttccagggccagcacctgggaaggcagacgcagactgaatactcagaccctgcgcgccaagagaagcggatctggcgtgaagcagaccctgaatttcgacctgctgaagctggctggcgacgtggaatccaacccaggcccttctagaggccatatgaccgagtacaagcccacggtgcgcctcgccacccgcgacgacgtccccagggccgtacgcaccctcgccgccgcgttcgccgactaccccgccacgcgccacaccgtcgatccggaccgccacatcgagcgggtcaccgagctgcaagaactcttcctcacgcgcgtcgggctcgacatcggcaaggtgtgggtcgcggacgacggcgccgcggtggcggtctggaccacgccggagagcgtcgaagcgggggcggtgttcgccgagatcggcccgcgcatggccgagttgagcggttcccggctggccgcgcagcaacagatggaaggcctcctggcgccgcaccggcccaaggagcccgcgtggttcctggccaccgtcggcgtctcgcccgaccaccagggcaagggtctgggcagcgccgtcgtgctccccggagtggaggcggccgagcgcgccggggtgcccgccttcctggagacctccgcgccccgcaacctccccttctacgagcggctcggcttcaccgtcaccgccgacgtcgaggtgcccgaaggaccgcgcacctggtgcatgacccgcaagcccggtgcctga

SEQ ID NO: 1869 - DNA, 3267 bp, Artificial Sequence
  Synthetic Polynucleotide
atggccttaccagtgaccgccttgctcctgccgctggccttgctgctccacgccgccaggccggaagtgcagctggttgaatctggcggaggactggttcaggctggcggatctctgagactgtcttgtgccgccagcggcagaacctttagcatgggctggtttagacaggcccctggcaaagagagagagttcgtcgccgccatcacatactctggcggcagcccttactacgccgactctgtgaagggcagattcaccatcagccgggacaacgccaagaacaccgtgtacctccagatgaacagcctgaagcctgaggacaccgccgtgtactactgcgccgccaatccaacatacggcagcgactggaacgccgagaattggggccagggaacccaagtgacagtgtctagcggtaccggcggaggcggatctggcggcggaggtagcggtggcggaggatctgaattcgacatccagatgacacagagccctagcagcctgtctgccagcgtgggagacagagtgaccatcacatgcaaggccagcgaccacatcaacaactggctggcctggtatcagcagaagcctggacaggcccctaagctgctgatctacggcgctaccacactggaaacaggcgtgcccagcagattttctggcagcggctctggcaccgactacaccctgacaatatccagcctccagcctgaggacttcgccacctactactgtcagcagagctggaacaccccttggacattcggccagggcaccaagctggaaatcaagagactcgaggacctgaagaacgtgttcccacctgaggtggccgtgttcgagcctagcgaggccgagatcagccacacccagaaagccaccctcgtgtgcctggctaccggcttctaccccgaccatgtggaactgtcttggtgggtcaacggcaaagaggtgcacagcggcgtgtctaccgacccccagccactgaaagaacagcccgccctgaacgacagccggtactgcctgagcagcagactgagagtgtccgccaccttctggcagaacccccggaaccacttcagatgccaggtgcagttctacggcctgagcgagaacgacgagtggacccaggacagagccaagcccgtgacccagatcgtgtctgccgaagcctggggcagagccgattgcggatccggcgacatcgagaacaccagtctggcccctgaggaccctacctttcctgccgatacctggggcacctacctgctgaccacagagacaggactccagaaagatcacgccctgtgggaccacacagcccagaacctgctgagaatgggcctcgcctttctggtgctggttgccctcgtgtggttcctggtggaagattggctgagccggaagcggacaagagagagagccagcagagcctctacctgggagggaagaagaaggctgaacacccagacacttagggccaagcgatctggatctggagcaacaaacttctcactactcaaacaagcaggtgacgtggaggagaatcccgggcctactagtatggactggatttggcgcatccttttccttgtcggcgctgctaccggcgcgcattccttcgaacaagttcagcttcaacagcctggcgctgagctggtcaaacctggcgcttctgtgaagatgagctgcaaagccagcggctacgccttcagcagctactggatcaactggatgaagcagaaacccggccagggactcgaatggatcggccaaatctatcccggcgacggcgacaccaactacaacggcaagttcaagggcagagccacactgaccgccgatacctctagcagcacagcctacatgcagctgagcagcctgaccagcgaagatagcgccgtgtacttctgtgcccggtccatcacaacagtcgtgggctgcgctatggactattggggccagggaacaagcgtgaccgtgtctagtacgcgtatccagaaccctgatcctgccgtgtaccagctgcgggatagcaagagcagcgacaagagcgtgtgtctgttcaccgacttcgacagccagaccaacgtgtcccagagcaaggactccgacgtgtacatcaccgataagaccgtgctggacatgcggagcatggacttcaagagcaactccgccgtggcctggtccaacaagtccgatttcgcctgcgccaacgccttcaacaacagcattatccccgaggacacattcttcccaagccccgagagcagctgcggtaccggcgatattgagaatacctctctggccccagaagatcctacattccccgccgacacatggggaacatatctgctgacaaccgaaaccgggctgcaaaaggaccatgctctgtgggatcataccgctcagaatctgcttcggatggggcttgcattcctggtcctggtggctcttgtctggtttctggtcgaggactggctgtcccggaagagaaccagagaaagagcttccagggccagcacctgggaaggcagacgcagactgaatactcagaccctgcgcgccaagagaagcggatctggcgtgaagcagaccctgaatttcgacctgctgaagctggctggcgacgtggaatccaacccaggcccttctagaggccatatgaccgagtacaagcccacggtgcgcctcgccacccgcgacgacgtccccagggccgtacgcaccctcgccgccgcgttcgccgactaccccgccacgcgccacaccgtcgatccggaccgccacatcgagcgggtcaccgagctgcaagaactcttcctcacgcgcgtcgggctcgacatcggcaaggtgtgggtcgcggacgacggcgccgcggtggcggtctggaccacgccggagagcgtcgaagcgggggcggtgttcgccgagatcggcccgcgcatggccgagttgagcggttcccggctggccgcgcagcaacagatggaaggcctcctggcgccgcaccggcccaaggagcccgcgtggttcctggccaccgtcggcgtctcgcccgaccaccagggcaagggtctgggcagcgccgtcgtgctccccggagtggaggcggccgagcgcgccggggtgcccgccttcctggagacctccgcgccccgcaacctccccttctacgagcggctcggcttcaccgtcaccgccgacgtcgaggtgcccgaaggaccgcgcacctggtgcatgacccgcaagcccggtgcctga

SEQ ID NO: 1870 - DNA, 3678 bp, Artificial Sequence
  Synthetic Polynucleotide
atggccttaccagtgaccgccttgctcctgccgctggccttgctgctccacgccgccaggccggaagtgcagctggttgaatctggcggaggactggttcaggctggcggatctctgagactgtcttgtgccgccagcggcagaacctttagcatgggctggtttagacaggcccctggcaaagagagagagttcgtcgccgccatcacatactctggcggcagcccttactacgccgactctgtgaagggcagattcaccatcagccgggacaacgccaagaacaccgtgtacctccagatgaacagcctgaagcctgaggacaccgccgtgtactactgcgccgccaatccaacatacggcagcgactggaacgccgagaattggggccagggaacccaagtgacagtgtctagcggtaccggcggaggcggatctggcggcggaggtagcggtggcggaggatctgaattcgacatccagatgacacagagccctagcagcctgtctgccagcgtgggagacagagtgaccatcacatgcaaggccagcgaccacatcaacaactggctggcctggtatcagcagaagcctggacaggcccctaagctgctgatctacggcgctaccacactggaaacaggcgtgcccagcagattttctggcagcggctctggcaccgactacaccctgacaatatccagcctccagcctgaggacttcgccacctactactgtcagcagagctggaacaccccttggacattcggccagggcaccaagctggaaatcaagagactcgaggacctgaagaacgtgttcccacctgaggtggccgtgttcgagcctagcgaggccgagatcagccacacccagaaagccaccctcgtgtgcctggctaccggcttctaccccgaccatgtggaactgtcttggtgggtcaacggcaaagaggtgcacagcggcgtgtctaccgacccccagccactgaaagaacagcccgccctgaacgacagccggtactgcctgagcagcagactgagagtgtccgccaccttctggcagaacccccggaaccacttcagatgccaggtgcagttctacggcctgagcgagaacgacgagtggacccaggacagagccaagcccgtgacccagatcgtgtctgccgaagcctggggcagagccgattgcggatccggcgacatcgagaacaccagtctggcccctgaggaccctacctttcctgccgatacctggggcacctacctgctgaccacagagacaggactccagaaagatcacgccctgtgggaccacacagcccagaacctgctgagaatgggcctcgcctttctggtgctggttgccctcgtgtggttcctggtggaagattggctgagccggaagcggacaagagagagagccagcagagcctctacctgggagggaagaagaaggctgaacacccagacacttagggccaagcgatctggatctggagcaacaaacttctcactactcaaacaagcaggtgacgtggaggagaatcccgggcctactagtatggactggatttggcgcatccttttccttgtcggcgctgctaccggcgcgcattccgggcccgaagtgcaactggttgaatccggtggcggcctggtgcaagcaggcggatctctcagacttagctgtgccgcctccggcagaaccttcacaatgggatggtttaggcaggctccagggaaagagagagagttcgtcgccgccatctctctgtctcccacactggcctactacgccgactctgtgaaaggccggttcaccatctccagagataatgccaagaacaccgtggtgctgcaaatgaactctctgaaacccgaggatacagccctgtactattgtgccgctgaccggaagtccgtgatgagcatcagacccgattactggggacagggcacacaagtcacagtgtcctctggatccggcggcggaggatctggcggaggcggatctgggggcggaggctctttcgaacaagttcagcttcaacagcctggcgctgagctggtcaaacctggcgcttctgtgaagatgagctgcaaagccagcggctacgccttcagcagctactggatcaactggatgaagcagaaacccggccagggactcgaatggatcggccaaatctatcccggcgacggcgacaccaactacaacggcaagttcaagggcagagccacactgaccgccgatacctctagcagcacagcctacatgcagctgagcagcctgaccagcgaagatagcgccgtgtacttctgtgcccggtccatcacaacagtcgtgggctgcgctatggactattggggccagggaacaagcgtgaccgtgtctagtacgcgtatccagaaccctgatcctgccgtgtaccagctgcgggatagcaagagcagcgacaagagcgtgtgtctgttcaccgacttcgacagccagaccaacgtgtcccagagcaaggactccgacgtgtacatcaccgataagaccgtgctggacatgcggagcatggacttcaagagcaactccgccgtggcctggtccaacaagtccgatttcgcctgcgccaacgccttcaacaacagcattatccccgaggacacattcttcccaagccccgagagcagctgcggtaccggcgatattgagaatacctctctggccccagaagatcctacattccccgccgacacatggggaacatatctgctgacaaccgaaaccgggctgcaaaaggaccatgctctgtgggatcataccgctcagaatctgcttcggatggggcttgcattcctggtcctggtggctcttgtctggtttctggtcgaggactggctgtcccggaagagaaccagagaaagagcttccagggccagcacctgggaaggcagacgcagactgaatactcagaccctgcgcgccaagagaagcggatctggcgtgaagcagaccctgaatttcgacctgctgaagctggctggcgacgtggaatccaacccaggcccttctagaggccatatgaccgagtacaagcccacggtgcgcctcgccacccgcgacgacgtccccagggccgtacgcaccctcgccgccgcgttcgccgactaccccgccacgcgccacaccgtcgatccggaccgccacatcgagcgggtcaccgagctgcaagaactcttcctcacgcgcgtcgggctcgacatcggcaaggtgtgggtcgcggacgacggcgccgcggtggcggtctggaccacgccggagagcgtcgaagcgggggcggtgttcgccgagatcggcccgcgcatggccgagttgagcggttcccggctggccgcgcagcaacagatggaaggcctcctggcgccgcaccggcccaaggagcccgcgtggttcctggccaccgtcggcgtctcgcccgaccaccagggcaagggtctgggcagcgccgtcgtgctccccggagtggaggcggccgagcgcgccggggtgcccgccttcctggagacctccgcgccccgcaacctccccttctacgagcggctcggcttcaccgtcaccgccgacgtcgaggtgcccgaaggaccgcgcacctggtgcatgacccgcaagcccggtgcctga

SEQ ID NO: 1871 - DNA, 2877 bp, Artificial Sequence
  Synthetic Polynucleotide
atggccttaccagtgaccgccttgctcctgccgctggccttgctgctccacgccgccaggccggaagtgcagctggttgaatctggcggaggactggttcaggctggcggatctctgagactgtcttgtgccgccagcggcagaacctttagcatgggctggtttagacaggcccctggcaaagagagagagttcgtcgccgccatcacatactctggcggcagcccttactacgccgactctgtgaagggcagattcaccatcagccgggacaacgccaagaacaccgtgtacctccagatgaacagcctgaagcctgaggacaccgccgtgtactactgcgccgccaatccaacatacggcagcgactggaacgccgagaattggggccagggaacccaagtgacagtgtctagcctcgaggacctgaagaacgtgttcccacctgaggtggccgtgttcgagcctagcgaggccgagatcagccacacccagaaagccaccctcgtgtgcctggctaccggcttctaccccgaccatgtggaactgtcttggtgggtcaacggcaaagaggtgcacagcggcgtgtctaccgacccccagccactgaaagaacagcccgccctgaacgacagccggtactgcctgagcagcagactgagagtgtccgccaccttctggcagaacccccggaaccacttcagatgccaggtgcagttctacggcctgagcgagaacgacgagtggacccaggacagagccaagcccgtgacccagatcgtgtctgccgaagcctggggcagagccgattgcggatccggcgacatcgagaacaccagtctggcccctgaggaccctacctttcctgccgatacctggggcacctacctgctgaccacagagacaggactccagaaagatcacgccctgtgggaccacacagcccagaacctgctgagaatgggcctcgcctttctggtgctggttgccctcgtgtggttcctggtggaagattggctgagccggaagcggacaagagagagagccagcagagcctctacctgggagggaagaagaaggctgaacacccagacacttagggccaagcgatctggatctggagcaacaaacttctcactactcaaacaagcaggtgacgtggaggagaatcccgggcctactagtatggactggatttggcgcatccttttccttgtcggcgctgctaccggcgcgcattccgggcccgaagtgcaactggttgaatccggtggcggcctggtgcaagcaggcggatctctcagacttagctgtgccgcctccggcagaaccttcacaatgggatggtttaggcaggctccagggaaagagagagagttcgtcgccgccatctctctgtctcccacactggcctactacgccgactctgtgaaaggccggttcaccatctccagagataatgccaagaacaccgtggtgctgcaaatgaactctctgaaacccgaggatacagccctgtactattgtgccgctgaccggaagtccgtgatgagcatcagacccgattactggggacagggcacacaagtcacagtgtcctctacgcgtatccagaaccctgatcctgccgtgtaccagctgcgggatagcaagagcagcgacaagagcgtgtgtctgttcaccgacttcgacagccagaccaacgtgtcccagagcaaggactccgacgtgtacatcaccgataagaccgtgctggacatgcggagcatggacttcaagagcaactccgccgtggcctggtccaacaagtccgatttcgcctgcgccaacgccttcaacaacagcattatccccgaggacacattcttcccaagccccgagagcagctgcggtaccggcgatattgagaatacctctctggccccagaagatcctacattccccgccgacacatggggaacatatctgctgacaaccgaaaccgggctgcaaaaggaccatgctctgtgggatcataccgctcagaatctgcttcggatggggcttgcattcctggtcctggtggctcttgtctggtttctggtcgaggactggctgtcccggaagagaaccagagaaagagcttccagggccagcacctgggaaggcagacgcagactgaatactcagaccctgcgcgccaagagaagcggatctggcgtgaagcagaccctgaatttcgacctgctgaagctggctggcgacgtggaatccaacccaggcccttctagaggccatatgaccgagtacaagcccacggtgcgcctcgccacccgcgacgacgtccccagggccgtacgcaccctcgccgccgcgttcgccgactaccccgccacgcgccacaccgtcgatccggaccgccacatcgagcgggtcaccgagctgcaagaactcttcctcacgcgcgtcgggctcgacatcggcaaggtgtgggtcgcggacgacggcgccgcggtggcggtctggaccacgccggagagcgtcgaagcgggggcggtgttcgccgagatcggcccgcgcatggccgagttgagcggttcccggctggccgcgcagcaacagatggaaggcctcctggcgccgcaccggcccaaggagcccgcgtggttcctggccaccgtcggcgtctcgcccgaccaccagggcaagggtctgggcagcgccgtcgtgctccccggagtggaggcggccgagcgcgccggggtgcccgccttcctggagacctccgcgccccgcaacctccccttctacgagcggctcggcttcaccgtcaccgccgacgtcgaggtgcccgaaggaccgcgcacctggtgcatgacccgcaagcccggtgcctga

SEQ ID NO: 1872 - DNA, 1467 bp, Artificial Sequence
  Synthetic Polynucleotide
atggccttaccagtgaccgccttgctcctgccgctggccttgctgctccacgccgccaggccggcatgcgaagtgcagctgcttgaaagtggcggcggactgattcagcctggcggatctctgagactgagctgtgccgccagcggcttcaccttttctagccacgccatgacctgggtccgacaggcacctggaaaagggcttgaatgggtgtccgccatcagcggctctggcgattacacacactacgccgacagcgtgaagggcagattcaccatcagcagagacaacagcaagaacaccgtgtacctccagatgaacagcctgagagccgaggacagcgccgtgtattattgcgccaaggatgaggatggcggcagcctgcttggacacagaggacaaggcaccctggtcaccgtttcttccggtaccggcggaggcggatctggcggcggaggtagcggtggcggaggatctgaattcggatctctcgagggcgacatcgagaacaccagtctggcccctgaggaccctacctttcctgccgatacctggggcacctacctgctgaccacagagacaggactccagaaagatcacgccctgtgggaccacacagcccagaacctgctgagaatgggcctcgcctttctggtgctggttgccctcgtgtggttcctggtggaagattggctgagccggaagcggacaagagagagagccagcagagcctctacctgggagggaagaagaaggctgaacacccagacacttagggccaagcgatctggatctggagcaacaaacttctcactactcaaacaagcaggtgacgtggaggagaatcccgggcctactagaggccatatgaccgagtacaagcccacggtgcgcctcgccacccgcgacgacgtccccagggccgtacgcaccctcgccgccgcgttcgccgactaccccgccacgcgccacaccgtcgatccggaccgccacatcgagcgggtcaccgagctgcaagaactcttcctcacgcgcgtcgggctcgacatcggcaaggtgtgggtcgcggacgacggcgccgcggtggcggtctggaccacgccggagagcgtcgaagcgggggcggtgttcgccgagatcggcccgcgcatggccgagttgagcggttcccggctggccgcgcagcaacagatggaaggcctcctggcgccgcaccggcccaaggagcccgcgtggttcctggccaccgtcggcgtctcgcccgaccaccagggcaagggtctgggcagcgccgtcgtgctccccggagtggaggcggccgagcgcgccggggtgcccgccttcctggagacctccgcgccccgcaacctccccttctacgagcggctcggcttcaccgtcaccgccgacgtcgaggtgcccgaaggaccgcgcacctggtgcatgacccgcaagcccggtgcctga

SEQ ID NO: 1873 - DNA, 2352 bp, Artificial Sequence
  Synthetic Polynucleotide
atggccttaccagtgaccgccttgctcctgccgctggccttgctgctccacgccgccaggccggacatccagatgacacagagccctagcagcctgtctgccagcgtgggagacagagtgaccatcacatgcaaggccagcgaccacatcaacaactggctggcctggtatcagcagaagcctggacaggcccctaagctgctgatctacggcgctaccacactggaaacaggcgtgcccagcagattttctggcagcggctctggcaccgactacaccctgacaatatccagcctccagcctgaggacttcgccacctactactgtcagcagagctggaacaccccttggacattcggccagggcaccaagctggaaatcaagagactcgagatcggctggctgttgctccaggcccctcggtgggtgttcaaggaggaagaccctattcacctgaggtgtcacagctggaagaacactgctctgcataaggtcacatatttacagaatggcaaaggcaggaagtattttcatcataattctgacttctacattccaaaagccacactcaaagacagcggctcctacttctgcagggggcttgttgggagtaaaaatgtgtcttcagagactgtgaacatcaccatcactcaaggtttggcagtgtcaaccatctcatcattctttccacctggctaccaagtgtccttctgcctggtcatggtgctgctgttcgccgtggataccggcctgtacttcagcgtcaagaccaacatccggtccagcaccagagactggaaggaccacaagttcaagtggcggaaggaccctcaggacaagagggccaagcgatctggatctggagcaacaaacttctcactactcaaacaagcaggtgacgtggaggagaatcccgggcctactagtatggactggatttggcgcatccttttccttgtcggcgctgctaccggcgcgcattccttcgaacaagttcagcttcaacagcctggcgctgagctggtcaaacctggcgcttctgtgaagatgagctgcaaagccagcggctacgccttcagcagctactggatcaactggatgaagcagaaacccggccagggactcgaatggatcggccaaatctatcccggcgacggcgacaccaactacaacggcaagttcaagggcagagccacactgaccgccgatacctctagcagcacagcctacatgcagctgagcagcctgaccagcgaagatagcgccgtgtacttctgtgcccggtccatcacaacagtcgtgggctgcgctatggactattggggccagggaacaagcgtgaccgtgtctagtacgcgtgtggctgaaggcaaaacagataatcagtacacactcttcgttgccggcggaaccgtgctgctcctgctctttgtgattagcatcacaacgattatcgtcatcttcctcaaccgcaggcggagaagagagaggcgcgatctgttcaccgagtcttgggatacacagaaagctccgaacaactatcggagccctatctccaccggacagcccacaaatcagtctatggacgacacacgcgaggacatctatgtcaattaccccactttttctaggcggcctaagaccagagtgcgcgccaagagaagcggatctggcgtgaagcagaccctgaatttcgacctgctgaagctggctggcgacgtggaatccaacccaggcccttctagaggccatatgaccgagtacaagcccacggtgcgcctcgccacccgcgacgacgtccccagggccgtacgcaccctcgccgccgcgttcgccgactaccccgccacgcgccacaccgtcgatccggaccgccacatcgagcgggtcaccgagctgcaagaactcttcctcacgcgcgtcgggctcgacatcggcaaggtgtgggtcgcggacgacggcgccgcggtggcggtctggaccacgccggagagcgtcgaagcgggggcggtgttcgccgagatcggcccgcgcatggccgagttgagcggttcccggctggccgcgcagcaacagatggaaggcctcctggcgccgcaccggcccaaggagcccgcgtggttcctggccaccgtcggcgtctcgcccgaccaccagggcaagggtctgggcagcgccgtcgtgctccccggagtggaggcggccgagcgcgccggggtgcccgccttcctggagacctccgcgccccgcaacctccccttctacgagcggctcggcttcaccgtcaccgccgacgtcgaggtgcccgaaggaccgcgcacctggtgcatgacccgcaagcccggtgcctga

SEQ ID NO: 1874 - DNA, 2514 bp, Artificial Sequence
  Synthetic Polynucleotide
atggccttaccagtgaccgccttgctcctgccgctggccttgctgctccacgccgccaggccggcatgcgaagtgcagctgcttgaaagtggcggcggactgattcagcctggcggatctctgagactgagctgtgccgccagcggcttcaccttttctagccacgccatgacctgggtccgacaggcacctggaaaagggcttgaatgggtgtccgccatcagcggctctggcgattacacacactacgccgacagcgtgaagggcagattcaccatcagcagagacaacagcaagaacaccgtgtacctccagatgaacagcctgagagccgaggacagcgccgtgtattattgcgccaaggatgaggatggcggcagcctgcttggacacagaggacaaggcaccctggtcaccgtttcttccggtaccggcggaggcggatctggcggcggaggtagcggtggcggaggatctgaattcggatctctcgagatcggctggctgttgctccaggcccctcggtgggtgttcaaggaggaagaccctattcacctgaggtgtcacagctggaagaacactgctctgcataaggtcacatatttacagaatggcaaaggcaggaagtattttcatcataattctgacttctacattccaaaagccacactcaaagacagcggctcctacttctgcagggggcttgttgggagtaaaaatgtgtcttcagagactgtgaacatcaccatcactcaaggtttggcagtgtcaaccatctcatcattctttccacctggctaccaagtgtccttctgcctggtcatggtgctgctgttcgccgtggataccggcctgtacttcagcgtcaagaccaacatccggtccagcaccagagactggaaggaccacaagttcaagtggcggaaggaccctcaggacaagagggccaagcgatctggatctggagcaacaaacttctcactactcaaacaagcaggtgacgtggaggagaatcccgggcctactagtgccaccatggactggatttggcgcatccttttccttgtcggcgctgctaccggcgcccattccgggcccgaagtgcagctggttgaatctggcggaggactggttcaggctggcggatctctgagactgtcttgtgccgccagcggcagaacctttagcatgggctggtttagacaggcccctggcaaagagagagagttcgtcgccgccatcacatactctggcggcagcccttactacgccgactctgtgaagggcagattcaccatcagccgggacaacgccaagaacaccgtgtacctccagatgaacagcctgaagcctgaggacaccgccgtgtactactgcgccgccaatccaacatacggcagcgactggaacgccgagaattggggccagggaacccaagtgacagtgtctagcggatccggcggcggaggatctggcggaggcggatctgggggcggaggctctttcgaaggcagcacgcgtgtggctgaaggcaaaacagataatcagtacacactcttcgttgccggcggaaccgtgctgctcctgctctttgtgattagcatcacaacgattatcgtcatcttcctcaaccgcaggcggagaagagagaggcgcgatctgttcaccgagtcttgggatacacagaaagctccgaacaactatcggagccctatctccaccggacagcccacaaatcagtctatggacgacacacgcgaggacatctatgtcaattaccccactttttctaggcggcctaagaccagagtgcgcgccaagagaagcggatctggcgtgaagcagaccctgaatttcgacctgctgaagctggctggcgacgtggaatccaacccaggcccttctagaggccatatgaccgagtacaagcccacggtgcgcctcgccacccgcgacgacgtccccagggccgtacgcaccctcgccgccgcgttcgccgactaccccgccacgcgccacaccgtcgatccggaccgccacatcgagcgggtcaccgagctgcaagaactcttcctcacgcgcgtcgggctcgacatcggcaaggtgtgggtcgcggacgacggcgccgcggtggcggtctggaccacgccggagagcgtcgaagcgggggcggtgttcgccgagatcggcccgcgcatggccgagttgagcggttcccggctggccgcgcagcaacagatggaaggcctcctggcgccgcaccggcccaaggagcccgcgtggttcctggccaccgtcggcgtctcgcccgaccaccagggcaagggtctgggcagcgccgtcgtgctccccggagtggaggcggccgagcgcgccggggtgcccgccttcctggagacctccgcgccccgcaacctccccttctacgagcggctcggcttcaccgtcaccgccgacgtcgaggtgcccgaaggaccgcgcacctggtgcatgacccgcaagcccggtgcctga

SEQ ID NO: 1875 - DNA, 2964 bp, Artificial Sequence
  Synthetic Polynucleotide
atggccttaccagtgaccgccttgctcctgccgctggccttgctgctccacgccgccaggccggacatccagatgacacagagccctagcagcctgtctgccagcgtgggagacagagtgaccatcacatgcaaggccagcgaccacatcaacaactggctggcctggtatcagcagaagcctggacaggcccctaagctgctgatctacggcgctaccacactggaaacaggcgtgcccagcagattttctggcagcggctctggcaccgactacaccctgacaatatccagcctccagcctgaggacttcgccacctactactgtcagcagagctggaacaccccttggacattcggccagggcaccaagctggaaatcaagagactcgagggacagcctaaggccaatcctaccgtgacactgttccctccaagcagcgaagaactccaggccaacaaggccacacttgtgtgcctgatctccgacttctaccctggggctgtgacagtggcttggaaggccgatggatctcctgtgaaagccggcgtggaaaccaccaagccatccaagcagagcaacaacaaatacgccgccagctcctacctgagcctgacacctgagcagtggaagtcccacagatcctacagctgccaagtgacccacgaaggcagcaccgtggaaaagacagtggcccctacagagtgcagcggatccatcggctggctgttgctccaggcccctcggtgggtgttcaaggaggaagaccctattcacctgaggtgtcacagctggaagaacactgctctgcataaggtcacatatttacagaatggcaaaggcaggaagtattttcatcataattctgacttctacattccaaaagccacactcaaagacagcggctcctacttctgcagggggcttgttgggagtaaaaatgtgtcttcagagactgtgaacatcaccatcactcaaggtttggcagtgtcaaccatctcatcattctttccacctggctaccaagtgtccttctgcctggtcatggtgctgctgttcgccgtggataccggcctgtacttcagcgtcaagaccaacatccggtccagcaccagagactggaaggaccacaagttcaagtggcggaaggaccctcaggacaagagggccaagcgatctggatctggagcaacaaacttctcactactcaaacaagcaggtgacgtggaggagaatcccgggcctactagtatggactggatttggcgcatccttttccttgtcggcgctgctaccggcgcgcattccttcgaacaagttcagcttcaacagcctggcgctgagctggtcaaacctggcgcttctgtgaagatgagctgcaaagccagcggctacgccttcagcagctactggatcaactggatgaagcagaaacccggccagggactcgaatggatcggccaaatctatcccggcgacggcgacaccaactacaacggcaagttcaagggcagagccacactgaccgccgatacctctagcagcacagcctacatgcagctgagcagcctgaccagcgaagatagcgccgtgtacttctgtgcccggtccatcacaacagtcgtgggctgcgctatggactattggggccagggaacaagcgtgaccgtgtctagtacgcgtgcctctacaaagggaccctccgtgtttcctctggctcccagcagcaagtctacaagcggaggaacagccgctctgggctgcctggtcaaggattactttcccgagcctgtgaccgtgtcctggaatagcggagcactgacaagcggcgtgcacacctttccagccgtgctgcaaagcagcggcctgtactctctgagcagcgtggtcacagtgcctagctctagcctgggcacccagacctacatctgcaatgtgaaccacaagcctagcaacaccaaggtggacaagagagtggaacccaagagctgtggtaccgtggctgaaggcaaaacagataatcagtacacactcttcgttgccggcggaaccgtgctgctcctgctctttgtgattagcatcacaacgattatcgtcatcttcctcaaccgcaggcggagaagagagaggcgcgatctgttcaccgagtcttgggatacacagaaagctccgaacaactatcggagccctatctccaccggacagcccacaaatcagtctatggacgacacacgcgaggacatctatgtcaattaccccactttttctaggcggcctaagaccagagtgcgcgccaagagaagcggatctggcgtgaagcagaccctgaatttcgacctgctgaagctggctggcgacgtggaatccaacccaggcccttctagaggcgggatccacaccatggctacctacgaggtgctgtgcgaggtggcaagaaagctgggcaccgacgacagagaagtggtgctgttcctgctgaacgtgttcatccctcagcctacactggcccagctgatcggtgcactgagagccctgaaagaggaaggccggctgacctttcctctgctggccgaatgcctgttcagagccggaagaagggatctgctgcgggacctgctgcatctggaccccagatttctggaaagacacctggccggcaccatgagctacttcagcccttaccagctgaccgtgctgcacgttgacggcgaactgtgcgccagagatattcggagcctgatcttcctgagcaaggacaccatcggcagccggtctacccctcagacatttctgcactgggtgtactgcatggaaaacctggacctgctcggccccacagatgtggatgccctgatgtccatgctgagaagcctgagcagagtggacctccagagacaggtgcagacactgatgggactgcacctgagcggacctagccacagccagcactacagacacacccct

SEQ ID NO: 1876 - DNA, 3123 bp, Artificial Sequence
  Synthetic Polynucleotide
atggccttaccagtgaccgccttgctcctgccgctggccttgctgctccacgccgccaggccggacatccagatgacacagagccctagcagcctgtctgccagcgtgggagacagagtgaccatcacatgcaaggccagcgaccacatcaacaactggctggcctggtatcagcagaagcctggacaggcccctaagctgctgatctacggcgctaccacactggaaacaggcgtgcccagcagattttctggcagcggctctggcaccgactacaccctgacaatatccagcctccagcctgaggacttcgccacctactactgtcagcagagctggaacaccccttggacattcggccagggcaccaagctggaaatcaagagactcgagggacagcctaaggccaatcctaccgtgacactgttccctccaagcagcgaagaactccaggccaacaaggccacacttgtgtgcctgatctccgacttctaccctggggctgtgacagtggcttggaaggccgatggatctcctgtgaaagccggcgtggaaaccaccaagccatccaagcagagcaacaacaaatacgccgccagctcctacctgagcctgacacctgagcagtggaagtcccacagatcctacagctgccaagtgacccacgaaggcagcaccgtggaaaagacagtggcccctacagagtgcagcggatccatcggctggctgttgctccaggcccctcggtgggtgttcaaggaggaagaccctattcacctgaggtgtcacagctggaagaacactgctctgcataaggtcacatatttacagaatggcaaaggcaggaagtattttcatcataattctgacttctacattccaaaagccacactcaaagacagcggctcctacttctgcagggggcttgttgggagtaaaaatgtgtcttcagagactgtgaacatcaccatcactcaaggtttggcagtgtcaaccatctcatcattctttccacctggctaccaagtgtccttctgcctggtcatggtgctgctgttcgccgtggataccggcctgtacttcagcgtcaagaccaacatccggtccagcaccagagactggaaggaccacaagttcaagtggcggaaggaccctcaggacaagagggccaagcgatctggatctggagcaacaaacttctcactactcaaacaagcaggtgacgtggaggagaatcccgggcctactagtatggactggatttggcgcatccttttccttgtcggcgctgctaccggcgcgcattccttcgaacaagttcagcttcaacagcctggcgctgagctggtcaaacctggcgcttctgtgaagatgagctgcaaagccagcggctacgccttcagcagctactggatcaactggatgaagcagaaacccggccagggactcgaatggatcggccaaatctatcccggcgacggcgacaccaactacaacggcaagttcaagggcagagccacactgaccgccgatacctctagcagcacagcctacatgcagctgagcagcctgaccagcgaagatagcgccgtgtacttctgtgcccggtccatcacaacagtcgtgggctgcgctatggactattggggccagggaacaagcgtgaccgtgtctagtacgcgtgcctctacaaagggaccctccgtgtttcctctggctcccagcagcaagtctacaagcggaggaacagccgctctgggctgcctggtcaaggattactttcccgagcctgtgaccgtgtcctggaatagcggagcactgacaagcggcgtgcacacctttccagccgtgctgcaaagcagcggcctgtactctctgagcagcgtggtcacagtgcctagctctagcctgggcacccagacctacatctgcaatgtgaaccacaagcctagcaacaccaaggtggacaagagagtggaacccaagagctgtggtaccgtggctgaaggcaaaacagataatcagtacacactcttcgttgccggcggaaccgtgctgctcctgctctttgtgattagcatcacaacgattatcgtcatcttcctcaaccgcaggcggagaagagagaggcgcgatctgttcaccgagtcttgggatacacagaaagctccgaacaactatcggagccctatctccaccggacagcccacaaatcagtctatggacgacacacgcgaggacatctatgtcaattaccccactttttctaggcggcctaagaccagagtgcgcgccaagagaagcggatctggcgtgaagcagaccctgaatttcgacctgctgaagctggctggcgacgtggaatccaacccaggcccttctagaggcgggatccacaccatgtccgactccaaggaggtccctagccttccatttttgcgacacttgctcgaagagttggacagccatgaggacagcttgctgctgtttctgtgtcacgacgcggccccgggctgcacgacggtcacgcaagctttgtgctcgcttagccaacagcgcaagctgaccctcgcggctctggtcgagatgctctacgtgctgcagcgtatggatcttctcaagagccgcttcgggctcagcaaggagggggccgagcaattgctgggcacaagctttctcacgcgctaccgcaagctcatggtttgcgtgggtgaggagctcgactcgagcgagctacgcgctctacgcttgttcgcgtgcaacctgaatccgagcctgagcacggcgctttctgagagcagccgctttgtcgagcttgtactcgcgcttgaaaacgtaggactcgtctcgccatcgagtgtttccgtgcttgcggacatgttgcgcactcttcggcgcctcgatttgtgccagcagcttgttgagtacgaacaacaagagcaagccaggtaccgttactgttacgcggcctcgccctcattgccagttcgtacgttacgtcgggggcacggcgcgagtgaacacgagcagctgtgcatgcccgtgcaagaatcctctgacagccccgagctgctgcgcacgcccgtacaagaatcctccagcgacagccccgagcaaacgact

SEQ ID NO: 1877 - DNA, 2991 bp, Artificial Sequence
  Synthetic Polynucleotide
atggccttaccagtgaccgccttgctcctgccgctggccttgctgctccacgccgccaggccggacatccagatgacacagagccctagcagcctgtctgccagcgtgggagacagagtgaccatcacatgcaaggccagcgaccacatcaacaactggctggcctggtatcagcagaagcctggacaggcccctaagctgctgatctacggcgctaccacactggaaacaggcgtgcccagcagattttctggcagcggctctggcaccgactacaccctgacaatatccagcctccagcctgaggacttcgccacctactactgtcagcagagctggaacaccccttggacattcggccagggcaccaagctggaaatcaagagactcgagggacagcctaaggccaatcctaccgtgacactgttccctccaagcagcgaagaactccaggccaacaaggccacacttgtgtgcctgatctccgacttctaccctggggctgtgacagtggcttggaaggccgatggatctcctgtgaaagccggcgtggaaaccaccaagccatccaagcagagcaacaacaaatacgccgccagctcctacctgagcctgacacctgagcagtggaagtcccacagatcctacagctgccaagtgacccacgaaggcagcaccgtggaaaagacagtggcccctacagagtgcagcggatccatcggctggctgttgctccaggcccctcggtgggtgttcaaggaggaagaccctattcacctgaggtgtcacagctggaagaacactgctctgcataaggtcacatatttacagaatggcaaaggcaggaagtattttcatcataattctgacttctacattccaaaagccacactcaaagacagcggctcctacttctgcagggggcttgttgggagtaaaaatgtgtcttcagagactgtgaacatcaccatcactcaaggtttggcagtgtcaaccatctcatcattctttccacctggctaccaagtgtccttctgcctggtcatggtgctgctgttcgccgtggataccggcctgtacttcagcgtcaagaccaacatccggtccagcaccagagactggaaggaccacaagttcaagtggcggaaggaccctcaggacaagagggccaagcgatctggatctggagcaacaaacttctcactactcaaacaagcaggtgacgtggaggagaatcccgggcctactagtatggactggatttggcgcatccttttccttgtcggcgctgctaccggcgcgcattccttcgaacaagttcagcttcaacagcctggcgctgagctggtcaaacctggcgcttctgtgaagatgagctgcaaagccagcggctacgccttcagcagctactggatcaactggatgaagcagaaacccggccagggactcgaatggatcggccaaatctatcccggcgacggcgacaccaactacaacggcaagttcaagggcagagccacactgaccgccgatacctctagcagcacagcctacatgcagctgagcagcctgaccagcgaagatagcgccgtgtacttctgtgcccggtccatcacaacagtcgtgggctgcgctatggactattggggccagggaacaagcgtgaccgtgtctagtacgcgtgcctctacaaagggaccctccgtgtttcctctggctcccagcagcaagtctacaagcggaggaacagccgctctgggctgcctggtcaaggattactttcccgagcctgtgaccgtgtcctggaatagcggagcactgacaagcggcgtgcacacctttccagccgtgctgcaaagcagcggcctgtactctctgagcagcgtggtcacagtgcctagctctagcctgggcacccagacctacatctgcaatgtgaaccacaagcctagcaacaccaaggtggacaagagagtggaacccaagagctgtggtaccgtggctgaaggcaaaacagataatcagtacacactcttcgttgccggcggaaccgtgctgctcctgctctttgtgattagcatcacaacgattatcgtcatcttcctcaaccgcaggcggagaagagagaggcgcgatctgttcaccgagtcttgggatacacagaaagctccgaacaactatcggagccctatctccaccggacagcccacaaatcagtctatggacgacacacgcgaggacatctatgtcaattaccccactttttctaggcggcctaagaccagagtgcgcgccaagagaagcggatctggcgtgaagcagaccctgaatttcgacctgctgaagctggctggcgacgtggaatccaacccaggcccttctagaggccatatgaccgagtacaagcccacggtgcgcctcgccacccgcgacgacgtccccagggccgtacgcaccctcgccgccgcgttcgccgactaccccgccacgcgccacaccgtcgatccggaccgccacatcgagcgggtcaccgagctgcaagaactcttcctcacgcgcgtcgggctcgacatcggcaaggtgtgggtcgcggacgacggcgccgcggtggcggtctggaccacgccggagagcgtcgaagcgggggcggtgttcgccgagatcggcccgcgcatggccgagttgagcggttcccggctggccgcgcagcaacagatggaaggcctcctggcgccgcaccggcccaaggagcccgcgtggttcctggccaccgtcggcgtctcgcccgaccaccagggcaagggtctgggcagcgccgtcgtgctccccggagtggaggcggccgagcgcgccggggtgcccgccttcctggagacctccgcgccccgcaacctccccttctacgagcggctcggcttcaccgtcaccgccgacgtcgaggtgcccgaaggaccgcgcacctggtgcatgacccgcaagcccggtgcctga

SEQ ID NO: 1878 - DNA, 3402 bp, Artificial Sequence
  Synthetic Polynucleotide
atggccttaccagtgaccgccttgctcctgccgctggccttgctgctccacgccgccaggccggaagtgcagctggttgaatctggcggaggactggttcaggctggcggatctctgagactgtcttgtgccgccagcggcagaacctttagcatgggctggtttagacaggcccctggcaaagagagagagttcgtcgccgccatcacatactctggcggcagcccttactacgccgactctgtgaagggcagattcaccatcagccgggacaacgccaagaacaccgtgtacctccagatgaacagcctgaagcctgaggacaccgccgtgtactactgcgccgccaatccaacatacggcagcgactggaacgccgagaattggggccagggaacccaagtgacagtgtctagcggtaccggcggaggcggatctggcggcggaggtagcggtggcggaggatctgaattcgacatccagatgacacagagccctagcagcctgtctgccagcgtgggagacagagtgaccatcacatgcaaggccagcgaccacatcaacaactggctggcctggtatcagcagaagcctggacaggcccctaagctgctgatctacggcgctaccacactggaaacaggcgtgcccagcagattttctggcagcggctctggcaccgactacaccctgacaatatccagcctccagcctgaggacttcgccacctactactgtcagcagagctggaacaccccttggacattcggccagggcaccaagctggaaatcaagagactcgagggacagcctaaggccaatcctaccgtgacactgttccctccaagcagcgaagaactccaggccaacaaggccacacttgtgtgcctgatctccgacttctaccctggggctgtgacagtggcttggaaggccgatggatctcctgtgaaagccggcgtggaaaccaccaagccatccaagcagagcaacaacaaatacgccgccagctcctacctgagcctgacacctgagcagtggaagtcccacagatcctacagctgccaagtgacccacgaaggcagcaccgtggaaaagacagtggcccctacagagtgcagcggatccatcggctggctgttgctccaggcccctcggtgggtgttcaaggaggaagaccctattcacctgaggtgtcacagctggaagaacactgctctgcataaggtcacatatttacagaatggcaaaggcaggaagtattttcatcataattctgacttctacattccaaaagccacactcaaagacagcggctcctacttctgcagggggcttgttgggagtaaaaatgtgtcttcagagactgtgaacatcaccatcactcaaggtttggcagtgtcaaccatctcatcattctttccacctggctaccaagtgtccttctgcctggtcatggtgctgctgttcgccgtggataccggcctgtacttcagcgtcaagaccaacatccggtccagcaccagagactggaaggaccacaagttcaagtggcggaaggaccctcaggacaagagggccaagcgatctggatctggagcaacaaacttctcactactcaaacaagcaggtgacgtggaggagaatcccgggcctactagtatggactggatttggcgcatccttttccttgtcggcgctgctaccggcgcgcattccttcgaacaagttcagcttcaacagcctggcgctgagctggtcaaacctggcgcttctgtgaagatgagctgcaaagccagcggctacgccttcagcagctactggatcaactggatgaagcagaaacccggccagggactcgaatggatcggccaaatctatcccggcgacggcgacaccaactacaacggcaagttcaagggcagagccacactgaccgccgatacctctagcagcacagcctacatgcagctgagcagcctgaccagcgaagatagcgccgtgtacttctgtgcccggtccatcacaacagtcgtgggctgcgctatggactattggggccagggaacaagcgtgaccgtgtctagtacgcgtgcctctacaaagggaccctccgtgtttcctctggctcccagcagcaagtctacaagcggaggaacagccgctctgggctgcctggtcaaggattactttcccgagcctgtgaccgtgtcctggaatagcggagcactgacaagcggcgtgcacacctttccagccgtgctgcaaagcagcggcctgtactctctgagcagcgtggtcacagtgcctagctctagcctgggcacccagacctacatctgcaatgtgaaccacaagcctagcaacaccaaggtggacaagagagtggaacccaagagctgtggtaccgtggctgaaggcaaaacagataatcagtacacactcttcgttgccggcggaaccgtgctgctcctgctctttgtgattagcatcacaacgattatcgtcatcttcctcaaccgcaggcggagaagagagaggcgcgatctgttcaccgagtcttgggatacacagaaagctccgaacaactatcggagccctatctccaccggacagcccacaaatcagtctatggacgacacacgcgaggacatctatgtcaattaccccactttttctaggcggcctaagaccagagtgcgcgccaagagaagcggatctggcgtgaagcagaccctgaatttcgacctgctgaagctggctggcgacgtggaatccaacccaggcccttctagaggccatatgaccgagtacaagcccacggtgcgcctcgccacccgcgacgacgtccccagggccgtacgcaccctcgccgccgcgttcgccgactaccccgccacgcgccacaccgtcgatccggaccgccacatcgagcgggtcaccgagctgcaagaactcttcctcacgcgcgtcgggctcgacatcggcaaggtgtgggtcgcggacgacggcgccgcggtggcggtctggaccacgccggagagcgtcgaagcgggggcggtgttcgccgagatcggcccgcgcatggccgagttgagcggttcccggctggccgcgcagcaacagatggaaggcctcctggcgccgcaccggcccaaggagcccgcgtggttcctggccaccgtcggcgtctcgcccgaccaccagggcaagggtctgggcagcgccgtcgtgctccccggagtggaggcggccgagcgcgccggggtgcccgccttcctggagacctccgcgccccgcaacctccccttctacgagcggctcggcttcaccgtcaccgccgacgtcgaggtgcccgaaggaccgcgcacctggtgcatgacccgcaagcccggtgcctga

SEQ ID NO: 1879 - DNA, 3813 bp, Artificial Sequence
  Synthetic Polynucleotide
atggccttaccagtgaccgccttgctcctgccgctggccttgctgctccacgccgccaggccggaagtgcagctggttgaatctggcggaggactggttcaggctggcggatctctgagactgtcttgtgccgccagcggcagaacctttagcatgggctggtttagacaggcccctggcaaagagagagagttcgtcgccgccatcacatactctggcggcagcccttactacgccgactctgtgaagggcagattcaccatcagccgggacaacgccaagaacaccgtgtacctccagatgaacagcctgaagcctgaggacaccgccgtgtactactgcgccgccaatccaacatacggcagcgactggaacgccgagaattggggccagggaacccaagtgacagtgtctagcggtaccggcggaggcggatctggcggcggaggtagcggtggcggaggatctgaattcgacatccagatgacacagagccctagcagcctgtctgccagcgtgggagacagagtgaccatcacatgcaaggccagcgaccacatcaacaactggctggcctggtatcagcagaagcctggacaggcccctaagctgctgatctacggcgctaccacactggaaacaggcgtgcccagcagattttctggcagcggctctggcaccgactacaccctgacaatatccagcctccagcctgaggacttcgccacctactactgtcagcagagctggaacaccccttggacattcggccagggcaccaagctggaaatcaagagactcgagggacagcctaaggccaatcctaccgtgacactgttccctccaagcagcgaagaactccaggccaacaaggccacacttgtgtgcctgatctccgacttctaccctggggctgtgacagtggcttggaaggccgatggatctcctgtgaaagccggcgtggaaaccaccaagccatccaagcagagcaacaacaaatacgccgccagctcctacctgagcctgacacctgagcagtggaagtcccacagatcctacagctgccaagtgacccacgaaggcagcaccgtggaaaagacagtggcccctacagagtgcagcggatccatcggctggctgttgctccaggcccctcggtgggtgttcaaggaggaagaccctattcacctgaggtgtcacagctggaagaacactgctctgcataaggtcacatatttacagaatggcaaaggcaggaagtattttcatcataattctgacttctacattccaaaagccacactcaaagacagcggctcctacttctgcagggggcttgttgggagtaaaaatgtgtcttcagagactgtgaacatcaccatcactcaaggtttggcagtgtcaaccatctcatcattctttccacctggctaccaagtgtccttctgcctggtcatggtgctgctgttcgccgtggataccggcctgtacttcagcgtcaagaccaacatccggtccagcaccagagactggaaggaccacaagttcaagtggcggaaggaccctcaggacaagagggccaagcgatctggatctggagcaacaaacttctcactactcaaacaagcaggtgacgtggaggagaatcccgggcctactagtatggactggatttggcgcatccttttccttgtcggcgctgctaccggcgcgcattccgggcccgaagtgcaactggttgaatccggtggcggcctggtgcaagcaggcggatctctcagacttagctgtgccgcctccggcagaaccttcacaatgggatggtttaggcaggctccagggaaagagagagagttcgtcgccgccatctctctgtctcccacactggcctactacgccgactctgtgaaaggccggttcaccatctccagagataatgccaagaacaccgtggtgctgcaaatgaactctctgaaacccgaggatacagccctgtactattgtgccgctgaccggaagtccgtgatgagcatcagacccgattactggggacagggcacacaagtcacagtgtcctctggatccggcggcggaggatctggcggaggcggatctgggggcggaggctctttcgaacaagttcagcttcaacagcctggcgctgagctggtcaaacctggcgcttctgtgaagatgagctgcaaagccagcggctacgccttcagcagctactggatcaactggatgaagcagaaacccggccagggactcgaatggatcggccaaatctatcccggcgacggcgacaccaactacaacggcaagttcaagggcagagccacactgaccgccgatacctctagcagcacagcctacatgcagctgagcagcctgaccagcgaagatagcgccgtgtacttctgtgcccggtccatcacaacagtcgtgggctgcgctatggactattggggccagggaacaagcgtgaccgtgtctagtacgcgtgcctctacaaagggaccctccgtgtttcctctggctcccagcagcaagtctacaagcggaggaacagccgctctgggctgcctggtcaaggattactttcccgagcctgtgaccgtgtcctggaatagcggagcactgacaagcggcgtgcacacctttccagccgtgctgcaaagcagcggcctgtactctctgagcagcgtggtcacagtgcctagctctagcctgggcacccagacctacatctgcaatgtgaaccacaagcctagcaacaccaaggtggacaagagagtggaacccaagagctgtggtaccgtggctgaaggcaaaacagataatcagtacacactcttcgttgccggcggaaccgtgctgctcctgctctttgtgattagcatcacaacgattatcgtcatcttcctcaaccgcaggcggagaagagagaggcgcgatctgttcaccgagtcttgggatacacagaaagctccgaacaactatcggagccctatctccaccggacagcccacaaatcagtctatggacgacacacgcgaggacatctatgtcaattaccccactttttctaggcggcctaagaccagagtgcgcgccaagagaagcggatctggcgtgaagcagaccctgaatttcgacctgctgaagctggctggcgacgtggaatccaacccaggcccttctagaggccatatgaccgagtacaagcccacggtgcgcctcgccacccgcgacgacgtccccagggccgtacgcaccctcgccgccgcgttcgccgactaccccgccacgcgccacaccgtcgatccggaccgccacatcgagcgggtcaccgagctgcaagaactcttcctcacgcgcgtcgggctcgacatcggcaaggtgtgggtcgcggacgacggcgccgcggtggcggtctggaccacgccggagagcgtcgaagcgggggcggtgttcgccgagatcggcccgcgcatggccgagttgagcggttcccggctggccgcgcagcaacagatggaaggcctcctggcgccgcaccggcccaaggagcccgcgtggttcctggccaccgtcggcgtctcgcccgaccaccagggcaagggtctgggcagcgccgtcgtgctccccggagtggaggcggccgagcgcgccggggtgcccgccttcctggagacctccgcgccccgcaacctccccttctacgagcggctcggcttcaccgtcaccgccgacgtcgaggtgcccgaaggaccgcgcacctggtgcatgacccgcaagcccggtgcctga

SEQ ID NO: 1880 - DNA, 3012 bp, Artificial Sequence
  Synthetic Polynucleotide
atggccttaccagtgaccgccttgctcctgccgctggccttgctgctccacgccgccaggccggaagtgcagctggttgaatctggcggaggactggttcaggctggcggatctctgagactgtcttgtgccgccagcggcagaacctttagcatgggctggtttagacaggcccctggcaaagagagagagttcgtcgccgccatcacatactctggcggcagcccttactacgccgactctgtgaagggcagattcaccatcagccgggacaacgccaagaacaccgtgtacctccagatgaacagcctgaagcctgaggacaccgccgtgtactactgcgccgccaatccaacatacggcagcgactggaacgccgagaattggggccagggaacccaagtgacagtgtctagcctcgagggacagcctaaggccaatcctaccgtgacactgttccctccaagcagcgaagaactccaggccaacaaggccacacttgtgtgcctgatctccgacttctaccctggggctgtgacagtggcttggaaggccgatggatctcctgtgaaagccggcgtggaaaccaccaagccatccaagcagagcaacaacaaatacgccgccagctcctacctgagcctgacacctgagcagtggaagtcccacagatcctacagctgccaagtgacccacgaaggcagcaccgtggaaaagacagtggcccctacagagtgcagcggatccatcggctggctgttgctccaggcccctcggtgggtgttcaaggaggaagaccctattcacctgaggtgtcacagctggaagaacactgctctgcataaggtcacatatttacagaatggcaaaggcaggaagtattttcatcataattctgacttctacattccaaaagccacactcaaagacagcggctcctacttctgcagggggcttgttgggagtaaaaatgtgtcttcagagactgtgaacatcaccatcactcaaggtttggcagtgtcaaccatctcatcattctttccacctggctaccaagtgtccttctgcctggtcatggtgctgctgttcgccgtggataccggcctgtacttcagcgtcaagaccaacatccggtccagcaccagagactggaaggaccacaagttcaagtggcggaaggaccctcaggacaagagggccaagcgatctggatctggagcaacaaacttctcactactcaaacaagcaggtgacgtggaggagaatcccgggcctactagtatggactggatttggcgcatccttttccttgtcggcgctgctaccggcgcgcattccgggcccgaagtgcaactggttgaatccggtggcggcctggtgcaagcaggcggatctctcagacttagctgtgccgcctccggcagaaccttcacaatgggatggtttaggcaggctccagggaaagagagagagttcgtcgccgccatctctctgtctcccacactggcctactacgccgactctgtgaaaggccggttcaccatctccagagataatgccaagaacaccgtggtgctgcaaatgaactctctgaaacccgaggatacagccctgtactattgtgccgctgaccggaagtccgtgatgagcatcagacccgattactggggacagggcacacaagtcacagtgtcctctacgcgtgcctctacaaagggaccctccgtgtttcctctggctcccagcagcaagtctacaagcggaggaacagccgctctgggctgcctggtcaaggattactttcccgagcctgtgaccgtgtcctggaatagcggagcactgacaagcggcgtgcacacctttccagccgtgctgcaaagcagcggcctgtactctctgagcagcgtggtcacagtgcctagctctagcctgggcacccagacctacatctgcaatgtgaaccacaagcctagcaacaccaaggtggacaagagagtggaacccaagagctgtggtaccgtggctgaaggcaaaacagataatcagtacacactcttcgttgccggcggaaccgtgctgctcctgctctttgtgattagcatcacaacgattatcgtcatcttcctcaaccgcaggcggagaagagagaggcgcgatctgttcaccgagtcttgggatacacagaaagctccgaacaactatcggagccctatctccaccggacagcccacaaatcagtctatggacgacacacgcgaggacatctatgtcaattaccccactttttctaggcggcctaagaccagagtgcgcgccaagagaagcggatctggcgtgaagcagaccctgaatttcgacctgctgaagctggctggcgacgtggaatccaacccaggcccttctagaggccatatgaccgagtacaagcccacggtgcgcctcgccacccgcgacgacgtccccagggccgtacgcaccctcgccgccgcgttcgccgactaccccgccacgcgccacaccgtcgatccggaccgccacatcgagcgggtcaccgagctgcaagaactcttcctcacgcgcgtcgggctcgacatcggcaaggtgtgggtcgcggacgacggcgccgcggtggcggtctggaccacgccggagagcgtcgaagcgggggcggtgttcgccgagatcggcccgcgcatggccgagttgagcggttcccggctggccgcgcagcaacagatggaaggcctcctggcgccgcaccggcccaaggagcccgcgtggttcctggccaccgtcggcgtctcgcccgaccaccagggcaagggtctgggcagcgccgtcgtgctccccggagtggaggcggccgagcgcgccggggtgcccgccttcctggagacctccgcgccccgcaacctccccttctacgagcggctcggcttcaccgtcaccgccgacgtcgaggtgcccgaaggaccgcgcacctggtgcatgacccgcaagcccggtgcctga

SEQ ID NO: 1881 - DNA, 3036 bp, Artificial Sequence
  Synthetic Polynucleotide
atggccttaccagtgaccgccttgctcctgccgctggccttgctgctccacgccgccaggccggacatccagatgacacagagccctagcagcctgtctgccagcgtgggagacagagtgaccatcacatgcaaggccagcgaccacatcaacaactggctggcctggtatcagcagaagcctggacaggcccctaagctgctgatctacggcgctaccacactggaaacaggcgtgcccagcagattttctggcagcggctctggcaccgactacaccctgacaatatccagcctccagcctgaggacttcgccacctactactgtcagcagagctggaacaccccttggacattcggccagggcaccaagctggaaatcaagagactcgaggacctgaagaacgtgttcccacctgaggtggccgtgttcgagcctagcgaggccgagatcagccacacccagaaagccaccctcgtgtgcctggctaccggcttctaccccgaccatgtggaactgtcttggtgggtcaacggcaaagaggtgcacagcggcgtgtctaccgacccccagccactgaaagaacagcccgccctgaacgacagccggtactgcctgagcagcagactgagagtgtccgccaccttctggcagaacccccggaaccacttcagatgccaggtgcagttctacggcctgagcgagaacgacgagtggacccaggacagagccaagcccgtgacccagatcgtgtctgccgaagcctggggcagagccgattgcggatccatcggctggctgttgctccaggcccctcggtgggtgttcaaggaggaagaccctattcacctgaggtgtcacagctggaagaacactgctctgcataaggtcacatatttacagaatggcaaaggcaggaagtattttcatcataattctgacttctacattccaaaagccacactcaaagacagcggctcctacttctgcagggggcttgttgggagtaaaaatgtgtcttcagagactgtgaacatcaccatcactcaaggtttggcagtgtcaaccatctcatcattctttccacctggctaccaagtgtccttctgcctggtcatggtgctgctgttcgccgtggataccggcctgtacttcagcgtcaagaccaacatccggtccagcaccagagactggaaggaccacaagttcaagtggcggaaggaccctcaggacaagagggccaagcgatctggatctggagcaacaaacttctcactactcaaacaagcaggtgacgtggaggagaatcccgggcctactagtatggactggatttggcgcatccttttccttgtcggcgctgctaccggcgcgcattccttcgaacaagttcagcttcaacagcctggcgctgagctggtcaaacctggcgcttctgtgaagatgagctgcaaagccagcggctacgccttcagcagctactggatcaactggatgaagcagaaacccggccagggactcgaatggatcggccaaatctatcccggcgacggcgacaccaactacaacggcaagttcaagggcagagccacactgaccgccgatacctctagcagcacagcctacatgcagctgagcagcctgaccagcgaagatagcgccgtgtacttctgtgcccggtccatcacaacagtcgtgggctgcgctatggactattggggccagggaacaagcgtgaccgtgtctagtacgcgtatccagaaccctgatcctgccgtgtaccagctgcgggatagcaagagcagcgacaagagcgtgtgtctgttcaccgacttcgacagccagaccaacgtgtcccagagcaaggactccgacgtgtacatcaccgataagaccgtgctggacatgcggagcatggacttcaagagcaactccgccgtggcctggtccaacaagtccgatttcgcctgcgccaacgccttcaacaacagcattatccccgaggacacattcttcccaagccccgagagcagctgcggtaccgtggctgaaggcaaaacagataatcagtacacactcttcgttgccggcggaaccgtgctgctcctgctctttgtgattagcatcacaacgattatcgtcatcttcctcaaccgcaggcggagaagagagaggcgcgatctgttcaccgagtcttgggatacacagaaagctccgaacaactatcggagccctatctccaccggacagcccacaaatcagtctatggacgacacacgcgaggacatctatgtcaattaccccactttttctaggcggcctaagaccagagtgcgcgccaagagaagcggatctggcgtgaagcagaccctgaatttcgacctgctgaagctggctggcgacgtggaatccaacccaggcccttctagaggccatatgaccgagtacaagcccacggtgcgcctcgccacccgcgacgacgtccccagggccgtacgcaccctcgccgccgcgttcgccgactaccccgccacgcgccacaccgtcgatccggaccgccacatcgagcgggtcaccgagctgcaagaactcttcctcacgcgcgtcgggctcgacatcggcaaggtgtgggtcgcggacgacggcgccgcggtggcggtctggaccacgccggagagcgtcgaagcgggggcggtgttcgccgagatcggcccgcgcatggccgagttgagcggttcccggctggccgcgcagcaacagatggaaggcctcctggcgccgcaccggcccaaggagcccgcgtggttcctggccaccgtcggcgtctcgcccgaccaccagggcaagggtctgggcagcgccgtcgtgctccccggagtggaggcggccgagcgcgccggggtgcccgccttcctggagacctccgcgccccgcaacctccccttctacgagcggctcggcttcaccgtcaccgccgacgtcgaggtgcccgaaggaccgcgcacctggtgcatgacccgcaagcccggtgcctga

SEQ ID NO: 1882 - DNA, 3447 bp, Artificial Sequence
  Synthetic Polynucleotide
atggccttaccagtgaccgccttgctcctgccgctggccttgctgctccacgccgccaggccggaagtgcagctggttgaatctggcggaggactggttcaggctggcggatctctgagactgtcttgtgccgccagcggcagaacctttagcatgggctggtttagacaggcccctggcaaagagagagagttcgtcgccgccatcacatactctggcggcagcccttactacgccgactctgtgaagggcagattcaccatcagccgggacaacgccaagaacaccgtgtacctccagatgaacagcctgaagcctgaggacaccgccgtgtactactgcgccgccaatccaacatacggcagcgactggaacgccgagaattggggccagggaacccaagtgacagtgtctagcggtaccggcggaggcggatctggcggcggaggtagcggtggcggaggatctgaattcgacatccagatgacacagagccctagcagcctgtctgccagcgtgggagacagagtgaccatcacatgcaaggccagcgaccacatcaacaactggctggcctggtatcagcagaagcctggacaggcccctaagctgctgatctacggcgctaccacactggaaacaggcgtgcccagcagattttctggcagcggctctggcaccgactacaccctgacaatatccagcctccagcctgaggacttcgccacctactactgtcagcagagctggaacaccccttggacattcggccagggcaccaagctggaaatcaagagactcgaggacctgaagaacgtgttcccacctgaggtggccgtgttcgagcctagcgaggccgagatcagccacacccagaaagccaccctcgtgtgcctggctaccggcttctaccccgaccatgtggaactgtcttggtgggtcaacggcaaagaggtgcacagcggcgtgtctaccgacccccagccactgaaagaacagcccgccctgaacgacagccggtactgcctgagcagcagactgagagtgtccgccaccttctggcagaacccccggaaccacttcagatgccaggtgcagttctacggcctgagcgagaacgacgagtggacccaggacagagccaagcccgtgacccagatcgtgtctgccgaagcctggggcagagccgattgcggatccatcggctggctgttgctccaggcccctcggtgggtgttcaaggaggaagaccctattcacctgaggtgtcacagctggaagaacactgctctgcataaggtcacatatttacagaatggcaaaggcaggaagtattttcatcataattctgacttctacattccaaaagccacactcaaagacagcggctcctacttctgcagggggcttgttgggagtaaaaatgtgtcttcagagactgtgaacatcaccatcactcaaggtttggcagtgtcaaccatctcatcattctttccacctggctaccaagtgtccttctgcctggtcatggtgctgctgttcgccgtggataccggcctgtacttcagcgtcaagaccaacatccggtccagcaccagagactggaaggaccacaagttcaagtggcggaaggaccctcaggacaagagggccaagcgatctggatctggagcaacaaacttctcactactcaaacaagcaggtgacgtggaggagaatcccgggcctactagtatggactggatttggcgcatccttttccttgtcggcgctgctaccggcgcgcattccttcgaacaagttcagcttcaacagcctggcgctgagctggtcaaacctggcgcttctgtgaagatgagctgcaaagccagcggctacgccttcagcagctactggatcaactggatgaagcagaaacccggccagggactcgaatggatcggccaaatctatcccggcgacggcgacaccaactacaacggcaagttcaagggcagagccacactgaccgccgatacctctagcagcacagcctacatgcagctgagcagcctgaccagcgaagatagcgccgtgtacttctgtgcccggtccatcacaacagtcgtgggctgcgctatggactattggggccagggaacaagcgtgaccgtgtctagtacgcgtatccagaaccctgatcctgccgtgtaccagctgcgggatagcaagagcagcgacaagagcgtgtgtctgttcaccgacttcgacagccagaccaacgtgtcccagagcaaggactccgacgtgtacatcaccgataagaccgtgctggacatgcggagcatggacttcaagagcaactccgccgtggcctggtccaacaagtccgatttcgcctgcgccaacgccttcaacaacagcattatccccgaggacacattcttcccaagccccgagagcagctgcggtaccgtggctgaaggcaaaacagataatcagtacacactcttcgttgccggcggaaccgtgctgctcctgctctttgtgattagcatcacaacgattatcgtcatcttcctcaaccgcaggcggagaagagagaggcgcgatctgttcaccgagtcttgggatacacagaaagctccgaacaactatcggagccctatctccaccggacagcccacaaatcagtctatggacgacacacgcgaggacatctatgtcaattaccccactttttctaggcggcctaagaccagagtgcgcgccaagagaagcggatctggcgtgaagcagaccctgaatttcgacctgctgaagctggctggcgacgtggaatccaacccaggcccttctagaggccatatgaccgagtacaagcccacggtgcgcctcgccacccgcgacgacgtccccagggccgtacgcaccctcgccgccgcgttcgccgactaccccgccacgcgccacaccgtcgatccggaccgccacatcgagcgggtcaccgagctgcaagaactcttcctcacgcgcgtcgggctcgacatcggcaaggtgtgggtcgcggacgacggcgccgcggtggcggtctggaccacgccggagagcgtcgaagcgggggcggtgttcgccgagatcggcccgcgcatggccgagttgagcggttcccggctggccgcgcagcaacagatggaaggcctcctggcgccgcaccggcccaaggagcccgcgtggttcctggccaccgtcggcgtctcgcccgaccaccagggcaagggtctgggcagcgccgtcgtgctccccggagtggaggcggccgagcgcgccggggtgcccgccttcctggagacctccgcgccccgcaacctccccttctacgagcggctcggcttcaccgtcaccgccgacgtcgaggtgcccgaaggaccgcgcacctggtgcatgacccgcaagcccggtgcctga

SEQ ID NO: 1883 - DNA, 3858 bp, Artificial Sequence
  Synthetic Polynucleotide
atggccttaccagtgaccgccttgctcctgccgctggccttgctgctccacgccgccaggccggaagtgcagctggttgaatctggcggaggactggttcaggctggcggatctctgagactgtcttgtgccgccagcggcagaacctttagcatgggctggtttagacaggcccctggcaaagagagagagttcgtcgccgccatcacatactctggcggcagcccttactacgccgactctgtgaagggcagattcaccatcagccgggacaacgccaagaacaccgtgtacctccagatgaacagcctgaagcctgaggacaccgccgtgtactactgcgccgccaatccaacatacggcagcgactggaacgccgagaattggggccagggaacccaagtgacagtgtctagcggtaccggcggaggcggatctggcggcggaggtagcggtggcggaggatctgaattcgacatccagatgacacagagccctagcagcctgtctgccagcgtgggagacagagtgaccatcacatgcaaggccagcgaccacatcaacaactggctggcctggtatcagcagaagcctggacaggcccctaagctgctgatctacggcgctaccacactggaaacaggcgtgcccagcagattttctggcagcggctctggcaccgactacaccctgacaatatccagcctccagcctgaggacttcgccacctactactgtcagcagagctggaacaccccttggacattcggccagggcaccaagctggaaatcaagagactcgaggacctgaagaacgtgttcccacctgaggtggccgtgttcgagcctagcgaggccgagatcagccacacccagaaagccaccctcgtgtgcctggctaccggcttctaccccgaccatgtggaactgtcttggtgggtcaacggcaaagaggtgcacagcggcgtgtctaccgacccccagccactgaaagaacagcccgccctgaacgacagccggtactgcctgagcagcagactgagagtgtccgccaccttctggcagaacccccggaaccacttcagatgccaggtgcagttctacggcctgagcgagaacgacgagtggacccaggacagagccaagcccgtgacccagatcgtgtctgccgaagcctggggcagagccgattgcggatccatcggctggctgttgctccaggcccctcggtgggtgttcaaggaggaagaccctattcacctgaggtgtcacagctggaagaacactgctctgcataaggtcacatatttacagaatggcaaaggcaggaagtattttcatcataattctgacttctacattccaaaagccacactcaaagacagcggctcctacttctgcagggggcttgttgggagtaaaaatgtgtcttcagagactgtgaacatcaccatcactcaaggtttggcagtgtcaaccatctcatcattctttccacctggctaccaagtgtccttctgcctggtcatggtgctgctgttcgccgtggataccggcctgtacttcagcgtcaagaccaacatccggtccagcaccagagactggaaggaccacaagttcaagtggcggaaggaccctcaggacaagagggccaagcgatctggatctggagcaacaaacttctcactactcaaacaagcaggtgacgtggaggagaatcccgggcctactagtatggactggatttggcgcatccttttccttgtcggcgctgctaccggcgcgcattccgggcccgaagtgcaactggttgaatccggtggcggcctggtgcaagcaggcggatctctcagacttagctgtgccgcctccggcagaaccttcacaatgggatggtttaggcaggctccagggaaagagagagagttcgtcgccgccatctctctgtctcccacactggcctactacgccgactctgtgaaaggccggttcaccatctccagagataatgccaagaacaccgtggtgctgcaaatgaactctctgaaacccgaggatacagccctgtactattgtgccgctgaccggaagtccgtgatgagcatcagacccgattactggggacagggcacacaagtcacagtgtcctctggatccggcggcggaggatctggcggaggcggatctgggggcggaggctctttcgaacaagttcagcttcaacagcctggcgctgagctggtcaaacctggcgcttctgtgaagatgagctgcaaagccagcggctacgccttcagcagctactggatcaactggatgaagcagaaacccggccagggactcgaatggatcggccaaatctatcccggcgacggcgacaccaactacaacggcaagttcaagggcagagccacactgaccgccgatacctctagcagcacagcctacatgcagctgagcagcctgaccagcgaagatagcgccgtgtacttctgtgcccggtccatcacaacagtcgtgggctgcgctatggactattggggccagggaacaagcgtgaccgtgtctagtacgcgtatccagaaccctgatcctgccgtgtaccagctgcgggatagcaagagcagcgacaagagcgtgtgtctgttcaccgacttcgacagccagaccaacgtgtcccagagcaaggactccgacgtgtacatcaccgataagaccgtgctggacatgcggagcatggacttcaagagcaactccgccgtggcctggtccaacaagtccgatttcgcctgcgccaacgccttcaacaacagcattatccccgaggacacattcttcccaagccccgagagcagctgcggtaccgtggctgaaggcaaaacagataatcagtacacactcttcgttgccggcggaaccgtgctgctcctgctctttgtgattagcatcacaacgattatcgtcatcttcctcaaccgcaggcggagaagagagaggcgcgatctgttcaccgagtcttgggatacacagaaagctccgaacaactatcggagccctatctccaccggacagcccacaaatcagtctatggacgacacacgcgaggacatctatgtcaattaccccactttttctaggcggcctaagaccagagtgcgcgccaagagaagcggatctggcgtgaagcagaccctgaatttcgacctgctgaagctggctggcgacgtggaatccaacccaggcccttctagaggccatatgaccgagtacaagcccacggtgcgcctcgccacccgcgacgacgtccccagggccgtacgcaccctcgccgccgcgttcgccgactaccccgccacgcgccacaccgtcgatccggaccgccacatcgagcgggtcaccgagctgcaagaactcttcctcacgcgcgtcgggctcgacatcggcaaggtgtgggtcgcggacgacggcgccgcggtggcggtctggaccacgccggagagcgtcgaagcgggggcggtgttcgccgagatcggcccgcgcatggccgagttgagcggttcccggctggccgcgcagcaacagatggaaggcctcctggcgccgcaccggcccaaggagcccgcgtggttcctggccaccgtcggcgtctcgcccgaccaccagggcaagggtctgggcagcgccgtcgtgctccccggagtggaggcggccgagcgcgccggggtgcccgccttcctggagacctccgcgccccgcaacctccccttctacgagcggctcggcttcaccgtcaccgccgacgtcgaggtgcccgaaggaccgcgcacctggtgcatgacccgcaagcccggtgcctga

SEQ ID NO: 1884 - DNA, 3057 bp, Artificial Sequence
  Synthetic Polynucleotide
atggccttaccagtgaccgccttgctcctgccgctggccttgctgctccacgccgccaggccggaagtgcagctggttgaatctggcggaggactggttcaggctggcggatctctgagactgtcttgtgccgccagcggcagaacctttagcatgggctggtttagacaggcccctggcaaagagagagagttcgtcgccgccatcacatactctggcggcagcccttactacgccgactctgtgaagggcagattcaccatcagccgggacaacgccaagaacaccgtgtacctccagatgaacagcctgaagcctgaggacaccgccgtgtactactgcgccgccaatccaacatacggcagcgactggaacgccgagaattggggccagggaacccaagtgacagtgtctagcctcgaggacctgaagaacgtgttcccacctgaggtggccgtgttcgagcctagcgaggccgagatcagccacacccagaaagccaccctcgtgtgcctggctaccggcttctaccccgaccatgtggaactgtcttggtgggtcaacggcaaagaggtgcacagcggcgtgtctaccgacccccagccactgaaagaacagcccgccctgaacgacagccggtactgcctgagcagcagactgagagtgtccgccaccttctggcagaacccccggaaccacttcagatgccaggtgcagttctacggcctgagcgagaacgacgagtggacccaggacagagccaagcccgtgacccagatcgtgtctgccgaagcctggggcagagccgattgcggatccatcggctggctgttgctccaggcccctcggtgggtgttcaaggaggaagaccctattcacctgaggtgtcacagctggaagaacactgctctgcataaggtcacatatttacagaatggcaaaggcaggaagtattttcatcataattctgacttctacattccaaaagccacactcaaagacagcggctcctacttctgcagggggcttgttgggagtaaaaatgtgtcttcagagactgtgaacatcaccatcactcaaggtttggcagtgtcaaccatctcatcattctttccacctggctaccaagtgtccttctgcctggtcatggtgctgctgttcgccgtggataccggcctgtacttcagcgtcaagaccaacatccggtccagcaccagagactggaaggaccacaagttcaagtggcggaaggaccctcaggacaagagggccaagcgatctggatctggagcaacaaacttctcactactcaaacaagcaggtgacgtggaggagaatcccgggcctactagtatggactggatttggcgcatccttttccttgtcggcgctgctaccggcgcgcattccgggcccgaagtgcaactggttgaatccggtggcggcctggtgcaagcaggcggatctctcagacttagctgtgccgcctccggcagaaccttcacaatgggatggtttaggcaggctccagggaaagagagagagttcgtcgccgccatctctctgtctcccacactggcctactacgccgactctgtgaaaggccggttcaccatctccagagataatgccaagaacaccgtggtgctgcaaatgaactctctgaaacccgaggatacagccctgtactattgtgccgctgaccggaagtccgtgatgagcatcagacccgattactggggacagggcacacaagtcacagtgtcctctacgcgtatccagaaccctgatcctgccgtgtaccagctgcgggatagcaagagcagcgacaagagcgtgtgtctgttcaccgacttcgacagccagaccaacgtgtcccagagcaaggactccgacgtgtacatcaccgataagaccgtgctggacatgcggagcatggacttcaagagcaactccgccgtggcctggtccaacaagtccgatttcgcctgcgccaacgccttcaacaacagcattatccccgaggacacattcttcccaagccccgagagcagctgcggtaccgtggctgaaggcaaaacagataatcagtacacactcttcgttgccggcggaaccgtgctgctcctgctctttgtgattagcatcacaacgattatcgtcatcttcctcaaccgcaggcggagaagagagaggcgcgatctgttcaccgagtcttgggatacacagaaagctccgaacaactatcggagccctatctccaccggacagcccacaaatcagtctatggacgacacacgcgaggacatctatgtcaattaccccactttttctaggcggcctaagaccagagtgcgcgccaagagaagcggatctggcgtgaagcagaccctgaatttcgacctgctgaagctggctggcgacgtggaatccaacccaggcccttctagaggccatatgaccgagtacaagcccacggtgcgcctcgccacccgcgacgacgtccccagggccgtacgcaccctcgccgccgcgttcgccgactaccccgccacgcgccacaccgtcgatccggaccgccacatcgagcgggtcaccgagctgcaagaactcttcctcacgcgcgtcgggctcgacatcggcaaggtgtgggtcgcggacgacggcgccgcggtggcggtctggaccacgccggagagcgtcgaagcgggggcggtgttcgccgagatcggcccgcgcatggccgagttgagcggttcccggctggccgcgcagcaacagatggaaggcctcctggcgccgcaccggcccaaggagcccgcgtggttcctggccaccgtcggcgtctcgcccgaccaccagggcaagggtctgggcagcgccgtcgtgctccccggagtggaggcggccgagcgcgccggggtgcccgccttcctggagacctccgcgccccgcaacctccccttctacgagcggctcggcttcaccgtcaccgccgacgtcgaggtgcccgaaggaccgcgcacctggtgcatgacccgcaagcccggtgcctga

SEQ ID NO: 1885 - DNA, 1635 bp, Artificial Sequence; identical to SEQ ID NO: 1664
  Synthetic Polynucleotide

SEQ ID NO: 1886 - DNA, 2196 bp, Artificial Sequence
  Synthetic Polynucleotide
atggccttaccagtgaccgccttgctcctgccgctggccttgctgctccacgccgccaggccggacatccagatgacacagagccctagcagcctgtctgccagcgtgggagacagagtgaccatcacatgcaaggccagcgaccacatcaacaactggctggcctggtatcagcagaagcctggacaggcccctaagctgctgatctacggcgctaccacactggaaacaggcgtgcccagcagattttctggcagcggctctggcaccgactacaccctgacaatatccagcctccagcctgaggacttcgccacctactactgtcagcagagctggaacaccccttggacattcggccagggcaccaagctggaaatcaagagactcgaggtggccgagggcaagaccgacaaccagtacaccctgtttgtggctggcggcacagttctgctgctgctgttcgtgatctccatcacgactatcatcgtgatctttctgaaccggcggaggcggagagagcggagggatctgtttacagagagctgggacacccagaaggcccctaacaactacagaagccccatcagcaccggccagcctaccaaccagagcatggacgatacccgcgaggacatctacgtgaactaccctaccttcagcagacggcccaagacaagagttagggccaagcgatctggatctggagcaacaaacttctcactactcaaacaagcaggtgacgtggaggagaatcccgggcctactagtatggactggatttggcgcatccttttccttgtcggcgctgctaccggcgcgcattccttcgaacaagttcagcttcaacagcctggcgctgagctggtcaaacctggcgcttctgtgaagatgagctgcaaagccagcggctacgccttcagcagctactggatcaactggatgaagcagaaacccggccagggactcgaatggatcggccaaatctatcccggcgacggcgacaccaactacaacggcaagttcaagggcagagccacactgaccgccgatacctctagcagcacagcctacatgcagctgagcagcctgaccagcgaagatagcgccgtgtacttctgtgcccggtccatcacaacagtcgtgggctgcgctatggactattggggccagggaacaagcgtgaccgtgtctagtacgcgtgtggctgaaggcaaaacagataatcagtacacactcttcgttgccggcggaaccgtgctgctcctgctctttgtgattagcatcacaacgattatcgtcatcttcctcaaccgcaggcggagaagagagaggcgcgatctgttcaccgagtcttgggatacacagaaagctccgaacaactatcggagccctatctccaccggacagcccacaaatcagtctatggacgacacacgcgaggacatctatgtcaattaccccactttttctaggcggcctaagaccagagtgcgcgccaagagaagcggatctggcgtgaagcagaccctgaatttcgacctgctgaagctggctggcgacgtggaatccaacccaggcccttctagaggccatatgaccgagtacaagcccacggtgcgcctcgccacccgcgacgacgtccccagggccgtacgcaccctcgccgccgcgttcgccgactaccccgccacgcgccacaccgtcgatccggaccgccacatcgagcgggtcaccgagctgcaagaactcttcctcacgcgcgtcgggctcgacatcggcaaggtgtgggtcgcggacgacggcgccgcggtggcggtctggaccacgccggagagcgtcgaagcgggggcggtgttcgccgagatcggcccgcgcatggccgagttgagcggttcccggctggccgcgcagcaacagatggaaggcctcctggcgccgcaccggcccaaggagcccgcgtggttcctggccaccgtcggcgtctcgcccgaccaccagggcaagggtctgggcagcgccgtcgtgctccccggagtggaggcggccgagcgcgccggggtgcccgccttcctggagacctccgcgccccgcaacctccccttctacgagcggctcggcttcaccgtcaccgccgacgtcgaggtgcccgaaggaccgcgcacctggtgcatgacccgcaagcccggtgcctga

SEQ ID NO: 1887 - DNA, 2358 bp, Artificial Sequence
  Synthetic Polynucleotide
atggccttaccagtgaccgccttgctcctgccgctggccttgctgctccacgccgccaggccggcatgcgaagtgcagctgcttgaaagtggcggcggactgattcagcctggcggatctctgagactgagctgtgccgccagcggcttcaccttttctagccacgccatgacctgggtccgacaggcacctggaaaagggcttgaatgggtgtccgccatcagcggctctggcgattacacacactacgccgacagcgtgaagggcagattcaccatcagcagagacaacagcaagaacaccgtgtacctccagatgaacagcctgagagccgaggacagcgccgtgtattattgcgccaaggatgaggatggcggcagcctgcttggacacagaggacaaggcaccctggtcaccgtttcttccggtaccggcggaggcggatctggcggcggaggtagcggtggcggaggatctgaattcggatctctcgaggtggccgagggcaagaccgacaaccagtacaccctgtttgtggctggcggcacagttctgctgctgctgttcgtgatctccatcacgactatcatcgtgatctttctgaaccggcggaggcggagagagcggagggatctgtttacagagagctgggacacccagaaggcccctaacaactacagaagccccatcagcaccggccagcctaccaaccagagcatggacgatacccgcgaggacatctacgtgaactaccctaccttcagcagacggcccaagacaagagttagggccaagcgatctggatctggagcaacaaacttctcactactcaaacaagcaggtgacgtggaggagaatcccgggcctactagtgccaccatggactggatttggcgcatccttttccttgtcggcgctgctaccggcgcccattccgggcccgaagtgcagctggttgaatctggcggaggactggttcaggctggcggatctctgagactgtcttgtgccgccagcggcagaacctttagcatgggctggtttagacaggcccctggcaaagagagagagttcgtcgccgccatcacatactctggcggcagcccttactacgccgactctgtgaagggcagattcaccatcagccgggacaacgccaagaacaccgtgtacctccagatgaacagcctgaagcctgaggacaccgccgtgtactactgcgccgccaatccaacatacggcagcgactggaacgccgagaattggggccagggaacccaagtgacagtgtctagcggatccggcggcggaggatctggcggaggcggatctgggggcggaggctctttcgaaggcagcacgcgtgtggctgaaggcaaaacagataatcagtacacactcttcgttgccggcggaaccgtgctgctcctgctctttgtgattagcatcacaacgattatcgtcatcttcctcaaccgcaggcggagaagagagaggcgcgatctgttcaccgagtcttgggatacacagaaagctccgaacaactatcggagccctatctccaccggacagcccacaaatcagtctatggacgacacacgcgaggacatctatgtcaattaccccactttttctaggcggcctaagaccagagtgcgcgccaagagaagcggatctggcgtgaagcagaccctgaatttcgacctgctgaagctggctggcgacgtggaatccaacccaggcccttctagaggccatatgaccgagtacaagcccacggtgcgcctcgccacccgcgacgacgtccccagggccgtacgcaccctcgccgccgcgttcgccgactaccccgccacgcgccacaccgtcgatccggaccgccacatcgagcgggtcaccgagctgcaagaactcttcctcacgcgcgtcgggctcgacatcggcaaggtgtgggtcgcggacgacggcgccgcggtggcggtctggaccacgccggagagcgtcgaagcgggggcggtgttcgccgagatcggcccgcgcatggccgagttgagcggttcccggctggccgcgcagcaacagatggaaggcctcctggcgccgcaccggcccaaggagcccgcgtggttcctggccaccgtcggcgtctcgcccgaccaccagggcaagggtctgggcagcgccgtcgtgctccccggagtggaggcggccgagcgcgccggggtgcccgccttcctggagacctccgcgccccgcaacctccccttctacgagcggctcggcttcaccgtcaccgccgacgtcgaggtgcccgaaggaccgcgcacctggtgcatgacccgcaagcccggtgcctga

SEQ ID NO: 1888 - DNA, 2808 bp, Artificial Sequence
  Synthetic Polynucleotide
atggccttaccagtgaccgccttgctcctgccgctggccttgctgctccacgccgccaggccggacatccagatgacacagagccctagcagcctgtctgccagcgtgggagacagagtgaccatcacatgcaaggccagcgaccacatcaacaactggctggcctggtatcagcagaagcctggacaggcccctaagctgctgatctacggcgctaccacactggaaacaggcgtgcccagcagattttctggcagcggctctggcaccgactacaccctgacaatatccagcctccagcctgaggacttcgccacctactactgtcagcagagctggaacaccccttggacattcggccagggcaccaagctggaaatcaagagactcgagggacagcctaaggccaatcctaccgtgacactgttccctccaagcagcgaagaactccaggccaacaaggccacacttgtgtgcctgatctccgacttctaccctggggctgtgacagtggcttggaaggccgatggatctcctgtgaaagccggcgtggaaaccaccaagccatccaagcagagcaacaacaaatacgccgccagctcctacctgagcctgacacctgagcagtggaagtcccacagatcctacagctgccaagtgacccacgaaggcagcaccgtggaaaagacagtggcccctacagagtgcagcggatccgtggccgagggcaagaccgacaaccagtacaccctgtttgtggctggcggcacagttctgctgctgctgttcgtgatctccatcacgactatcatcgtgatctttctgaaccggcggaggcggagagagcggagggatctgtttacagagagctgggacacccagaaggcccctaacaactacagaagccccatcagcaccggccagcctaccaaccagagcatggacgatacccgcgaggacatctacgtgaactaccctaccttcagcagacggcccaagacaagagttagggccaagcgatctggatctggagcaacaaacttctcactactcaaacaagcaggtgacgtggaggagaatcccgggcctactagtatggactggatttggcgcatccttttccttgtcggcgctgctaccggcgcgcattccttcgaacaagttcagcttcaacagcctggcgctgagctggtcaaacctggcgcttctgtgaagatgagctgcaaagccagcggctacgccttcagcagctactggatcaactggatgaagcagaaacccggccagggactcgaatggatcggccaaatctatcccggcgacggcgacaccaactacaacggcaagttcaagggcagagccacactgaccgccgatacctctagcagcacagcctacatgcagctgagcagcctgaccagcgaagatagcgccgtgtacttctgtgcccggtccatcacaacagtcgtgggctgcgctatggactattggggccagggaacaagcgtgaccgtgtctagtacgcgtgcctctacaaagggaccctccgtgtttcctctggctcccagcagcaagtctacaagcggaggaacagccgctctgggctgcctggtcaaggattactttcccgagcctgtgaccgtgtcctggaatagcggagcactgacaagcggcgtgcacacctttccagccgtgctgcaaagcagcggcctgtactctctgagcagcgtggtcacagtgcctagctctagcctgggcacccagacctacatctgcaatgtgaaccacaagcctagcaacaccaaggtggacaagagagtggaacccaagagctgtggtaccgtggctgaaggcaaaacagataatcagtacacactcttcgttgccggcggaaccgtgctgctcctgctctttgtgattagcatcacaacgattatcgtcatcttcctcaaccgcaggcggagaagagagaggcgcgatctgttcaccgagtcttgggatacacagaaagctccgaacaactatcggagccctatctccaccggacagcccacaaatcagtctatggacgacacacgcgaggacatctatgtcaattaccccactttttctaggcggcctaagaccagagtgcgcgccaagagaagcggatctggcgtgaagcagaccctgaatttcgacctgctgaagctggctggcgacgtggaatccaacccaggcccttctagaggcgggatccacaccatggctacctacgaggtgctgtgcgaggtggcaagaaagctgggcaccgacgacagagaagtggtgctgttcctgctgaacgtgttcatccctcagcctacactggcccagctgatcggtgcactgagagccctgaaagaggaaggccggctgacctttcctctgctggccgaatgcctgttcagagccggaagaagggatctgctgcgggacctgctgcatctggaccccagatttctggaaagacacctggccggcaccatgagctacttcagcccttaccagctgaccgtgctgcacgttgacggcgaactgtgcgccagagatattcggagcctgatcttcctgagcaaggacaccatcggcagccggtctacccctcagacatttctgcactgggtgtactgcatggaaaacctggacctgctcggccccacagatgtggatgccctgatgtccatgctgagaagcctgagcagagtggacctccagagacaggtgcagacactgatgggactgcacctgagcggacctagccacagccagcactacagacacacccct

SEQ ID NO: 1889 - DNA, 2967 bp, Artificial Sequence
  Synthetic Polynucleotide
atggccttaccagtgaccgccttgctcctgccgctggccttgctgctccacgccgccaggccggacatccagatgacacagagccctagcagcctgtctgccagcgtgggagacagagtgaccatcacatgcaaggccagcgaccacatcaacaactggctggcctggtatcagcagaagcctggacaggcccctaagctgctgatctacggcgctaccacactggaaacaggcgtgcccagcagattttctggcagcggctctggcaccgactacaccctgacaatatccagcctccagcctgaggacttcgccacctactactgtcagcagagctggaacaccccttggacattcggccagggcaccaagctggaaatcaagagactcgagggacagcctaaggccaatcctaccgtgacactgttccctccaagcagcgaagaactccaggccaacaaggccacacttgtgtgcctgatctccgacttctaccctggggctgtgacagtggcttggaaggccgatggatctcctgtgaaagccggcgtggaaaccaccaagccatccaagcagagcaacaacaaatacgccgccagctcctacctgagcctgacacctgagcagtggaagtcccacagatcctacagctgccaagtgacccacgaaggcagcaccgtggaaaagacagtggcccctacagagtgcagcggatccgtggccgagggcaagaccgacaaccagtacaccctgtttgtggctggcggcacagttctgctgctgctgttcgtgatctccatcacgactatcatcgtgatctttctgaaccggcggaggcggagagagcggagggatctgtttacagagagctgggacacccagaaggcccctaacaactacagaagccccatcagcaccggccagcctaccaaccagagcatggacgatacccgcgaggacatctacgtgaactaccctaccttcagcagacggcccaagacaagagttagggccaagcgatctggatctggagcaacaaacttctcactactcaaacaagcaggtgacgtggaggagaatcccgggcctactagtatggactggatttggcgcatccttttccttgtcggcgctgctaccggcgcgcattccttcgaacaagttcagcttcaacagcctggcgctgagctggtcaaacctggcgcttctgtgaagatgagctgcaaagccagcggctacgccttcagcagctactggatcaactggatgaagcagaaacccggccagggactcgaatggatcggccaaatctatcccggcgacggcgacaccaactacaacggcaagttcaagggcagagccacactgaccgccgatacctctagcagcacagcctacatgcagctgagcagcctgaccagcgaagatagcgccgtgtacttctgtgcccggtccatcacaacagtcgtgggctgcgctatggactattggggccagggaacaagcgtgaccgtgtctagtacgcgtgcctctacaaagggaccctccgtgtttcctctggctcccagcagcaagtctacaagcggaggaacagccgctctgggctgcctggtcaaggattactttcccgagcctgtgaccgtgtcctggaatagcggagcactgacaagcggcgtgcacacctttccagccgtgctgcaaagcagcggcctgtactctctgagcagcgtggtcacagtgcctagctctagcctgggcacccagacctacatctgcaatgtgaaccacaagcctagcaacaccaaggtggacaagagagtggaacccaagagctgtggtaccgtggctgaaggcaaaacagataatcagtacacactcttcgttgccggcggaaccgtgctgctcctgctctttgtgattagcatcacaacgattatcgtcatcttcctcaaccgcaggcggagaagagagaggcgcgatctgttcaccgagtcttgggatacacagaaagctccgaacaactatcggagccctatctccaccggacagcccacaaatcagtctatggacgacacacgcgaggacatctatgtcaattaccccactttttctaggcggcctaagaccagagtgcgcgccaagagaagcggatctggcgtgaagcagaccctgaatttcgacctgctgaagctggctggcgacgtggaatccaacccaggcccttctagaggcgggatccacaccatgtccgactccaaggaggtccctagccttccatttttgcgacacttgctcgaagagttggacagccatgaggacagcttgctgctgtttctgtgtcacgacgcggccccgggctgcacgacggtcacgcaagctttgtgctcgcttagccaacagcgcaagctgaccctcgcggctctggtcgagatgctctacgtgctgcagcgtatggatcttctcaagagccgcttcgggctcagcaaggagggggccgagcaattgctgggcacaagctttctcacgcgctaccgcaagctcatggtttgcgtgggtgaggagctcgactcgagcgagctacgcgctctacgcttgttcgcgtgcaacctgaatccgagcctgagcacggcgctttctgagagcagccgctttgtcgagcttgtactcgcgcttgaaaacgtaggactcgtctcgccatcgagtgtttccgtgcttgcggacatgttgcgcactcttcggcgcctcgatttgtgccagcagcttgttgagtacgaacaacaagagcaagccaggtaccgttactgttacgcggcctcgccctcattgccagttcgtacgttacgtcgggggcacggcgcgagtgaacacgagcagctgtgcatgcccgtgcaagaatcctctgacagccccgagctgctgcgcacgcccgtacaagaatcctccagcgacagccccgagcaaacgact

SEQ ID NO: 1890 - DNA, 2835 bp, Artificial Sequence
  Synthetic Polynucleotide
atggccttaccagtgaccgccttgctcctgccgctggccttgctgctccacgccgccaggccggacatccagatgacacagagccctagcagcctgtctgccagcgtgggagacagagtgaccatcacatgcaaggccagcgaccacatcaacaactggctggcctggtatcagcagaagcctggacaggcccctaagctgctgatctacggcgctaccacactggaaacaggcgtgcccagcagattttctggcagcggctctggcaccgactacaccctgacaatatccagcctccagcctgaggacttcgccacctactactgtcagcagagctggaacaccccttggacattcggccagggcaccaagctggaaatcaagagactcgagggacagcctaaggccaatcctaccgtgacactgttccctccaagcagcgaagaactccaggccaacaaggccacacttgtgtgcctgatctccgacttctaccctggggctgtgacagtggcttggaaggccgatggatctcctgtgaaagccggcgtggaaaccaccaagccatccaagcagagcaacaacaaatacgccgccagctcctacctgagcctgacacctgagcagtggaagtcccacagatcctacagctgccaagtgacccacgaaggcagcaccgtggaaaagacagtggcccctacagagtgcagcggatccgtggccgagggcaagaccgacaaccagtacaccctgtttgtggctggcggcacagttctgctgctgctgttcgtgatctccatcacgactatcatcgtgatctttctgaaccggcggaggcggagagagcggagggatctgtttacagagagctgggacacccagaaggcccctaacaactacagaagccccatcagcaccggccagcctaccaaccagagcatggacgatacccgcgaggacatctacgtgaactaccctaccttcagcagacggcccaagacaagagttagggccaagcgatctggatctggagcaacaaacttctcactactcaaacaagcaggtgacgtggaggagaatcccgggcctactagtatggactggatttggcgcatccttttccttgtcggcgctgctaccggcgcgcattccttcgaacaagttcagcttcaacagcctggcgctgagctggtcaaacctggcgcttctgtgaagatgagctgcaaagccagcggctacgccttcagcagctactggatcaactggatgaagcagaaacccggccagggactcgaatggatcggccaaatctatcccggcgacggcgacaccaactacaacggcaagttcaagggcagagccacactgaccgccgatacctctagcagcacagcctacatgcagctgagcagcctgaccagcgaagatagcgccgtgtacttctgtgcccggtccatcacaacagtcgtgggctgcgctatggactattggggccagggaacaagcgtgaccgtgtctagtacgcgtgcctctacaaagggaccctccgtgtttcctctggctcccagcagcaagtctacaagcggaggaacagccgctctgggctgcctggtcaaggattactttcccgagcctgtgaccgtgtcctggaatagcggagcactgacaagcggcgtgcacacctttccagccgtgctgcaaagcagcggcctgtactctctgagcagcgtggtcacagtgcctagctctagcctgggcacccagacctacatctgcaatgtgaaccacaagcctagcaacaccaaggtggacaagagagtggaacccaagagctgtggtaccgtggctgaaggcaaaacagataatcagtacacactcttcgttgccggcggaaccgtgctgctcctgctctttgtgattagcatcacaacgattatcgtcatcttcctcaaccgcaggcggagaagagagaggcgcgatctgttcaccgagtcttgggatacacagaaagctccgaacaactatcggagccctatctccaccggacagcccacaaatcagtctatggacgacacacgcgaggacatctatgtcaattaccccactttttctaggcggcctaagaccagagtgcgcgccaagagaagcggatctggcgtgaagcagaccctgaatttcgacctgctgaagctggctggcgacgtggaatccaacccaggcccttctagaggccatatgaccgagtacaagcccacggtgcgcctcgccacccgcgacgacgtccccagggccgtacgcaccctcgccgccgcgttcgccgactaccccgccacgcgccacaccgtcgatccggaccgccacatcgagcgggtcaccgagctgcaagaactcttcctcacgcgcgtcgggctcgacatcggcaaggtgtgggtcgcggacgacggcgccgcggtggcggtctggaccacgccggagagcgtcgaagcgggggcggtgttcgccgagatcggcccgcgcatggccgagttgagcggttcccggctggccgcgcagcaacagatggaaggcctcctggcgccgcaccggcccaaggagcccgcgtggttcctggccaccgtcggcgtctcgcccgaccaccagggcaagggtctgggcagcgccgtcgtgctccccggagtggaggcggccgagcgcgccggggtgcccgccttcctggagacctccgcgccccgcaacctccccttctacgagcggctcggcttcaccgtcaccgccgacgtcgaggtgcccgaaggaccgcgcacctggtgcatgacccgcaagcccggtgcctga

SEQ ID NO: 1891 - DNA, 3246 bp, Artificial Sequence
  Synthetic Polynucleotide
atggccttaccagtgaccgccttgctcctgccgctggccttgctgctccacgccgccaggccggaagtgcagctggttgaatctggcggaggactggttcaggctggcggatctctgagactgtcttgtgccgccagcggcagaacctttagcatgggctggtttagacaggcccctggcaaagagagagagttcgtcgccgccatcacatactctggcggcagcccttactacgccgactctgtgaagggcagattcaccatcagccgggacaacgccaagaacaccgtgtacctccagatgaacagcctgaagcctgaggacaccgccgtgtactactgcgccgccaatccaacatacggcagcgactggaacgccgagaattggggccagggaacccaagtgacagtgtctagcggtaccggcggaggcggatctggcggcggaggtagcggtggcggaggatctgaattcgacatccagatgacacagagccctagcagcctgtctgccagcgtgggagacagagtgaccatcacatgcaaggccagcgaccacatcaacaactggctggcctggtatcagcagaagcctggacaggcccctaagctgctgatctacggcgctaccacactggaaacaggcgtgcccagcagattttctggcagcggctctggcaccgactacaccctgacaatatccagcctccagcctgaggacttcgccacctactactgtcagcagagctggaacaccccttggacattcggccagggcaccaagctggaaatcaagagactcgagggacagcctaaggccaatcctaccgtgacactgttccctccaagcagcgaagaactccaggccaacaaggccacacttgtgtgcctgatctccgacttctaccctggggctgtgacagtggcttggaaggccgatggatctcctgtgaaagccggcgtggaaaccaccaagccatccaagcagagcaacaacaaatacgccgccagctcctacctgagcctgacacctgagcagtggaagtcccacagatcctacagctgccaagtgacccacgaaggcagcaccgtggaaaagacagtggcccctacagagtgcagcggatccgtggccgagggcaagaccgacaaccagtacaccctgtttgtggctggcggcacagttctgctgctgctgttcgtgatctccatcacgactatcatcgtgatctttctgaaccggcggaggcggagagagcggagggatctgtttacagagagctgggacacccagaaggcccctaacaactacagaagccccatcagcaccggccagcctaccaaccagagcatggacgatacccgcgaggacatctacgtgaactaccctaccttcagcagacggcccaagacaagagttagggccaagcgatctggatctggagcaacaaacttctcactactcaaacaagcaggtgacgtggaggagaatcccgggcctactagtatggactggatttggcgcatccttttccttgtcggcgctgctaccggcgcgcattccttcgaacaagttcagcttcaacagcctggcgctgagctggtcaaacctggcgcttctgtgaagatgagctgcaaagccagcggctacgccttcagcagctactggatcaactggatgaagcagaaacccggccagggactcgaatggatcggccaaatctatcccggcgacggcgacaccaactacaacggcaagttcaagggcagagccacactgaccgccgatacctctagcagcacagcctacatgcagctgagcagcctgaccagcgaagatagcgccgtgtacttctgtgcccggtccatcacaacagtcgtgggctgcgctatggactattggggccagggaacaagcgtgaccgtgtctagtacgcgtgcctctacaaagggaccctccgtgtttcctctggctcccagcagcaagtctacaagcggaggaacagccgctctgggctgcctggtcaaggattactttcccgagcctgtgaccgtgtcctggaatagcggagcactgacaagcggcgtgcacacctttccagccgtgctgcaaagcagcggcctgtactctctgagcagcgtggtcacagtgcctagctctagcctgggcacccagacctacatctgcaatgtgaaccacaagcctagcaacaccaaggtggacaagagagtggaacccaagagctgtggtaccgtggctgaaggcaaaacagataatcagtacacactcttcgttgccggcggaaccgtgctgctcctgctctttgtgattagcatcacaacgattatcgtcatcttcctcaaccgcaggcggagaagagagaggcgcgatctgttcaccgagtcttgggatacacagaaagctccgaacaactatcggagccctatctccaccggacagcccacaaatcagtctatggacgacacacgcgaggacatctatgtcaattaccccactttttctaggcggcctaagaccagagtgcgcgccaagagaagcggatctggcgtgaagcagaccctgaatttcgacctgctgaagctggctggcgacgtggaatccaacccaggcccttctagaggccatatgaccgagtacaagcccacggtgcgcctcgccacccgcgacgacgtccccagggccgtacgcaccctcgccgccgcgttcgccgactaccccgccacgcgccacaccgtcgatccggaccgccacatcgagcgggtcaccgagctgcaagaactcttcctcacgcgcgtcgggctcgacatcggcaaggtgtgggtcgcggacgacggcgccgcggtggcggtctggaccacgccggagagcgtcgaagcgggggcggtgttcgccgagatcggcccgcgcatggccgagttgagcggttcccggctggccgcgcagcaacagatggaaggcctcctggcgccgcaccggcccaaggagcccgcgtggttcctggccaccgtcggcgtctcgcccgaccaccagggcaagggtctgggcagcgccgtcgtgctccccggagtggaggcggccgagcgcgccggggtgcccgccttcctggagacctccgcgccccgcaacctccccttctacgagcggctcggcttcaccgtcaccgccgacgtcgaggtgcccgaaggaccgcgcacctggtgcatgacccgcaagcccggtgcctga

SEQ ID NO: 1892 - DNA, 3657 bp, Artificial Sequence
  Synthetic Polynucleotide
atggccttaccagtgaccgccttgctcctgccgctggccttgctgctccacgccgccaggccggaagtgcagctggttgaatctggcggaggactggttcaggctggcggatctctgagactgtcttgtgccgccagcggcagaacctttagcatgggctggtttagacaggcccctggcaaagagagagagttcgtcgccgccatcacatactctggcggcagcccttactacgccgactctgtgaagggcagattcaccatcagccgggacaacgccaagaacaccgtgtacctccagatgaacagcctgaagcctgaggacaccgccgtgtactactgcgccgccaatccaacatacggcagcgactggaacgccgagaattggggccagggaacccaagtgacagtgtctagcggtaccggcggaggcggatctggcggcggaggtagcggtggcggaggatctgaattcgacatccagatgacacagagccctagcagcctgtctgccagcgtgggagacagagtgaccatcacatgcaaggccagcgaccacatcaacaactggctggcctggtatcagcagaagcctggacaggcccctaagctgctgatctacggcgctaccacactggaaacaggcgtgcccagcagattttctggcagcggctctggcaccgactacaccctgacaatatccagcctccagcctgaggacttcgccacctactactgtcagcagagctggaacaccccttggacattcggccagggcaccaagctggaaatcaagagactcgagggacagcctaaggccaatcctaccgtgacactgttccctccaagcagcgaagaactccaggccaacaaggccacacttgtgtgcctgatctccgacttctaccctggggctgtgacagtggcttggaaggccgatggatctcctgtgaaagccggcgtggaaaccaccaagccatccaagcagagcaacaacaaatacgccgccagctcctacctgagcctgacacctgagcagtggaagtcccacagatcctacagctgccaagtgacccacgaaggcagcaccgtggaaaagacagtggcccctacagagtgcagcggatccgtggccgagggcaagaccgacaaccagtacaccctgtttgtggctggcggcacagttctgctgctgctgttcgtgatctccatcacgactatcatcgtgatctttctgaaccggcggaggcggagagagcggagggatctgtttacagagagctgggacacccagaaggcccctaacaactacagaagccccatcagcaccggccagcctaccaaccagagcatggacgatacccgcgaggacatctacgtgaactaccctaccttcagcagacggcccaagacaagagttagggccaagcgatctggatctggagcaacaaacttctcactactcaaacaagcaggtgacgtggaggagaatcccgggcctactagtatggactggatttggcgcatccttttccttgtcggcgctgctaccggcgcgcattccgggcccgaagtgcaactggttgaatccggtggcggcctggtgcaagcaggcggatctctcagacttagctgtgccgcctccggcagaaccttcacaatgggatggtttaggcaggctccagggaaagagagagagttcgtcgccgccatctctctgtctcccacactggcctactacgccgactctgtgaaaggccggttcaccatctccagagataatgccaagaacaccgtggtgctgcaaatgaactctctgaaacccgaggatacagccctgtactattgtgccgctgaccggaagtccgtgatgagcatcagacccgattactggggacagggcacacaagtcacagtgtcctctggatccggcggcggaggatctggcggaggcggatctgggggcggaggctctttcgaacaagttcagcttcaacagcctggcgctgagctggtcaaacctggcgcttctgtgaagatgagctgcaaagccagcggctacgccttcagcagctactggatcaactggatgaagcagaaacccggccagggactcgaatggatcggccaaatctatcccggcgacggcgacaccaactacaacggcaagttcaagggcagagccacactgaccgccgatacctctagcagcacagcctacatgcagctgagcagcctgaccagcgaagatagcgccgtgtacttctgtgcccggtccatcacaacagtcgtgggctgcgctatggactattggggccagggaacaagcgtgaccgtgtctagtacgcgtgcctctacaaagggaccctccgtgtttcctctggctcccagcagcaagtctacaagcggaggaacagccgctctgggctgcctggtcaaggattactttcccgagcctgtgaccgtgtcctggaatagcggagcactgacaagcggcgtgcacacctttccagccgtgctgcaaagcagcggcctgtactctctgagcagcgtggtcacagtgcctagctctagcctgggcacccagacctacatctgcaatgtgaaccacaagcctagcaacaccaaggtggacaagagagtggaacccaagagctgtggtaccgtggctgaaggcaaaacagataatcagtacacactcttcgttgccggcggaaccgtgctgctcctgctctttgtgattagcatcacaacgattatcgtcatcttcctcaaccgcaggcggagaagagagaggcgcgatctgttcaccgagtcttgggatacacagaaagctccgaacaactatcggagccctatctccaccggacagcccacaaatcagtctatggacgacacacgcgaggacatctatgtcaattaccccactttttctaggcggcctaagaccagagtgcgcgccaagagaagcggatctggcgtgaagcagaccctgaatttcgacctgctgaagctggctggcgacgtggaatccaacccaggcccttctagaggccatatgaccgagtacaagcccacggtgcgcctcgccacccgcgacgacgtccccagggccgtacgcaccctcgccgccgcgttcgccgactaccccgccacgcgccacaccgtcgatccggaccgccacatcgagcgggtcaccgagctgcaagaactcttcctcacgcgcgtcgggctcgacatcggcaaggtgtgggtcgcggacgacggcgccgcggtggcggtctggaccacgccggagagcgtcgaagcgggggcggtgttcgccgagatcggcccgcgcatggccgagttgagcggttcccggctggccgcgcagcaacagatggaaggcctcctggcgccgcaccggcccaaggagcccgcgtggttcctggccaccgtcggcgtctcgcccgaccaccagggcaagggtctgggcagcgccgtcgtgctccccggagtggaggcggccgagcgcgccggggtgcccgccttcctggagacctccgcgccccgcaacctccccttctacgagcggctcggcttcaccgtcaccgccgacgtcgaggtgcccgaaggaccgcgcacctggtgcatgacccgcaagcccggtgcctga

SEQ ID NO: 1893 - DNA, 2856 bp, Artificial Sequence
  Synthetic Polynucleotide
atggccttaccagtgaccgccttgctcctgccgctggccttgctgctccacgccgccaggccggaagtgcagctggttgaatctggcggaggactggttcaggctggcggatctctgagactgtcttgtgccgccagcggcagaacctttagcatgggctggtttagacaggcccctggcaaagagagagagttcgtcgccgccatcacatactctggcggcagcccttactacgccgactctgtgaagggcagattcaccatcagccgggacaacgccaagaacaccgtgtacctccagatgaacagcctgaagcctgaggacaccgccgtgtactactgcgccgccaatccaacatacggcagcgactggaacgccgagaattggggccagggaacccaagtgacagtgtctagcctcgagggacagcctaaggccaatcctaccgtgacactgttccctccaagcagcgaagaactccaggccaacaaggccacacttgtgtgcctgatctccgacttctaccctggggctgtgacagtggcttggaaggccgatggatctcctgtgaaagccggcgtggaaaccaccaagccatccaagcagagcaacaacaaatacgccgccagctcctacctgagcctgacacctgagcagtggaagtcccacagatcctacagctgccaagtgacccacgaaggcagcaccgtggaaaagacagtggcccctacagagtgcagcggatccgtggccgagggcaagaccgacaaccagtacaccctgtttgtggctggcggcacagttctgctgctgctgttcgtgatctccatcacgactatcatcgtgatctttctgaaccggcggaggcggagagagcggagggatctgtttacagagagctgggacacccagaaggcccctaacaactacagaagccccatcagcaccggccagcctaccaaccagagcatggacgatacccgcgaggacatctacgtgaactaccctaccttcagcagacggcccaagacaagagttagggccaagcgatctggatctggagcaacaaacttctcactactcaaacaagcaggtgacgtggaggagaatcccgggcctactagtatggactggatttggcgcatccttttccttgtcggcgctgctaccggcgcgcattccgggcccgaagtgcaactggttgaatccggtggcggcctggtgcaagcaggcggatctctcagacttagctgtgccgcctccggcagaaccttcacaatgggatggtttaggcaggctccagggaaagagagagagttcgtcgccgccatctctctgtctcccacactggcctactacgccgactctgtgaaaggccggttcaccatctccagagataatgccaagaacaccgtggtgctgcaaatgaactctctgaaacccgaggatacagccctgtactattgtgccgctgaccggaagtccgtgatgagcatcagacccgattactggggacagggcacacaagtcacagtgtcctctacgcgtgcctctacaaagggaccctccgtgtttcctctggctcccagcagcaagtctacaagcggaggaacagccgctctgggctgcctggtcaaggattactttcccgagcctgtgaccgtgtcctggaatagcggagcactgacaagcggcgtgcacacctttccagccgtgctgcaaagcagcggcctgtactctctgagcagcgtggtcacagtgcctagctctagcctgggcacccagacctacatctgcaatgtgaaccacaagcctagcaacaccaaggtggacaagagagtggaacccaagagctgtggtaccgtggctgaaggcaaaacagataatcagtacacactcttcgttgccggcggaaccgtgctgctcctgctctttgtgattagcatcacaacgattatcgtcatcttcctcaaccgcaggcggagaagagagaggcgcgatctgttcaccgagtcttgggatacacagaaagctccgaacaactatcggagccctatctccaccggacagcccacaaatcagtctatggacgacacacgcgaggacatctatgtcaattaccccactttttctaggcggcctaagaccagagtgcgcgccaagagaagcggatctggcgtgaagcagaccctgaatttcgacctgctgaagctggctggcgacgtggaatccaacccaggcccttctagaggccatatgaccgagtacaagcccacggtgcgcctcgccacccgcgacgacgtccccagggccgtacgcaccctcgccgccgcgttcgccgactaccccgccacgcgccacaccgtcgatccggaccgccacatcgagcgggtcaccgagctgcaagaactcttcctcacgcgcgtcgggctcgacatcggcaaggtgtgggtcgcggacgacggcgccgcggtggcggtctggaccacgccggagagcgtcgaagcgggggcggtgttcgccgagatcggcccgcgcatggccgagttgagcggttcccggctggccgcgcagcaacagatggaaggcctcctggcgccgcaccggcccaaggagcccgcgtggttcctggccaccgtcggcgtctcgcccgaccaccagggcaagggtctgggcagcgccgtcgtgctccccggagtggaggcggccgagcgcgccggggtgcccgccttcctggagacctccgcgccccgcaacctccccttctacgagcggctcggcttcaccgtcaccgccgacgtcgaggtgcccgaaggaccgcgcacctggtgcatgacccgcaagcccggtgcctga

SEQ ID NO: 1894 - DNA, 2880 bp, Artificial Sequence
  Synthetic Polynucleotide
atggccttaccagtgaccgccttgctcctgccgctggccttgctgctccacgccgccaggccggacatccagatgacacagagccctagcagcctgtctgccagcgtgggagacagagtgaccatcacatgcaaggccagcgaccacatcaacaactggctggcctggtatcagcagaagcctggacaggcccctaagctgctgatctacggcgctaccacactggaaacaggcgtgcccagcagattttctggcagcggctctggcaccgactacaccctgacaatatccagcctccagcctgaggacttcgccacctactactgtcagcagagctggaacaccccttggacattcggccagggcaccaagctggaaatcaagagactcgaggacctgaagaacgtgttcccacctgaggtggccgtgttcgagcctagcgaggccgagatcagccacacccagaaagccaccctcgtgtgcctggctaccggcttctaccccgaccatgtggaactgtcttggtgggtcaacggcaaagaggtgcacagcggcgtgtctaccgacccccagccactgaaagaacagcccgccctgaacgacagccggtactgcctgagcagcagactgagagtgtccgccaccttctggcagaacccccggaaccacttcagatgccaggtgcagttctacggcctgagcgagaacgacgagtggacccaggacagagccaagcccgtgacccagatcgtgtctgccgaagcctggggcagagccgattgcggatccgtggccgagggcaagaccgacaaccagtacaccctgtttgtggctggcggcacagttctgctgctgctgttcgtgatctccatcacgactatcatcgtgatctttctgaaccggcggaggcggagagagcggagggatctgtttacagagagctgggacacccagaaggcccctaacaactacagaagccccatcagcaccggccagcctaccaaccagagcatggacgatacccgcgaggacatctacgtgaactaccctaccttcagcagacggcccaagacaagagttagggccaagcgatctggatctggagcaacaaacttctcactactcaaacaagcaggtgacgtggaggagaatcccgggcctactagtatggactggatttggcgcatccttttccttgtcggcgctgctaccggcgcgcattccttcgaacaagttcagcttcaacagcctggcgctgagctggtcaaacctggcgcttctgtgaagatgagctgcaaagccagcggctacgccttcagcagctactggatcaactggatgaagcagaaacccggccagggactcgaatggatcggccaaatctatcccggcgacggcgacaccaactacaacggcaagttcaagggcagagccacactgaccgccgatacctctagcagcacagcctacatgcagctgagcagcctgaccagcgaagatagcgccgtgtacttctgtgcccggtccatcacaacagtcgtgggctgcgctatggactattggggccagggaacaagcgtgaccgtgtctagtacgcgtatccagaaccctgatcctgccgtgtaccagctgcgggatagcaagagcagcgacaagagcgtgtgtctgttcaccgacttcgacagccagaccaacgtgtcccagagcaaggactccgacgtgtacatcaccgataagaccgtgctggacatgcggagcatggacttcaagagcaactccgccgtggcctggtccaacaagtccgatttcgcctgcgccaacgccttcaacaacagcattatccccgaggacacattcttcccaagccccgagagcagctgcggtaccgtggctgaaggcaaaacagataatcagtacacactcttcgttgccggcggaaccgtgctgctcctgctctttgtgattagcatcacaacgattatcgtcatcttcctcaaccgcaggcggagaagagagaggcgcgatctgttcaccgagtcttgggatacacagaaagctccgaacaactatcggagccctatctccaccggacagcccacaaatcagtctatggacgacacacgcgaggacatctatgtcaattaccccactttttctaggcggcctaagaccagagtgcgcgccaagagaagcggatctggcgtgaagcagaccctgaatttcgacctgctgaagctggctggcgacgtggaatccaacccaggcccttctagaggccatatgaccgagtacaagcccacggtgcgcctcgccacccgcgacgacgtccccagggccgtacgcaccctcgccgccgcgttcgccgactaccccgccacgcgccacaccgtcgatccggaccgccacatcgagcgggtcaccgagctgcaagaactcttcctcacgcgcgtcgggctcgacatcggcaaggtgtgggtcgcggacgacggcgccgcggtggcggtctggaccacgccggagagcgtcgaagcgggggcggtgttcgccgagatcggcccgcgcatggccgagttgagcggttcccggctggccgcgcagcaacagatggaaggcctcctggcgccgcaccggcccaaggagcccgcgtggttcctggccaccgtcggcgtctcgcccgaccaccagggcaagggtctgggcagcgccgtcgtgctccccggagtggaggcggccgagcgcgccggggtgcccgccttcctggagacctccgcgccccgcaacctccccttctacgagcggctcggcttcaccgtcaccgccgacgtcgaggtgcccgaaggaccgcgcacctggtgcatgacccgcaagcccggtgcctga

SEQ ID NO: 1895 - DNA, 3291 bp, Artificial Sequence
  Synthetic Polynucleotide
atggccttaccagtgaccgccttgctcctgccgctggccttgctgctccacgccgccaggccggaagtgcagctggttgaatctggcggaggactggttcaggctggcggatctctgagactgtcttgtgccgccagcggcagaacctttagcatgggctggtttagacaggcccctggcaaagagagagagttcgtcgccgccatcacatactctggcggcagcccttactacgccgactctgtgaagggcagattcaccatcagccgggacaacgccaagaacaccgtgtacctccagatgaacagcctgaagcctgaggacaccgccgtgtactactgcgccgccaatccaacatacggcagcgactggaacgccgagaattggggccagggaacccaagtgacagtgtctagcggtaccggcggaggcggatctggcggcggaggtagcggtggcggaggatctgaattcgacatccagatgacacagagccctagcagcctgtctgccagcgtgggagacagagtgaccatcacatgcaaggccagcgaccacatcaacaactggctggcctggtatcagcagaagcctggacaggcccctaagctgctgatctacggcgctaccacactggaaacaggcgtgcccagcagattttctggcagcggctctggcaccgactacaccctgacaatatccagcctccagcctgaggacttcgccacctactactgtcagcagagctggaacaccccttggacattcggccagggcaccaagctggaaatcaagagactcgaggacctgaagaacgtgttcccacctgaggtggccgtgttcgagcctagcgaggccgagatcagccacacccagaaagccaccctcgtgtgcctggctaccggcttctaccccgaccatgtggaactgtcttggtgggtcaacggcaaagaggtgcacagcggcgtgtctaccgacccccagccactgaaagaacagcccgccctgaacgacagccggtactgcctgagcagcagactgagagtgtccgccaccttctggcagaacccccggaaccacttcagatgccaggtgcagttctacggcctgagcgagaacgacgagtggacccaggacagagccaagcccgtgacccagatcgtgtctgccgaagcctggggcagagccgattgcggatccgtggccgagggcaagaccgacaaccagtacaccctgtttgtggctggcggcacagttctgctgctgctgttcgtgatctccatcacgactatcatcgtgatctttctgaaccggcggaggcggagagagcggagggatctgtttacagagagctgggacacccagaaggcccctaacaactacagaagccccatcagcaccggccagcctaccaaccagagcatggacgatacccgcgaggacatctacgtgaactaccctaccttcagcagacggcccaagacaagagttagggccaagcgatctggatctggagcaacaaacttctcactactcaaacaagcaggtgacgtggaggagaatcccgggcctactagtatggactggatttggcgcatccttttccttgtcggcgctgctaccggcgcgcattccttcgaacaagttcagcttcaacagcctggcgctgagctggtcaaacctggcgcttctgtgaagatgagctgcaaagccagcggctacgccttcagcagctactggatcaactggatgaagcagaaacccggccagggactcgaatggatcggccaaatctatcccggcgacggcgacaccaactacaacggcaagttcaagggcagagccacactgaccgccgatacctctagcagcacagcctacatgcagctgagcagcctgaccagcgaagatagcgccgtgtacttctgtgcccggtccatcacaacagtcgtgggctgcgctatggactattggggccagggaacaagcgtgaccgtgtctagtacgcgtatccagaaccctgatcctgccgtgtaccagctgcgggatagcaagagcagcgacaagagcgtgtgtctgttcaccgacttcgacagccagaccaacgtgtcccagagcaaggactccgacgtgtacatcaccgataagaccgtgctggacatgcggagcatggacttcaagagcaactccgccgtggcctggtccaacaagtccgatttcgcctgcgccaacgccttcaacaacagcattatccccgaggacacattcttcccaagccccgagagcagctgcggtaccgtggctgaaggcaaaacagataatcagtacacactcttcgttgccggcggaaccgtgctgctcctgctctttgtgattagcatcacaacgattatcgtcatcttcctcaaccgcaggcggagaagagagaggcgcgatctgttcaccgagtcttgggatacacagaaagctccgaacaactatcggagccctatctccaccggacagcccacaaatcagtctatggacgacacacgcgaggacatctatgtcaattaccccactttttctaggcggcctaagaccagagtgcgcgccaagagaagcggatctggcgtgaagcagaccctgaatttcgacctgctgaagctggctggcgacgtggaatccaacccaggcccttctagaggccatatgaccgagtacaagcccacggtgcgcctcgccacccgcgacgacgtccccagggccgtacgcaccctcgccgccgcgttcgccgactaccccgccacgcgccacaccgtcgatccggaccgccacatcgagcgggtcaccgagctgcaagaactcttcctcacgcgcgtcgggctcgacatcggcaaggtgtgggtcgcggacgacggcgccgcggtggcggtctggaccacgccggagagcgtcgaagcgggggcggtgttcgccgagatcggcccgcgcatggccgagttgagcggttcccggctggccgcgcagcaacagatggaaggcctcctggcgccgcaccggcccaaggagcccgcgtggttcctggccaccgtcggcgtctcgcccgaccaccagggcaagggtctgggcagcgccgtcgtgctccccggagtggaggcggccgagcgcgccggggtgcccgccttcctggagacctccgcgccccgcaacctccccttctacgagcggctcggcttcaccgtcaccgccgacgtcgaggtgcccgaaggaccgcgcacctggtgcatgacccgcaagcccggtgcctga

SEQ ID NO: 1896 - DNA, 3702 bp, Artificial Sequence
  Synthetic Polynucleotide
atggccttaccagtgaccgccttgctcctgccgctggccttgctgctccacgccgccaggccggaagtgcagctggttgaatctggcggaggactggttcaggctggcggatctctgagactgtcttgtgccgccagcggcagaacctttagcatgggctggtttagacaggcccctggcaaagagagagagttcgtcgccgccatcacatactctggcggcagcccttactacgccgactctgtgaagggcagattcaccatcagccgggacaacgccaagaacaccgtgtacctccagatgaacagcctgaagcctgaggacaccgccgtgtactactgcgccgccaatccaacatacggcagcgactggaacgccgagaattggggccagggaacccaagtgacagtgtctagcggtaccggcggaggcggatctggcggcggaggtagcggtggcggaggatctgaattcgacatccagatgacacagagccctagcagcctgtctgccagcgtgggagacagagtgaccatcacatgcaaggccagcgaccacatcaacaactggctggcctggtatcagcagaagcctggacaggcccctaagctgctgatctacggcgctaccacactggaaacaggcgtgcccagcagattttctggcagcggctctggcaccgactacaccctgacaatatccagcctccagcctgaggacttcgccacctactactgtcagcagagctggaacaccccttggacattcggccagggcaccaagctggaaatcaagagactcgaggacctgaagaacgtgttcccacctgaggtggccgtgttcgagcctagcgaggccgagatcagccacacccagaaagccaccctcgtgtgcctggctaccggcttctaccccgaccatgtggaactgtcttggtgggtcaacggcaaagaggtgcacagcggcgtgtctaccgacccccagccactgaaagaacagcccgccctgaacgacagccggtactgcctgagcagcagactgagagtgtccgccaccttctggcagaacccccggaaccacttcagatgccaggtgcagttctacggcctgagcgagaacgacgagtggacccaggacagagccaagcccgtgacccagatcgtgtctgccgaagcctggggcagagccgattgcggatccgtggccgagggcaagaccgacaaccagtacaccctgtttgtggctggcggcacagttctgctgctgctgttcgtgatctccatcacgactatcatcgtgatctttctgaaccggcggaggcggagagagcggagggatctgtttacagagagctgggacacccagaaggcccctaacaactacagaagccccatcagcaccggccagcctaccaaccagagcatggacgatacccgcgaggacatctacgtgaactaccctaccttcagcagacggcccaagacaagagttagggccaagcgatctggatctggagcaacaaacttctcactactcaaacaagcaggtgacgtggaggagaatcccgggcctactagtatggactggatttggcgcatccttttccttgtcggcgctgctaccggcgcgcattccgggcccgaagtgcaactggttgaatccggtggcggcctggtgcaagcaggcggatctctcagacttagctgtgccgcctccggcagaaccttcacaatgggatggtttaggcaggctccagggaaagagagagagttcgtcgccgccatctctctgtctcccacactggcctactacgccgactctgtgaaaggccggttcaccatctccagagataatgccaagaacaccgtggtgctgcaaatgaactctctgaaacccgaggatacagccctgtactattgtgccgctgaccggaagtccgtgatgagcatcagacccgattactggggacagggcacacaagtcacagtgtcctctggatccggcggcggaggatctggcggaggcggatctgggggcggaggctctttcgaacaagttcagcttcaacagcctggcgctgagctggtcaaacctggcgcttctgtgaagatgagctgcaaagccagcggctacgccttcagcagctactggatcaactggatgaagcagaaacccggccagggactcgaatggatcggccaaatctatcccggcgacggcgacaccaactacaacggcaagttcaagggcagagccacactgaccgccgatacctctagcagcacagcctacatgcagctgagcagcctgaccagcgaagatagcgccgtgtacttctgtgcccggtccatcacaacagtcgtgggctgcgctatggactattggggccagggaacaagcgtgaccgtgtctagtacgcgtatccagaaccctgatcctgccgtgtaccagctgcgggatagcaagagcagcgacaagagcgtgtgtctgttcaccgacttcgacagccagaccaacgtgtcccagagcaaggactccgacgtgtacatcaccgataagaccgtgctggacatgcggagcatggacttcaagagcaactccgccgtggcctggtccaacaagtccgatttcgcctgcgccaacgccttcaacaacagcattatccccgaggacacattcttcccaagccccgagagcagctgcggtaccgtggctgaaggcaaaacagataatcagtacacactcttcgttgccggcggaaccgtgctgctcctgctctttgtgattagcatcacaacgattatcgtcatcttcctcaaccgcaggcggagaagagagaggcgcgatctgttcaccgagtcttgggatacacagaaagctccgaacaactatcggagccctatctccaccggacagcccacaaatcagtctatggacgacacacgcgaggacatctatgtcaattaccccactttttctaggcggcctaagaccagagtgcgcgccaagagaagcggatctggcgtgaagcagaccctgaatttcgacctgctgaagctggctggcgacgtggaatccaacccaggcccttctagaggccatatgaccgagtacaagcccacggtgcgcctcgccacccgcgacgacgtccccagggccgtacgcaccctcgccgccgcgttcgccgactaccccgccacgcgccacaccgtcgatccggaccgccacatcgagcgggtcaccgagctgcaagaactcttcctcacgcgcgtcgggctcgacatcggcaaggtgtgggtcgcggacgacggcgccgcggtggcggtctggaccacgccggagagcgtcgaagcgggggcggtgttcgccgagatcggcccgcgcatggccgagttgagcggttcccggctggccgcgcagcaacagatggaaggcctcctggcgccgcaccggcccaaggagcccgcgtggttcctggccaccgtcggcgtctcgcccgaccaccagggcaagggtctgggcagcgccgtcgtgctccccggagtggaggcggccgagcgcgccggggtgcccgccttcctggagacctccgcgccccgcaacctccccttctacgagcggctcggcttcaccgtcaccgccgacgtcgaggtgcccgaaggaccgcgcacctggtgcatgacccgcaagcccggtgcctga

SEQ ID NO: 1897 - DNA, 2901 bp, Artificial Sequence
  Synthetic Polynucleotide
atggccttaccagtgaccgccttgctcctgccgctggccttgctgctccacgccgccaggccggaagtgcagctggttgaatctggcggaggactggttcaggctggcggatctctgagactgtcttgtgccgccagcggcagaacctttagcatgggctggtttagacaggcccctggcaaagagagagagttcgtcgccgccatcacatactctggcggcagcccttactacgccgactctgtgaagggcagattcaccatcagccgggacaacgccaagaacaccgtgtacctccagatgaacagcctgaagcctgaggacaccgccgtgtactactgcgccgccaatccaacatacggcagcgactggaacgccgagaattggggccagggaacccaagtgacagtgtctagcctcgaggacctgaagaacgtgttcccacctgaggtggccgtgttcgagcctagcgaggccgagatcagccacacccagaaagccaccctcgtgtgcctggctaccggcttctaccccgaccatgtggaactgtcttggtgggtcaacggcaaagaggtgcacagcggcgtgtctaccgacccccagccactgaaagaacagcccgccctgaacgacagccggtactgcctgagcagcagactgagagtgtccgccaccttctggcagaacccccggaaccacttcagatgccaggtgcagttctacggcctgagcgagaacgacgagtggacccaggacagagccaagcccgtgacccagatcgtgtctgccgaagcctggggcagagccgattgcggatccgtggccgagggcaagaccgacaaccagtacaccctgtttgtggctggcggcacagttctgctgctgctgttcgtgatctccatcacgactatcatcgtgatctttctgaaccggcggaggcggagagagcggagggatctgtttacagagagctgggacacccagaaggcccctaacaactacagaagccccatcagcaccggccagcctaccaaccagagcatggacgatacccgcgaggacatctacgtgaactaccctaccttcagcagacggcccaagacaagagttagggccaagcgatctggatctggagcaacaaacttctcactactcaaacaagcaggtgacgtggaggagaatcccgggcctactagtatggactggatttggcgcatccttttccttgtcggcgctgctaccggcgcgcattccgggcccgaagtgcaactggttgaatccggtggcggcctggtgcaagcaggcggatctctcagacttagctgtgccgcctccggcagaaccttcacaatgggatggtttaggcaggctccagggaaagagagagagttcgtcgccgccatctctctgtctcccacactggcctactacgccgactctgtgaaaggccggttcaccatctccagagataatgccaagaacaccgtggtgctgcaaatgaactctctgaaacccgaggatacagccctgtactattgtgccgctgaccggaagtccgtgatgagcatcagacccgattactggggacagggcacacaagtcacagtgtcctctacgcgtatccagaaccctgatcctgccgtgtaccagctgcgggatagcaagagcagcgacaagagcgtgtgtctgttcaccgacttcgacagccagaccaacgtgtcccagagcaaggactccgacgtgtacatcaccgataagaccgtgctggacatgcggagcatggacttcaagagcaactccgccgtggcctggtccaacaagtccgatttcgcctgcgccaacgccttcaacaacagcattatccccgaggacacattcttcccaagccccgagagcagctgcggtaccgtggctgaaggcaaaacagataatcagtacacactcttcgttgccggcggaaccgtgctgctcctgctctttgtgattagcatcacaacgattatcgtcatcttcctcaaccgcaggcggagaagagagaggcgcgatctgttcaccgagtcttgggatacacagaaagctccgaacaactatcggagccctatctccaccggacagcccacaaatcagtctatggacgacacacgcgaggacatctatgtcaattaccccactttttctaggcggcctaagaccagagtgcgcgccaagagaagcggatctggcgtgaagcagaccctgaatttcgacctgctgaagctggctggcgacgtggaatccaacccaggcccttctagaggccatatgaccgagtacaagcccacggtgcgcctcgccacccgcgacgacgtccccagggccgtacgcaccctcgccgccgcgttcgccgactaccccgccacgcgccacaccgtcgatccggaccgccacatcgagcgggtcaccgagctgcaagaactcttcctcacgcgcgtcgggctcgacatcggcaaggtgtgggtcgcggacgacggcgccgcggtggcggtctggaccacgccggagagcgtcgaagcgggggcggtgttcgccgagatcggcccgcgcatggccgagttgagcggttcccggctggccgcgcagcaacagatggaaggcctcctggcgccgcaccggcccaaggagcccgcgtggttcctggccaccgtcggcgtctcgcccgaccaccagggcaagggtctgggcagcgccgtcgtgctccccggagtggaggcggccgagcgcgccggggtgcccgccttcctggagacctccgcgccccgcaacctccccttctacgagcggctcggcttcaccgtcaccgccgacgtcgaggtgcccgaaggaccgcgcacctggtgcatgacccgcaagcccggtgcctga

SEQ ID NO: 1898 - DNA, 1479 bp, Artificial Sequence
  Synthetic Polynucleotide
atggccttaccagtgaccgccttgctcctgccgctggccttgctgctccacgccgccaggccggcatgcgaagtgcagctgcttgaaagtggcggcggactgattcagcctggcggatctctgagactgagctgtgccgccagcggcttcaccttttctagccacgccatgacctgggtccgacaggcacctggaaaagggcttgaatgggtgtccgccatcagcggctctggcgattacacacactacgccgacagcgtgaagggcagattcaccatcagcagagacaacagcaagaacaccgtgtacctccagatgaacagcctgagagccgaggacagcgccgtgtattattgcgccaaggatgaggatggcggcagcctgcttggacacagaggacaaggcaccctggtcaccgtttcttccggtaccggcggaggcggatctggcggcggaggtagcggtggcggaggatctgaattcggatctctcgaggtggccgagggcaagaccgacaaccagtacaccctgtttgtggctggcggcacagttctgctgctgctgttcgtgatctccatcacgactatcatcgtgatctttctgaaccggcggaggcggagagagcggagggatctgtttacagagagctgggacacccagaaggcccctaacaactacagaagccccatcagcaccggccagcctaccaaccagagcatggacgatacccgcgaggacatctacgtgaactaccctaccttcagcagacggcccaagacaagagttagggccaagcgatctggatctggagcaacaaacttctcactactcaaacaagcaggtgacgtggaggagaatcccgggcctactagaggccatatgaccgagtacaagcccacggtgcgcctcgccacccgcgacgacgtccccagggccgtacgcaccctcgccgccgcgttcgccgactaccccgccacgcgccacaccgtcgatccggaccgccacatcgagcgggtcaccgagctgcaagaactcttcctcacgcgcgtcgggctcgacatcggcaaggtgtgggtcgcggacgacggcgccgcggtggcggtctggaccacgccggagagcgtcgaagcgggggcggtgttcgccgagatcggcccgcgcatggccgagttgagcggttcccggctggccgcgcagcaacagatggaaggcctcctggcgccgcaccggcccaaggagcccgcgtggttcctggccaccgtcggcgtctcgcccgaccaccagggcaagggtctgggcagcgccgtcgtgctccccggagtggaggcggccgagcgcgccggggtgcccgccttcctggagacctccgcgccccgcaacctccccttctacgagcggctcggcttcaccgtcaccgccgacgtcgaggtgcccgaaggaccgcgcacctggtgcatgacccgcaagcccggtgcctga

SEQ ID NO: 1899 - DNA, 3015 bp, Artificial Sequence
  Synthetic Polynucleotide
atggccttaccagtgaccgccttgctcctgccgctggccttgctgctccacgccgccaggccggacatccagatgacacagagccctagcagcctgtctgccagcgtgggagacagagtgaccatcacatgcaaggccagcgaccacatcaacaactggctggcctggtatcagcagaagcctggacaggcccctaagctgctgatctacggcgctaccacactggaaacaggcgtgcccagcagattttctggcagcggctctggcaccgactacaccctgacaatatccagcctccagcctgaggacttcgccacctactactgtcagcagagctggaacaccccttggacattcggccagggcaccaagctggaaatcaagagactcgagatcggctggctgttgctccaggcccctcggtgggtgttcaaggaggaagaccctattcacctgaggtgtcacagctggaagaacactgctctgcataaggtcacatatttacagaatggcaaaggcaggaagtattttcatcataattctgacttctacattccaaaagccacactcaaagacagcggctcctacttctgcagggggcttgttgggagtaaaaatgtgtcttcagagactgtgaacatcaccatcactcaaggtttggcagtgtcaaccatctcatcattctttccacctggctaccaagtgtccttctgcctggtcatggtgctgctgttcgccgtggataccggcctgtacttcagcgtcaagaccaacatccggtccagcaccagagactggaaggaccacaagttcaagtggcggaaggaccctcaggacaagagggccaagcgatctggatctggagcaacaaacttctcactactcaaacaagcaggtgacgtggaggagaatcccgggcctactagtatggactggatttggcgcatccttttccttgtcggcgctgctaccggcgcgcattccttcgaacaagttcagcttcaacagcctggcgctgagctggtcaaacctggcgcttctgtgaagatgagctgcaaagccagcggctacgccttcagcagctactggatcaactggatgaagcagaaacccggccagggactcgaatggatcggccaaatctatcccggcgacggcgacaccaactacaacggcaagttcaagggcagagccacactgaccgccgatacctctagcagcacagcctacatgcagctgagcagcctgaccagcgaagatagcgccgtgtacttctgtgcccggtccatcacaacagtcgtgggctgcgctatggactattggggccagggaacaagcgtgaccgtgtctagtacgcgtgaagaagtgctctggcataccagcgtgccatttgccgagaatatgtcccttgagtgtgtgtacccctctatggggattctgacccaagtcgagtggtttaagattgggacgcagcaagacagcattgccatcttctctccaactcacggaatggttattcggaagccctatgccgagagagtctatttcctgaactctacgatggcaagcaacaatatgacgctgttttttcggaacgcctccgaggatgatgtggggtactattcctgtagcctgtacacctatccacaaggcacatggcaaaaagtcattcaagtggtccagtccgactccttcgaggccgcagttccaagcaactcccacatcgttagcgagcctgggaagaatgtcacactgacctgtcagccccaaatgacatggcccgtccaagctgtccgctgggagaaaattcagccaagacagattgatctcctcacctactgtaacctggttcatggccggaatttcacctccaagtttccacggcagattgtcagcaactgtagccacggacgttggagtgtcattgtgattccagacgtgacagtgtctgactccgggctgtacagatgctatctgcaagccagcgcaggcgaaaacgaaacctttgtgatgcggctgaccgtggctgaaggcaaaacagataatcagtacacactcttcgttgccggcggaaccgtgctgctcctgctctttgtgattagcatcacaacgattatcgtcatcttcctcaaccgcaggcggagaagagagaggcgcgatctgttcaccgagtcttgggatacacagaaagctccgaacaactatcggagccctatctccaccggacagcccacaaatcagtctatggacgacacacgcgaggacatctatgtcaattaccccactttttctaggcggcctaagaccagagtgcgcgccaagagaagcggatctggcgtgaagcagaccctgaatttcgacctgctgaagctggctggcgacgtggaatccaacccaggcccttctagaggccatatgaccgagtacaagcccacggtgcgcctcgccacccgcgacgacgtccccagggccgtacgcaccctcgccgccgcgttcgccgactaccccgccacgcgccacaccgtcgatccggaccgccacatcgagcgggtcaccgagctgcaagaactcttcctcacgcgcgtcgggctcgacatcggcaaggtgtgggtcgcggacgacggcgccgcggtggcggtctggaccacgccggagagcgtcgaagcgggggcggtgttcgccgagatcggcccgcgcatggccgagttgagcggttcccggctggccgcgcagcaacagatggaaggcctcctggcgccgcaccggcccaaggagcccgcgtggttcctggccaccgtcggcgtctcgcccgaccaccagggcaagggtctgggcagcgccgtcgtgctccccggagtggaggcggccgagcgcgccggggtgcccgccttcctggagacctccgcgccccgcaacctccccttctacgagcggctcggcttcaccgtcaccgccgacgtcgaggtgcccgaaggaccgcgcacctggtgcatgacccgcaagcccggtgcctga

SEQ ID NO: 1900 - DNA, 3177 bp, Artificial Sequence
  Synthetic Polynucleotide
atggccttaccagtgaccgccttgctcctgccgctggccttgctgctccacgccgccaggccggcatgcgaagtgcagctgcttgaaagtggcggcggactgattcagcctggcggatctctgagactgagctgtgccgccagcggcttcaccttttctagccacgccatgacctgggtccgacaggcacctggaaaagggcttgaatgggtgtccgccatcagcggctctggcgattacacacactacgccgacagcgtgaagggcagattcaccatcagcagagacaacagcaagaacaccgtgtacctccagatgaacagcctgagagccgaggacagcgccgtgtattattgcgccaaggatgaggatggcggcagcctgcttggacacagaggacaaggcaccctggtcaccgtttcttccggtaccggcggaggcggatctggcggcggaggtagcggtggcggaggatctgaattcggatctctcgagatcggctggctgttgctccaggcccctcggtgggtgttcaaggaggaagaccctattcacctgaggtgtcacagctggaagaacactgctctgcataaggtcacatatttacagaatggcaaaggcaggaagtattttcatcataattctgacttctacattccaaaagccacactcaaagacagcggctcctacttctgcagggggcttgttgggagtaaaaatgtgtcttcagagactgtgaacatcaccatcactcaaggtttggcagtgtcaaccatctcatcattctttccacctggctaccaagtgtccttctgcctggtcatggtgctgctgttcgccgtggataccggcctgtacttcagcgtcaagaccaacatccggtccagcaccagagactggaaggaccacaagttcaagtggcggaaggaccctcaggacaagagggccaagcgatctggatctggagcaacaaacttctcactactcaaacaagcaggtgacgtggaggagaatcccgggcctactagtgccaccatggactggatttggcgcatccttttccttgtcggcgctgctaccggcgcccattccgggcccgaagtgcagctggttgaatctggcggaggactggttcaggctggcggatctctgagactgtcttgtgccgccagcggcagaacctttagcatgggctggtttagacaggcccctggcaaagagagagagttcgtcgccgccatcacatactctggcggcagcccttactacgccgactctgtgaagggcagattcaccatcagccgggacaacgccaagaacaccgtgtacctccagatgaacagcctgaagcctgaggacaccgccgtgtactactgcgccgccaatccaacatacggcagcgactggaacgccgagaattggggccagggaacccaagtgacagtgtctagcggatccggcggcggaggatctggcggaggcggatctgggggcggaggctctttcgaaggcagcacgcgtgaagaagtgctctggcataccagcgtgccatttgccgagaatatgtcccttgagtgtgtgtacccctctatggggattctgacccaagtcgagtggtttaagattgggacgcagcaagacagcattgccatcttctctccaactcacggaatggttattcggaagccctatgccgagagagtctatttcctgaactctacgatggcaagcaacaatatgacgctgttttttcggaacgcctccgaggatgatgtggggtactattcctgtagcctgtacacctatccacaaggcacatggcaaaaagtcattcaagtggtccagtccgactccttcgaggccgcagttccaagcaactcccacatcgttagcgagcctgggaagaatgtcacactgacctgtcagccccaaatgacatggcccgtccaagctgtccgctgggagaaaattcagccaagacagattgatctcctcacctactgtaacctggttcatggccggaatttcacctccaagtttccacggcagattgtcagcaactgtagccacggacgttggagtgtcattgtgattccagacgtgacagtgtctgactccgggctgtacagatgctatctgcaagccagcgcaggcgaaaacgaaacctttgtgatgcggctgaccgtggctgaaggcaaaacagataatcagtacacactcttcgttgccggcggaaccgtgctgctcctgctctttgtgattagcatcacaacgattatcgtcatcttcctcaaccgcaggcggagaagagagaggcgcgatctgttcaccgagtcttgggatacacagaaagctccgaacaactatcggagccctatctccaccggacagcccacaaatcagtctatggacgacacacgcgaggacatctatgtcaattaccccactttttctaggcggcctaagaccagagtgcgcgccaagagaagcggatctggcgtgaagcagaccctgaatttcgacctgctgaagctggctggcgacgtggaatccaacccaggcccttctagaggccatatgaccgagtacaagcccacggtgcgcctcgccacccgcgacgacgtccccagggccgtacgcaccctcgccgccgcgttcgccgactaccccgccacgcgccacaccgtcgatccggaccgccacatcgagcgggtcaccgagctgcaagaactcttcctcacgcgcgtcgggctcgacatcggcaaggtgtgggtcgcggacgacggcgccgcggtggcggtctggaccacgccggagagcgtcgaagcgggggcggtgttcgccgagatcggcccgcgcatggccgagttgagcggttcccggctggccgcgcagcaacagatggaaggcctcctggcgccgcaccggcccaaggagcccgcgtggttcctggccaccgtcggcgtctcgcccgaccaccagggcaagggtctgggcagcgccgtcgtgctccccggagtggaggcggccgagcgcgccggggtgcccgccttcctggagacctccgcgccccgcaacctccccttctacgagcggctcggcttcaccgtcaccgccgacgtcgaggtgcccgaaggaccgcgcacctggtgcatgacccgcaagcccggtgcctga

SEQ ID NO: 1901 - DNA, 3627 bp, Artificial Sequence
  Synthetic Polynucleotide
atggccttaccagtgaccgccttgctcctgccgctggccttgctgctccacgccgccaggccggacatccagatgacacagagccctagcagcctgtctgccagcgtgggagacagagtgaccatcacatgcaaggccagcgaccacatcaacaactggctggcctggtatcagcagaagcctggacaggcccctaagctgctgatctacggcgctaccacactggaaacaggcgtgcccagcagattttctggcagcggctctggcaccgactacaccctgacaatatccagcctccagcctgaggacttcgccacctactactgtcagcagagctggaacaccccttggacattcggccagggcaccaagctggaaatcaagagactcgagggacagcctaaggccaatcctaccgtgacactgttccctccaagcagcgaagaactccaggccaacaaggccacacttgtgtgcctgatctccgacttctaccctggggctgtgacagtggcttggaaggccgatggatctcctgtgaaagccggcgtggaaaccaccaagccatccaagcagagcaacaacaaatacgccgccagctcctacctgagcctgacacctgagcagtggaagtcccacagatcctacagctgccaagtgacccacgaaggcagcaccgtggaaaagacagtggcccctacagagtgcagcggatccatcggctggctgttgctccaggcccctcggtgggtgttcaaggaggaagaccctattcacctgaggtgtcacagctggaagaacactgctctgcataaggtcacatatttacagaatggcaaaggcaggaagtattttcatcataattctgacttctacattccaaaagccacactcaaagacagcggctcctacttctgcagggggcttgttgggagtaaaaatgtgtcttcagagactgtgaacatcaccatcactcaaggtttggcagtgtcaaccatctcatcattctttccacctggctaccaagtgtccttctgcctggtcatggtgctgctgttcgccgtggataccggcctgtacttcagcgtcaagaccaacatccggtccagcaccagagactggaaggaccacaagttcaagtggcggaaggaccctcaggacaagagggccaagcgatctggatctggagcaacaaacttctcactactcaaacaagcaggtgacgtggaggagaatcccgggcctactagtatggactggatttggcgcatccttttccttgtcggcgctgctaccggcgcgcattccttcgaacaagttcagcttcaacagcctggcgctgagctggtcaaacctggcgcttctgtgaagatgagctgcaaagccagcggctacgccttcagcagctactggatcaactggatgaagcagaaacccggccagggactcgaatggatcggccaaatctatcccggcgacggcgacaccaactacaacggcaagttcaagggcagagccacactgaccgccgatacctctagcagcacagcctacatgcagctgagcagcctgaccagcgaagatagcgccgtgtacttctgtgcccggtccatcacaacagtcgtgggctgcgctatggactattggggccagggaacaagcgtgaccgtgtctagtacgcgtgcctctacaaagggaccctccgtgtttcctctggctcccagcagcaagtctacaagcggaggaacagccgctctgggctgcctggtcaaggattactttcccgagcctgtgaccgtgtcctggaatagcggagcactgacaagcggcgtgcacacctttccagccgtgctgcaaagcagcggcctgtactctctgagcagcgtggtcacagtgcctagctctagcctgggcacccagacctacatctgcaatgtgaaccacaagcctagcaacaccaaggtggacaagagagtggaacccaagagctgtggtaccgaagaagtgctctggcataccagcgtgccatttgccgagaatatgtcccttgagtgtgtgtacccctctatggggattctgacccaagtcgagtggtttaagattgggacgcagcaagacagcattgccatcttctctccaactcacggaatggttattcggaagccctatgccgagagagtctatttcctgaactctacgatggcaagcaacaatatgacgctgttttttcggaacgcctccgaggatgatgtggggtactattcctgtagcctgtacacctatccacaaggcacatggcaaaaagtcattcaagtggtccagtccgactccttcgaggccgcagttccaagcaactcccacatcgttagcgagcctgggaagaatgtcacactgacctgtcagccccaaatgacatggcccgtccaagctgtccgctgggagaaaattcagccaagacagattgatctcctcacctactgtaacctggttcatggccggaatttcacctccaagtttccacggcagattgtcagcaactgtagccacggacgttggagtgtcattgtgattccagacgtgacagtgtctgactccgggctgtacagatgctatctgcaagccagcgcaggcgaaaacgaaacctttgtgatgcggctgaccgtggctgaaggcaaaacagataatcagtacacactcttcgttgccggcggaaccgtgctgctcctgctctttgtgattagcatcacaacgattatcgtcatcttcctcaaccgcaggcggagaagagagaggcgcgatctgttcaccgagtcttgggatacacagaaagctccgaacaactatcggagccctatctccaccggacagcccacaaatcagtctatggacgacacacgcgaggacatctatgtcaattaccccactttttctaggcggcctaagaccagagtgcgcgccaagagaagcggatctggcgtgaagcagaccctgaatttcgacctgctgaagctggctggcgacgtggaatccaacccaggcccttctagaggcgggatccacaccatggctacctacgaggtgctgtgcgaggtggcaagaaagctgggcaccgacgacagagaagtggtgctgttcctgctgaacgtgttcatccctcagcctacactggcccagctgatcggtgcactgagagccctgaaagaggaaggccggctgacctttcctctgctggccgaatgcctgttcagagccggaagaagggatctgctgcgggacctgctgcatctggaccccagatttctggaaagacacctggccggcaccatgagctacttcagcccttaccagctgaccgtgctgcacgttgacggcgaactgtgcgccagagatattcggagcctgatcttcctgagcaaggacaccatcggcagccggtctacccctcagacatttctgcactgggtgtactgcatggaaaacctggacctgctcggccccacagatgtggatgccctgatgtccatgctgagaagcctgagcagagtggacctccagagacaggtgcagacactgatgggactgcacctgagcggacctagccacagccagcactacagacacacccct

SEQ ID NO: 1902 - DNA, 3786 bp, Artificial Sequence
  Synthetic Polynucleotide
atggccttaccagtgaccgccttgctcctgccgctggccttgctgctccacgccgccaggccggacatccagatgacacagagccctagcagcctgtctgccagcgtgggagacagagtgaccatcacatgcaaggccagcgaccacatcaacaactggctggcctggtatcagcagaagcctggacaggcccctaagctgctgatctacggcgctaccacactggaaacaggcgtgcccagcagattttctggcagcggctctggcaccgactacaccctgacaatatccagcctccagcctgaggacttcgccacctactactgtcagcagagctggaacaccccttggacattcggccagggcaccaagctggaaatcaagagactcgagggacagcctaaggccaatcctaccgtgacactgttccctccaagcagcgaagaactccaggccaacaaggccacacttgtgtgcctgatctccgacttctaccctggggctgtgacagtggcttggaaggccgatggatctcctgtgaaagccggcgtggaaaccaccaagccatccaagcagagcaacaacaaatacgccgccagctcctacctgagcctgacacctgagcagtggaagtcccacagatcctacagctgccaagtgacccacgaaggcagcaccgtggaaaagacagtggcccctacagagtgcagcggatccatcggctggctgttgctccaggcccctcggtgggtgttcaaggaggaagaccctattcacctgaggtgtcacagctggaagaacactgctctgcataaggtcacatatttacagaatggcaaaggcaggaagtattttcatcataattctgacttctacattccaaaagccacactcaaagacagcggctcctacttctgcagggggcttgttgggagtaaaaatgtgtcttcagagactgtgaacatcaccatcactcaaggtttggcagtgtcaaccatctcatcattctttccacctggctaccaagtgtccttctgcctggtcatggtgctgctgttcgccgtggataccggcctgtacttcagcgtcaagaccaacatccggtccagcaccagagactggaaggaccacaagttcaagtggcggaaggaccctcaggacaagagggccaagcgatctggatctggagcaacaaacttctcactactcaaacaagcaggtgacgtggaggagaatcccgggcctactagtatggactggatttggcgcatccttttccttgtcggcgctgctaccggcgcgcattccttcgaacaagttcagcttcaacagcctggcgctgagctggtcaaacctggcgcttctgtgaagatgagctgcaaagccagcggctacgccttcagcagctactggatcaactggatgaagcagaaacccggccagggactcgaatggatcggccaaatctatcccggcgacggcgacaccaactacaacggcaagttcaagggcagagccacactgaccgccgatacctctagcagcacagcctacatgcagctgagcagcctgaccagcgaagatagcgccgtgtacttctgtgcccggtccatcacaacagtcgtgggctgcgctatggactattggggccagggaacaagcgtgaccgtgtctagtacgcgtgcctctacaaagggaccctccgtgtttcctctggctcccagcagcaagtctacaagcggaggaacagccgctctgggctgcctggtcaaggattactttcccgagcctgtgaccgtgtcctggaatagcggagcactgacaagcggcgtgcacacctttccagccgtgctgcaaagcagcggcctgtactctctgagcagcgtggtcacagtgcctagctctagcctgggcacccagacctacatctgcaatgtgaaccacaagcctagcaacaccaaggtggacaagagagtggaacccaagagctgtggtaccgaagaagtgctctggcataccagcgtgccatttgccgagaatatgtcccttgagtgtgtgtacccctctatggggattctgacccaagtcgagtggtttaagattgggacgcagcaagacagcattgccatcttctctccaactcacggaatggttattcggaagccctatgccgagagagtctatttcctgaactctacgatggcaagcaacaatatgacgctgttttttcggaacgcctccgaggatgatgtggggtactattcctgtagcctgtacacctatccacaaggcacatggcaaaaagtcattcaagtggtccagtccgactccttcgaggccgcagttccaagcaactcccacatcgttagcgagcctgggaagaatgtcacactgacctgtcagccccaaatgacatggcccgtccaagctgtccgctgggagaaaattcagccaagacagattgatctcctcacctactgtaacctggttcatggccggaatttcacctccaagtttccacggcagattgtcagcaactgtagccacggacgttggagtgtcattgtgattccagacgtgacagtgtctgactccgggctgtacagatgctatctgcaagccagcgcaggcgaaaacgaaacctttgtgatgcggctgaccgtggctgaaggcaaaacagataatcagtacacactcttcgttgccggcggaaccgtgctgctcctgctctttgtgattagcatcacaacgattatcgtcatcttcctcaaccgcaggcggagaagagagaggcgcgatctgttcaccgagtcttgggatacacagaaagctccgaacaactatcggagccctatctccaccggacagcccacaaatcagtctatggacgacacacgcgaggacatctatgtcaattaccccactttttctaggcggcctaagaccagagtgcgcgccaagagaagcggatctggcgtgaagcagaccctgaatttcgacctgctgaagctggctggcgacgtggaatccaacccaggcccttctagaggcgggatccacaccatgtccgactccaaggaggtccctagccttccatttttgcgacacttgctcgaagagttggacagccatgaggacagcttgctgctgtttctgtgtcacgacgcggccccgggctgcacgacggtcacgcaagctttgtgctcgcttagccaacagcgcaagctgaccctcgcggctctggtcgagatgctctacgtgctgcagcgtatggatcttctcaagagccgcttcgggctcagcaaggagggggccgagcaattgctgggcacaagctttctcacgcgctaccgcaagctcatggtttgcgtgggtgaggagctcgactcgagcgagctacgcgctctacgcttgttcgcgtgcaacctgaatccgagcctgagcacggcgctttctgagagcagccgctttgtcgagcttgtactcgcgcttgaaaacgtaggactcgtctcgccatcgagtgtttccgtgcttgcggacatgttgcgcactcttcggcgcctcgatttgtgccagcagcttgttgagtacgaacaacaagagcaagccaggtaccgttactgttacgcggcctcgccctcattgccagttcgtacgttacgtcgggggcacggcgcgagtgaacacgagcagctgtgcatgcccgtgcaagaatcctctgacagccccgagctgctgcgcacgcccgtacaagaatcctccagcgacagccccgagcaaacgact

SEQ ID NO: 1903 - DNA, 3654 bp, Artificial Sequence
  Synthetic Polynucleotide
atggccttaccagtgaccgccttgctcctgccgctggccttgctgctccacgccgccaggccggacatccagatgacacagagccctagcagcctgtctgccagcgtgggagacagagtgaccatcacatgcaaggccagcgaccacatcaacaactggctggcctggtatcagcagaagcctggacaggcccctaagctgctgatctacggcgctaccacactggaaacaggcgtgcccagcagattttctggcagcggctctggcaccgactacaccctgacaatatccagcctccagcctgaggacttcgccacctactactgtcagcagagctggaacaccccttggacattcggccagggcaccaagctggaaatcaagagactcgagggacagcctaaggccaatcctaccgtgacactgttccctccaagcagcgaagaactccaggccaacaaggccacacttgtgtgcctgatctccgacttctaccctggggctgtgacagtggcttggaaggccgatggatctcctgtgaaagccggcgtggaaaccaccaagccatccaagcagagcaacaacaaatacgccgccagctcctacctgagcctgacacctgagcagtggaagtcccacagatcctacagctgccaagtgacccacgaaggcagcaccgtggaaaagacagtggcccctacagagtgcagcggatccatcggctggctgttgctccaggcccctcggtgggtgttcaaggaggaagaccctattcacctgaggtgtcacagctggaagaacactgctctgcataaggtcacatatttacagaatggcaaaggcaggaagtattttcatcataattctgacttctacattccaaaagccacactcaaagacagcggctcctacttctgcagggggcttgttgggagtaaaaatgtgtcttcagagactgtgaacatcaccatcactcaaggtttggcagtgtcaaccatctcatcattctttccacctggctaccaagtgtccttctgcctggtcatggtgctgctgttcgccgtggataccggcctgtacttcagcgtcaagaccaacatccggtccagcaccagagactggaaggaccacaagttcaagtggcggaaggaccctcaggacaagagggccaagcgatctggatctggagcaacaaacttctcactactcaaacaagcaggtgacgtggaggagaatcccgggcctactagtatggactggatttggcgcatccttttccttgtcggcgctgctaccggcgcgcattccttcgaacaagttcagcttcaacagcctggcgctgagctggtcaaacctggcgcttctgtgaagatgagctgcaaagccagcggctacgccttcagcagctactggatcaactggatgaagcagaaacccggccagggactcgaatggatcggccaaatctatcccggcgacggcgacaccaactacaacggcaagttcaagggcagagccacactgaccgccgatacctctagcagcacagcctacatgcagctgagcagcctgaccagcgaagatagcgccgtgtacttctgtgcccggtccatcacaacagtcgtgggctgcgctatggactattggggccagggaacaagcgtgaccgtgtctagtacgcgtgcctctacaaagggaccctccgtgtttcctctggctcccagcagcaagtctacaagcggaggaacagccgctctgggctgcctggtcaaggattactttcccgagcctgtgaccgtgtcctggaatagcggagcactgacaagcggcgtgcacacctttccagccgtgctgcaaagcagcggcctgtactctctgagcagcgtggtcacagtgcctagctctagcctgggcacccagacctacatctgcaatgtgaaccacaagcctagcaacaccaaggtggacaagagagtggaacccaagagctgtggtaccgaagaagtgctctggcataccagcgtgccatttgccgagaatatgtcccttgagtgtgtgtacccctctatggggattctgacccaagtcgagtggtttaagattgggacgcagcaagacagcattgccatcttctctccaactcacggaatggttattcggaagccctatgccgagagagtctatttcctgaactctacgatggcaagcaacaatatgacgctgttttttcggaacgcctccgaggatgatgtggggtactattcctgtagcctgtacacctatccacaaggcacatggcaaaaagtcattcaagtggtccagtccgactccttcgaggccgcagttccaagcaactcccacatcgttagcgagcctgggaagaatgtcacactgacctgtcagccccaaatgacatggcccgtccaagctgtccgctgggagaaaattcagccaagacagattgatctcctcacctactgtaacctggttcatggccggaatttcacctccaagtttccacggcagattgtcagcaactgtagccacggacgttggagtgtcattgtgattccagacgtgacagtgtctgactccgggctgtacagatgctatctgcaagccagcgcaggcgaaaacgaaacctttgtgatgcggctgaccgtggctgaaggcaaaacagataatcagtacacactcttcgttgccggcggaaccgtgctgctcctgctctttgtgattagcatcacaacgattatcgtcatcttcctcaaccgcaggcggagaagagagaggcgcgatctgttcaccgagtcttgggatacacagaaagctccgaacaactatcggagccctatctccaccggacagcccacaaatcagtctatggacgacacacgcgaggacatctatgtcaattaccccactttttctaggcggcctaagaccagagtgcgcgccaagagaagcggatctggcgtgaagcagaccctgaatttcgacctgctgaagctggctggcgacgtggaatccaacccaggcccttctagaggccatatgaccgagtacaagcccacggtgcgcctcgccacccgcgacgacgtccccagggccgtacgcaccctcgccgccgcgttcgccgactaccccgccacgcgccacaccgtcgatccggaccgccacatcgagcgggtcaccgagctgcaagaactcttcctcacgcgcgtcgggctcgacatcggcaaggtgtgggtcgcggacgacggcgccgcggtggcggtctggaccacgccggagagcgtcgaagcgggggcggtgttcgccgagatcggcccgcgcatggccgagttgagcggttcccggctggccgcgcagcaacagatggaaggcctcctggcgccgcaccggcccaaggagcccgcgtggttcctggccaccgtcggcgtctcgcccgaccaccagggcaagggtctgggcagcgccgtcgtgctccccggagtggaggcggccgagcgcgccggggtgcccgccttcctggagacctccgcgccccgcaacctccccttctacgagcggctcggcttcaccgtcaccgccgacgtcgaggtgcccgaaggaccgcgcacctggtgcatgacccgcaagcccggtgcctga

SEQ ID NO: 1904 - DNA, 4065 bp, Artificial Sequence
  Synthetic Polynucleotide
atggccttaccagtgaccgccttgctcctgccgctggccttgctgctccacgccgccaggccggaagtgcagctggttgaatctggcggaggactggttcaggctggcggatctctgagactgtcttgtgccgccagcggcagaacctttagcatgggctggtttagacaggcccctggcaaagagagagagttcgtcgccgccatcacatactctggcggcagcccttactacgccgactctgtgaagggcagattcaccatcagccgggacaacgccaagaacaccgtgtacctccagatgaacagcctgaagcctgaggacaccgccgtgtactactgcgccgccaatccaacatacggcagcgactggaacgccgagaattggggccagggaacccaagtgacagtgtctagcggtaccggcggaggcggatctggcggcggaggtagcggtggcggaggatctgaattcgacatccagatgacacagagccctagcagcctgtctgccagcgtgggagacagagtgaccatcacatgcaaggccagcgaccacatcaacaactggctggcctggtatcagcagaagcctggacaggcccctaagctgctgatctacggcgctaccacactggaaacaggcgtgcccagcagattttctggcagcggctctggcaccgactacaccctgacaatatccagcctccagcctgaggacttcgccacctactactgtcagcagagctggaacaccccttggacattcggccagggcaccaagctggaaatcaagagactcgagggacagcctaaggccaatcctaccgtgacactgttccctccaagcagcgaagaactccaggccaacaaggccacacttgtgtgcctgatctccgacttctaccctggggctgtgacagtggcttggaaggccgatggatctcctgtgaaagccggcgtggaaaccaccaagccatccaagcagagcaacaacaaatacgccgccagctcctacctgagcctgacacctgagcagtggaagtcccacagatcctacagctgccaagtgacccacgaaggcagcaccgtggaaaagacagtggcccctacagagtgcagcggatccatcggctggctgttgctccaggcccctcggtgggtgttcaaggaggaagaccctattcacctgaggtgtcacagctggaagaacactgctctgcataaggtcacatatttacagaatggcaaaggcaggaagtattttcatcataattctgacttctacattccaaaagccacactcaaagacagcggctcctacttctgcagggggcttgttgggagtaaaaatgtgtcttcagagactgtgaacatcaccatcactcaaggtttggcagtgtcaaccatctcatcattctttccacctggctaccaagtgtccttctgcctggtcatggtgctgctgttcgccgtggataccggcctgtacttcagcgtcaagaccaacatccggtccagcaccagagactggaaggaccacaagttcaagtggcggaaggaccctcaggacaagagggccaagcgatctggatctggagcaacaaacttctcactactcaaacaagcaggtgacgtggaggagaatcccgggcctactagtatggactggatttggcgcatccttttccttgtcggcgctgctaccggcgcgcattccttcgaacaagttcagcttcaacagcctggcgctgagctggtcaaacctggcgcttctgtgaagatgagctgcaaagccagcggctacgccttcagcagctactggatcaactggatgaagcagaaacccggccagggactcgaatggatcggccaaatctatcccggcgacggcgacaccaactacaacggcaagttcaagggcagagccacactgaccgccgatacctctagcagcacagcctacatgcagctgagcagcctgaccagcgaagatagcgccgtgtacttctgtgcccggtccatcacaacagtcgtgggctgcgctatggactattggggccagggaacaagcgtgaccgtgtctagtacgcgtgcctctacaaagggaccctccgtgtttcctctggctcccagcagcaagtctacaagcggaggaacagccgctctgggctgcctggtcaaggattactttcccgagcctgtgaccgtgtcctggaatagcggagcactgacaagcggcgtgcacacctttccagccgtgctgcaaagcagcggcctgtactctctgagcagcgtggtcacagtgcctagctctagcctgggcacccagacctacatctgcaatgtgaaccacaagcctagcaacaccaaggtggacaagagagtggaacccaagagctgtggtaccgaagaagtgctctggcataccagcgtgccatttgccgagaatatgtcccttgagtgtgtgtacccctctatggggattctgacccaagtcgagtggtttaagattgggacgcagcaagacagcattgccatcttctctccaactcacggaatggttattcggaagccctatgccgagagagtctatttcctgaactctacgatggcaagcaacaatatgacgctgttttttcggaacgcctccgaggatgatgtggggtactattcctgtagcctgtacacctatccacaaggcacatggcaaaaagtcattcaagtggtccagtccgactccttcgaggccgcagttccaagcaactcccacatcgttagcgagcctgggaagaatgtcacactgacctgtcagccccaaatgacatggcccgtccaagctgtccgctgggagaaaattcagccaagacagattgatctcctcacctactgtaacctggttcatggccggaatttcacctccaagtttccacggcagattgtcagcaactgtagccacggacgttggagtgtcattgtgattccagacgtgacagtgtctgactccgggctgtacagatgctatctgcaagccagcgcaggcgaaaacgaaacctttgtgatgcggctgaccgtggctgaaggcaaaacagataatcagtacacactcttcgttgccggcggaaccgtgctgctcctgctctttgtgattagcatcacaacgattatcgtcatcttcctcaaccgcaggcggagaagagagaggcgcgatctgttcaccgagtcttgggatacacagaaagctccgaacaactatcggagccctatctccaccggacagcccacaaatcagtctatggacgacacacgcgaggacatctatgtcaattaccccactttttctaggcggcctaagaccagagtgcgcgccaagagaagcggatctggcgtgaagcagaccctgaatttcgacctgctgaagctggctggcgacgtggaatccaacccaggcccttctagaggccatatgaccgagtacaagcccacggtgcgcctcgccacccgcgacgacgtccccagggccgtacgcaccctcgccgccgcgttcgccgactaccccgccacgcgccacaccgtcgatccggaccgccacatcgagcgggtcaccgagctgcaagaactcttcctcacgcgcgtcgggctcgacatcggcaaggtgtgggtcgcggacgacggcgccgcggtggcggtctggaccacgccggagagcgtcgaagcgggggcggtgttcgccgagatcggcccgcgcatggccgagttgagcggttcccggctggccgcgcagcaacagatggaaggcctcctggcgccgcaccggcccaaggagcccgcgtggttcctggccaccgtcggcgtctcgcccgaccaccagggcaagggtctgggcagcgccgtcgtgctccccggagtggaggcggccgagcgcgccggggtgcccgccttcctggagacctccgcgccccgcaacctccccttctacgagcggctcggcttcaccgtcaccgccgacgtcgaggtgcccgaaggaccgcgcacctggtgcatgacccgcaagcccggtgcctga

SEQ ID NO: 1905 - DNA, 4476 bp, Artificial Sequence
  Synthetic Polynucleotide
atggccttaccagtgaccgccttgctcctgccgctggccttgctgctccacgccgccaggccggaagtgcagctggttgaatctggcggaggactggttcaggctggcggatctctgagactgtcttgtgccgccagcggcagaacctttagcatgggctggtttagacaggcccctggcaaagagagagagttcgtcgccgccatcacatactctggcggcagcccttactacgccgactctgtgaagggcagattcaccatcagccgggacaacgccaagaacaccgtgtacctccagatgaacagcctgaagcctgaggacaccgccgtgtactactgcgccgccaatccaacatacggcagcgactggaacgccgagaattggggccagggaacccaagtgacagtgtctagcggtaccggcggaggcggatctggcggcggaggtagcggtggcggaggatctgaattcgacatccagatgacacagagccctagcagcctgtctgccagcgtgggagacagagtgaccatcacatgcaaggccagcgaccacatcaacaactggctggcctggtatcagcagaagcctggacaggcccctaagctgctgatctacggcgctaccacactggaaacaggcgtgcccagcagattttctggcagcggctctggcaccgactacaccctgacaatatccagcctccagcctgaggacttcgccacctactactgtcagcagagctggaacaccccttggacattcggccagggcaccaagctggaaatcaagagactcgagggacagcctaaggccaatcctaccgtgacactgttccctccaagcagcgaagaactccaggccaacaaggccacacttgtgtgcctgatctccgacttctaccctggggctgtgacagtggcttggaaggccgatggatctcctgtgaaagccggcgtggaaaccaccaagccatccaagcagagcaacaacaaatacgccgccagctcctacctgagcctgacacctgagcagtggaagtcccacagatcctacagctgccaagtgacccacgaaggcagcaccgtggaaaagacagtggcccctacagagtgcagcggatccatcggctggctgttgctccaggcccctcggtgggtgttcaaggaggaagaccctattcacctgaggtgtcacagctggaagaacactgctctgcataaggtcacatatttacagaatggcaaaggcaggaagtattttcatcataattctgacttctacattccaaaagccacactcaaagacagcggctcctacttctgcagggggcttgttgggagtaaaaatgtgtcttcagagactgtgaacatcaccatcactcaaggtttggcagtgtcaaccatctcatcattctttccacctggctaccaagtgtccttctgcctggtcatggtgctgctgttcgccgtggataccggcctgtacttcagcgtcaagaccaacatccggtccagcaccagagactggaaggaccacaagttcaagtggcggaaggaccctcaggacaagagggccaagcgatctggatctggagcaacaaacttctcactactcaaacaagcaggtgacgtggaggagaatcccgggcctactagtatggactggatttggcgcatccttttccttgtcggcgctgctaccggcgcgcattccgggcccgaagtgcaactggttgaatccggtggcggcctggtgcaagcaggcggatctctcagacttagctgtgccgcctccggcagaaccttcacaatgggatggtttaggcaggctccagggaaagagagagagttcgtcgccgccatctctctgtctcccacactggcctactacgccgactctgtgaaaggccggttcaccatctccagagataatgccaagaacaccgtggtgctgcaaatgaactctctgaaacccgaggatacagccctgtactattgtgccgctgaccggaagtccgtgatgagcatcagacccgattactggggacagggcacacaagtcacagtgtcctctggatccggcggcggaggatctggcggaggcggatctgggggcggaggctctttcgaacaagttcagcttcaacagcctggcgctgagctggtcaaacctggcgcttctgtgaagatgagctgcaaagccagcggctacgccttcagcagctactggatcaactggatgaagcagaaacccggccagggactcgaatggatcggccaaatctatcccggcgacggcgacaccaactacaacggcaagttcaagggcagagccacactgaccgccgatacctctagcagcacagcctacatgcagctgagcagcctgaccagcgaagatagcgccgtgtacttctgtgcccggtccatcacaacagtcgtgggctgcgctatggactattggggccagggaacaagcgtgaccgtgtctagtacgcgtgcctctacaaagggaccctccgtgtttcctctggctcccagcagcaagtctacaagcggaggaacagccgctctgggctgcctggtcaaggattactttcccgagcctgtgaccgtgtcctggaatagcggagcactgacaagcggcgtgcacacctttccagccgtgctgcaaagcagcggcctgtactctctgagcagcgtggtcacagtgcctagctctagcctgggcacccagacctacatctgcaatgtgaaccacaagcctagcaacaccaaggtggacaagagagtggaacccaagagctgtggtaccgaagaagtgctctggcataccagcgtgccatttgccgagaatatgtcccttgagtgtgtgtacccctctatggggattctgacccaagtcgagtggtttaagattgggacgcagcaagacagcattgccatcttctctccaactcacggaatggttattcggaagccctatgccgagagagtctatttcctgaactctacgatggcaagcaacaatatgacgctgttttttcggaacgcctccgaggatgatgtggggtactattcctgtagcctgtacacctatccacaaggcacatggcaaaaagtcattcaagtggtccagtccgactccttcgaggccgcagttccaagcaactcccacatcgttagcgagcctgggaagaatgtcacactgacctgtcagccccaaatgacatggcccgtccaagctgtccgctgggagaaaattcagccaagacagattgatctcctcacctactgtaacctggttcatggccggaatttcacctccaagtttccacggcagattgtcagcaactgtagccacggacgttggagtgtcattgtgattccagacgtgacagtgtctgactccgggctgtacagatgctatctgcaagccagcgcaggcgaaaacgaaacctttgtgatgcggctgaccgtggctgaaggcaaaacagataatcagtacacactcttcgttgccggcggaaccgtgctgctcctgctctttgtgattagcatcacaacgattatcgtcatcttcctcaaccgcaggcggagaagagagaggcgcgatctgttcaccgagtcttgggatacacagaaagctccgaacaactatcggagccctatctccaccggacagcccacaaatcagtctatggacgacacacgcgaggacatctatgtcaattaccccactttttctaggcggcctaagaccagagtgcgcgccaagagaagcggatctggcgtgaagcagaccctgaatttcgacctgctgaagctggctggcgacgtggaatccaacccaggcccttctagaggccatatgaccgagtacaagcccacggtgcgcctcgccacccgcgacgacgtccccagggccgtacgcaccctcgccgccgcgttcgccgactaccccgccacgcgccacaccgtcgatccggaccgccacatcgagcgggtcaccgagctgcaagaactcttcctcacgcgcgtcgggctcgacatcggcaaggtgtgggtcgcggacgacggcgccgcggtggcggtctggaccacgccggagagcgtcgaagcgggggcggtgttcgccgagatcggcccgcgcatggccgagttgagcggttcccggctggccgcgcagcaacagatggaaggcctcctggcgccgcaccggcccaaggagcccgcgtggttcctggccaccgtcggcgtctcgcccgaccaccagggcaagggtctgggcagcgccgtcgtgctccccggagtggaggcggccgagcgcgccggggtgcccgccttcctggagacctccgcgccccgcaacctccccttctacgagcggctcggcttcaccgtcaccgccgacgtcgaggtgcccgaaggaccgcgcacctggtgcatgacccgcaagcccggtgcctga

SEQ ID NO: 1906 - DNA, 3675 bp, Artificial Sequence
  Synthetic Polynucleotide
atggccttaccagtgaccgccttgctcctgccgctggccttgctgctccacgccgccaggccggaagtgcagctggttgaatctggcggaggactggttcaggctggcggatctctgagactgtcttgtgccgccagcggcagaacctttagcatgggctggtttagacaggcccctggcaaagagagagagttcgtcgccgccatcacatactctggcggcagcccttactacgccgactctgtgaagggcagattcaccatcagccgggacaacgccaagaacaccgtgtacctccagatgaacagcctgaagcctgaggacaccgccgtgtactactgcgccgccaatccaacatacggcagcgactggaacgccgagaattggggccagggaacccaagtgacagtgtctagcctcgagggacagcctaaggccaatcctaccgtgacactgttccctccaagcagcgaagaactccaggccaacaaggccacacttgtgtgcctgatctccgacttctaccctggggctgtgacagtggcttggaaggccgatggatctcctgtgaaagccggcgtggaaaccaccaagccatccaagcagagcaacaacaaatacgccgccagctcctacctgagcctgacacctgagcagtggaagtcccacagatcctacagctgccaagtgacccacgaaggcagcaccgtggaaaagacagtggcccctacagagtgcagcggatccatcggctggctgttgctccaggcccctcggtgggtgttcaaggaggaagaccctattcacctgaggtgtcacagctggaagaacactgctctgcataaggtcacatatttacagaatggcaaaggcaggaagtattttcatcataattctgacttctacattccaaaagccacactcaaagacagcggctcctacttctgcagggggcttgttgggagtaaaaatgtgtcttcagagactgtgaacatcaccatcactcaaggtttggcagtgtcaaccatctcatcattctttccacctggctaccaagtgtccttctgcctggtcatggtgctgctgttcgccgtggataccggcctgtacttcagcgtcaagaccaacatccggtccagcaccagagactggaaggaccacaagttcaagtggcggaaggaccctcaggacaagagggccaagcgatctggatctggagcaacaaacttctcactactcaaacaagcaggtgacgtggaggagaatcccgggcctactagtatggactggatttggcgcatccttttccttgtcggcgctgctaccggcgcgcattccgggcccgaagtgcaactggttgaatccggtggcggcctggtgcaagcaggcggatctctcagacttagctgtgccgcctccggcagaaccttcacaatgggatggtttaggcaggctccagggaaagagagagagttcgtcgccgccatctctctgtctcccacactggcctactacgccgactctgtgaaaggccggttcaccatctccagagataatgccaagaacaccgtggtgctgcaaatgaactctctgaaacccgaggatacagccctgtactattgtgccgctgaccggaagtccgtgatgagcatcagacccgattactggggacagggcacacaagtcacagtgtcctctacgcgtgcctctacaaagggaccctccgtgtttcctctggctcccagcagcaagtctacaagcggaggaacagccgctctgggctgcctggtcaaggattactttcccgagcctgtgaccgtgtcctggaatagcggagcactgacaagcggcgtgcacacctttccagccgtgctgcaaagcagcggcctgtactctctgagcagcgtggtcacagtgcctagctctagcctgggcacccagacctacatctgcaatgtgaaccacaagcctagcaacaccaaggtggacaagagagtggaacccaagagctgtggtaccgaagaagtgctctggcataccagcgtgccatttgccgagaatatgtcccttgagtgtgtgtacccctctatggggattctgacccaagtcgagtggtttaagattgggacgcagcaagacagcattgccatcttctctccaactcacggaatggttattcggaagccctatgccgagagagtctatttcctgaactctacgatggcaagcaacaatatgacgctgttttttcggaacgcctccgaggatgatgtggggtactattcctgtagcctgtacacctatccacaaggcacatggcaaaaagtcattcaagtggtccagtccgactccttcgaggccgcagttccaagcaactcccacatcgttagcgagcctgggaagaatgtcacactgacctgtcagccccaaatgacatggcccgtccaagctgtccgctgggagaaaattcagccaagacagattgatctcctcacctactgtaacctggttcatggccggaatttcacctccaagtttccacggcagattgtcagcaactgtagccacggacgttggagtgtcattgtgattccagacgtgacagtgtctgactccgggctgtacagatgctatctgcaagccagcgcaggcgaaaacgaaacctttgtgatgcggctgaccgtggctgaaggcaaaacagataatcagtacacactcttcgttgccggcggaaccgtgctgctcctgctctttgtgattagcatcacaacgattatcgtcatcttcctcaaccgcaggcggagaagagagaggcgcgatctgttcaccgagtcttgggatacacagaaagctccgaacaactatcggagccctatctccaccggacagcccacaaatcagtctatggacgacacacgcgaggacatctatgtcaattaccccactttttctaggcggcctaagaccagagtgcgcgccaagagaagcggatctggcgtgaagcagaccctgaatttcgacctgctgaagctggctggcgacgtggaatccaacccaggcccttctagaggccatatgaccgagtacaagcccacggtgcgcctcgccacccgcgacgacgtccccagggccgtacgcaccctcgccgccgcgttcgccgactaccccgccacgcgccacaccgtcgatccggaccgccacatcgagcgggtcaccgagctgcaagaactcttcctcacgcgcgtcgggctcgacatcggcaaggtgtgggtcgcggacgacggcgccgcggtggcggtctggaccacgccggagagcgtcgaagcgggggcggtgttcgccgagatcggcccgcgcatggccgagttgagcggttcccggctggccgcgcagcaacagatggaaggcctcctggcgccgcaccggcccaaggagcccgcgtggttcctggccaccgtcggcgtctcgcccgaccaccagggcaagggtctgggcagcgccgtcgtgctccccggagtggaggcggccgagcgcgccggggtgcccgccttcctggagacctccgcgccccgcaacctccccttctacgagcggctcggcttcaccgtcaccgccgacgtcgaggtgcccgaaggaccgcgcacctggtgcatgacccgcaagcccggtgcctga

SEQ ID NO: 1907 - DNA, 3699 bp, Artificial Sequence
  Synthetic Polynucleotide
atggccttaccagtgaccgccttgctcctgccgctggccttgctgctccacgccgccaggccggacatccagatgacacagagccctagcagcctgtctgccagcgtgggagacagagtgaccatcacatgcaaggccagcgaccacatcaacaactggctggcctggtatcagcagaagcctggacaggcccctaagctgctgatctacggcgctaccacactggaaacaggcgtgcccagcagattttctggcagcggctctggcaccgactacaccctgacaatatccagcctccagcctgaggacttcgccacctactactgtcagcagagctggaacaccccttggacattcggccagggcaccaagctggaaatcaagagactcgaggacctgaagaacgtgttcccacctgaggtggccgtgttcgagcctagcgaggccgagatcagccacacccagaaagccaccctcgtgtgcctggctaccggcttctaccccgaccatgtggaactgtcttggtgggtcaacggcaaagaggtgcacagcggcgtgtctaccgacccccagccactgaaagaacagcccgccctgaacgacagccggtactgcctgagcagcagactgagagtgtccgccaccttctggcagaacccccggaaccacttcagatgccaggtgcagttctacggcctgagcgagaacgacgagtggacccaggacagagccaagcccgtgacccagatcgtgtctgccgaagcctggggcagagccgattgcggatccatcggctggctgttgctccaggcccctcggtgggtgttcaaggaggaagaccctattcacctgaggtgtcacagctggaagaacactgctctgcataaggtcacatatttacagaatggcaaaggcaggaagtattttcatcataattctgacttctacattccaaaagccacactcaaagacagcggctcctacttctgcagggggcttgttgggagtaaaaatgtgtcttcagagactgtgaacatcaccatcactcaaggtttggcagtgtcaaccatctcatcattctttccacctggctaccaagtgtccttctgcctggtcatggtgctgctgttcgccgtggataccggcctgtacttcagcgtcaagaccaacatccggtccagcaccagagactggaaggaccacaagttcaagtggcggaaggaccctcaggacaagagggccaagcgatctggatctggagcaacaaacttctcactactcaaacaagcaggtgacgtggaggagaatcccgggcctactagtatggactggatttggcgcatccttttccttgtcggcgctgctaccggcgcgcattccttcgaacaagttcagcttcaacagcctggcgctgagctggtcaaacctggcgcttctgtgaagatgagctgcaaagccagcggctacgccttcagcagctactggatcaactggatgaagcagaaacccggccagggactcgaatggatcggccaaatctatcccggcgacggcgacaccaactacaacggcaagttcaagggcagagccacactgaccgccgatacctctagcagcacagcctacatgcagctgagcagcctgaccagcgaagatagcgccgtgtacttctgtgcccggtccatcacaacagtcgtgggctgcgctatggactattggggccagggaacaagcgtgaccgtgtctagtacgcgtatccagaaccctgatcctgccgtgtaccagctgcgggatagcaagagcagcgacaagagcgtgtgtctgttcaccgacttcgacagccagaccaacgtgtcccagagcaaggactccgacgtgtacatcaccgataagaccgtgctggacatgcggagcatggacttcaagagcaactccgccgtggcctggtccaacaagtccgatttcgcctgcgccaacgccttcaacaacagcattatccccgaggacacattcttcccaagccccgagagcagctgcggtaccgaagaagtgctctggcataccagcgtgccatttgccgagaatatgtcccttgagtgtgtgtacccctctatggggattctgacccaagtcgagtggtttaagattgggacgcagcaagacagcattgccatcttctctccaactcacggaatggttattcggaagccctatgccgagagagtctatttcctgaactctacgatggcaagcaacaatatgacgctgttttttcggaacgcctccgaggatgatgtggggtactattcctgtagcctgtacacctatccacaaggcacatggcaaaaagtcattcaagtggtccagtccgactccttcgaggccgcagttccaagcaactcccacatcgttagcgagcctgggaagaatgtcacactgacctgtcagccccaaatgacatggcccgtccaagctgtccgctgggagaaaattcagccaagacagattgatctcctcacctactgtaacctggttcatggccggaatttcacctccaagtttccacggcagattgtcagcaactgtagccacggacgttggagtgtcattgtgattccagacgtgacagtgtctgactccgggctgtacagatgctatctgcaagccagcgcaggcgaaaacgaaacctttgtgatgcggctgaccgtggctgaaggcaaaacagataatcagtacacactcttcgttgccggcggaaccgtgctgctcctgctctttgtgattagcatcacaacgattatcgtcatcttcctcaaccgcaggcggagaagagagaggcgcgatctgttcaccgagtcttgggatacacagaaagctccgaacaactatcggagccctatctccaccggacagcccacaaatcagtctatggacgacacacgcgaggacatctatgtcaattaccccactttttctaggcggcctaagaccagagtgcgcgccaagagaagcggatctggcgtgaagcagaccctgaatttcgacctgctgaagctggctggcgacgtggaatccaacccaggcccttctagaggccatatgaccgagtacaagcccacggtgcgcctcgccacccgcgacgacgtccccagggccgtacgcaccctcgccgccgcgttcgccgactaccccgccacgcgccacaccgtcgatccggaccgccacatcgagcgggtcaccgagctgcaagaactcttcctcacgcgcgtcgggctcgacatcggcaaggtgtgggtcgcggacgacggcgccgcggtggcggtctggaccacgccggagagcgtcgaagcgggggcggtgttcgccgagatcggcccgcgcatggccgagttgagcggttcccggctggccgcgcagcaacagatggaaggcctcctggcgccgcaccggcccaaggagcccgcgtggttcctggccaccgtcggcgtctcgcccgaccaccagggcaagggtctgggcagcgccgtcgtgctccccggagtggaggcggccgagcgcgccggggtgcccgccttcctggagacctccgcgccccgcaacctccccttctacgagcggctcggcttcaccgtcaccgccgacgtcgaggtgcccgaaggaccgcgcacctggtgcatgacccgcaagcccggtgcctga

SEQ ID NO: 1908 - DNA, 4110 bp, Artificial Sequence
  Synthetic Polynucleotide
atggccttaccagtgaccgccttgctcctgccgctggccttgctgctccacgccgccaggccggaagtgcagctggttgaatctggcggaggactggttcaggctggcggatctctgagactgtcttgtgccgccagcggcagaacctttagcatgggctggtttagacaggcccctggcaaagagagagagttcgtcgccgccatcacatactctggcggcagcccttactacgccgactctgtgaagggcagattcaccatcagccgggacaacgccaagaacaccgtgtacctccagatgaacagcctgaagcctgaggacaccgccgtgtactactgcgccgccaatccaacatacggcagcgactggaacgccgagaattggggccagggaacccaagtgacagtgtctagcggtaccggcggaggcggatctggcggcggaggtagcggtggcggaggatctgaattcgacatccagatgacacagagccctagcagcctgtctgccagcgtgggagacagagtgaccatcacatgcaaggccagcgaccacatcaacaactggctggcctggtatcagcagaagcctggacaggcccctaagctgctgatctacggcgctaccacactggaaacaggcgtgcccagcagattttctggcagcggctctggcaccgactacaccctgacaatatccagcctccagcctgaggacttcgccacctactactgtcagcagagctggaacaccccttggacattcggccagggcaccaagctggaaatcaagagactcgaggacctgaagaacgtgttcccacctgaggtggccgtgttcgagcctagcgaggccgagatcagccacacccagaaagccaccctcgtgtgcctggctaccggcttctaccccgaccatgtggaactgtcttggtgggtcaacggcaaagaggtgcacagcggcgtgtctaccgacccccagccactgaaagaacagcccgccctgaacgacagccggtactgcctgagcagcagactgagagtgtccgccaccttctggcagaacccccggaaccacttcagatgccaggtgcagttctacggcctgagcgagaacgacgagtggacccaggacagagccaagcccgtgacccagatcgtgtctgccgaagcctggggcagagccgattgcggatccatcggctggctgttgctccaggcccctcggtgggtgttcaaggaggaagaccctattcacctgaggtgtcacagctggaagaacactgctctgcataaggtcacatatttacagaatggcaaaggcaggaagtattttcatcataattctgacttctacattccaaaagccacactcaaagacagcggctcctacttctgcagggggcttgttgggagtaaaaatgtgtcttcagagactgtgaacatcaccatcactcaaggtttggcagtgtcaaccatctcatcattctttccacctggctaccaagtgtccttctgcctggtcatggtgctgctgttcgccgtggataccggcctgtacttcagcgtcaagaccaacatccggtccagcaccagagactggaaggaccacaagttcaagtggcggaaggaccctcaggacaagagggccaagcgatctggatctggagcaacaaacttctcactactcaaacaagcaggtgacgtggaggagaatcccgggcctactagtatggactggatttggcgcatccttttccttgtcggcgctgctaccggcgcgcattccttcgaacaagttcagcttcaacagcctggcgctgagctggtcaaacctggcgcttctgtgaagatgagctgcaaagccagcggctacgccttcagcagctactggatcaactggatgaagcagaaacccggccagggactcgaatggatcggccaaatctatcccggcgacggcgacaccaactacaacggcaagttcaagggcagagccacactgaccgccgatacctctagcagcacagcctacatgcagctgagcagcctgaccagcgaagatagcgccgtgtacttctgtgcccggtccatcacaacagtcgtgggctgcgctatggactattggggccagggaacaagcgtgaccgtgtctagtacgcgtatccagaaccctgatcctgccgtgtaccagctgcgggatagcaagagcagcgacaagagcgtgtgtctgttcaccgacttcgacagccagaccaacgtgtcccagagcaaggactccgacgtgtacatcaccgataagaccgtgctggacatgcggagcatggacttcaagagcaactccgccgtggcctggtccaacaagtccgatttcgcctgcgccaacgccttcaacaacagcattatccccgaggacacattcttcccaagccccgagagcagctgcggtaccgaagaagtgctctggcataccagcgtgccatttgccgagaatatgtcccttgagtgtgtgtacccctctatggggattctgacccaagtcgagtggtttaagattgggacgcagcaagacagcattgccatcttctctccaactcacggaatggttattcggaagccctatgccgagagagtctatttcctgaactctacgatggcaagcaacaatatgacgctgttttttcggaacgcctccgaggatgatgtggggtactattcctgtagcctgtacacctatccacaaggcacatggcaaaaagtcattcaagtggtccagtccgactccttcgaggccgcagttccaagcaactcccacatcgttagcgagcctgggaagaatgtcacactgacctgtcagccccaaatgacatggcccgtccaagctgtccgctgggagaaaattcagccaagacagattgatctcctcacctactgtaacctggttcatggccggaatttcacctccaagtttccacggcagattgtcagcaactgtagccacggacgttggagtgtcattgtgattccagacgtgacagtgtctgactccgggctgtacagatgctatctgcaagccagcgcaggcgaaaacgaaacctttgtgatgcggctgaccgtggctgaaggcaaaacagataatcagtacacactcttcgttgccggcggaaccgtgctgctcctgctctttgtgattagcatcacaacgattatcgtcatcttcctcaaccgcaggcggagaagagagaggcgcgatctgttcaccgagtcttgggatacacagaaagctccgaacaactatcggagccctatctccaccggacagcccacaaatcagtctatggacgacacacgcgaggacatctatgtcaattaccccactttttctaggcggcctaagaccagagtgcgcgccaagagaagcggatctggcgtgaagcagaccctgaatttcgacctgctgaagctggctggcgacgtggaatccaacccaggcccttctagaggccatatgaccgagtacaagcccacggtgcgcctcgccacccgcgacgacgtccccagggccgtacgcaccctcgccgccgcgttcgccgactaccccgccacgcgccacaccgtcgatccggaccgccacatcgagcgggtcaccgagctgcaagaactcttcctcacgcgcgtcgggctcgacatcggcaaggtgtgggtcgcggacgacggcgccgcggtggcggtctggaccacgccggagagcgtcgaagcgggggcggtgttcgccgagatcggcccgcgcatggccgagttgagcggttcccggctggccgcgcagcaacagatggaaggcctcctggcgccgcaccggcccaaggagcccgcgtggttcctggccaccgtcggcgtctcgcccgaccaccagggcaagggtctgggcagcgccgtcgtgctccccggagtggaggcggccgagcgcgccggggtgcccgccttcctggagacctccgcgccccgcaacctccccttctacgagcggctcggcttcaccgtcaccgccgacgtcgaggtgcccgaaggaccgcgcacctggtgcatgacccgcaagcccggtgcctga

SEQ ID NO: 1909 - DNA, 4521 bp, Artificial Sequence
  Synthetic Polynucleotide
atggccttaccagtgaccgccttgctcctgccgctggccttgctgctccacgccgccaggccggaagtgcagctggttgaatctggcggaggactggttcaggctggcggatctctgagactgtcttgtgccgccagcggcagaacctttagcatgggctggtttagacaggcccctggcaaagagagagagttcgtcgccgccatcacatactctggcggcagcccttactacgccgactctgtgaagggcagattcaccatcagccgggacaacgccaagaacaccgtgtacctccagatgaacagcctgaagcctgaggacaccgccgtgtactactgcgccgccaatccaacatacggcagcgactggaacgccgagaattggggccagggaacccaagtgacagtgtctagcggtaccggcggaggcggatctggcggcggaggtagcggtggcggaggatctgaattcgacatccagatgacacagagccctagcagcctgtctgccagcgtgggagacagagtgaccatcacatgcaaggccagcgaccacatcaacaactggctggcctggtatcagcagaagcctggacaggcccctaagctgctgatctacggcgctaccacactggaaacaggcgtgcccagcagattttctggcagcggctctggcaccgactacaccctgacaatatccagcctccagcctgaggacttcgccacctactactgtcagcagagctggaacaccccttggacattcggccagggcaccaagctggaaatcaagagactcgaggacctgaagaacgtgttcccacctgaggtggccgtgttcgagcctagcgaggccgagatcagccacacccagaaagccaccctcgtgtgcctggctaccggcttctaccccgaccatgtggaactgtcttggtgggtcaacggcaaagaggtgcacagcggcgtgtctaccgacccccagccactgaaagaacagcccgccctgaacgacagccggtactgcctgagcagcagactgagagtgtccgccaccttctggcagaacccccggaaccacttcagatgccaggtgcagttctacggcctgagcgagaacgacgagtggacccaggacagagccaagcccgtgacccagatcgtgtctgccgaagcctggggcagagccgattgcggatccatcggctggctgttgctccaggcccctcggtgggtgttcaaggaggaagaccctattcacctgaggtgtcacagctggaagaacactgctctgcataaggtcacatatttacagaatggcaaaggcaggaagtattttcatcataattctgacttctacattccaaaagccacactcaaagacagcggctcctacttctgcagggggcttgttgggagtaaaaatgtgtcttcagagactgtgaacatcaccatcactcaaggtttggcagtgtcaaccatctcatcattctttccacctggctaccaagtgtccttctgcctggtcatggtgctgctgttcgccgtggataccggcctgtacttcagcgtcaagaccaacatccggtccagcaccagagactggaaggaccacaagttcaagtggcggaaggaccctcaggacaagagggccaagcgatctggatctggagcaacaaacttctcactactcaaacaagcaggtgacgtggaggagaatcccgggcctactagtatggactggatttggcgcatccttttccttgtcggcgctgctaccggcgcgcattccgggcccgaagtgcaactggttgaatccggtggcggcctggtgcaagcaggcggatctctcagacttagctgtgccgcctccggcagaaccttcacaatgggatggtttaggcaggctccagggaaagagagagagttcgtcgccgccatctctctgtctcccacactggcctactacgccgactctgtgaaaggccggttcaccatctccagagataatgccaagaacaccgtggtgctgcaaatgaactctctgaaacccgaggatacagccctgtactattgtgccgctgaccggaagtccgtgatgagcatcagacccgattactggggacagggcacacaagtcacagtgtcctctggatccggcggcggaggatctggcggaggcggatctgggggcggaggctctttcgaacaagttcagcttcaacagcctggcgctgagctggtcaaacctggcgcttctgtgaagatgagctgcaaagccagcggctacgccttcagcagctactggatcaactggatgaagcagaaacccggccagggactcgaatggatcggccaaatctatcccggcgacggcgacaccaactacaacggcaagttcaagggcagagccacactgaccgccgatacctctagcagcacagcctacatgcagctgagcagcctgaccagcgaagatagcgccgtgtacttctgtgcccggtccatcacaacagtcgtgggctgcgctatggactattggggccagggaacaagcgtgaccgtgtctagtacgcgtatccagaaccctgatcctgccgtgtaccagctgcgggatagcaagagcagcgacaagagcgtgtgtctgttcaccgacttcgacagccagaccaacgtgtcccagagcaaggactccgacgtgtacatcaccgataagaccgtgctggacatgcggagcatggacttcaagagcaactccgccgtggcctggtccaacaagtccgatttcgcctgcgccaacgccttcaacaacagcattatccccgaggacacattcttcccaagccccgagagcagctgcggtaccgaagaagtgctctggcataccagcgtgccatttgccgagaatatgtcccttgagtgtgtgtacccctctatggggattctgacccaagtcgagtggtttaagattgggacgcagcaagacagcattgccatcttctctccaactcacggaatggttattcggaagccctatgccgagagagtctatttcctgaactctacgatggcaagcaacaatatgacgctgttttttcggaacgcctccgaggatgatgtggggtactattcctgtagcctgtacacctatccacaaggcacatggcaaaaagtcattcaagtggtccagtccgactccttcgaggccgcagttccaagcaactcccacatcgttagcgagcctgggaagaatgtcacactgacctgtcagccccaaatgacatggcccgtccaagctgtccgctgggagaaaattcagccaagacagattgatctcctcacctactgtaacctggttcatggccggaatttcacctccaagtttccacggcagattgtcagcaactgtagccacggacgttggagtgtcattgtgattccagacgtgacagtgtctgactccgggctgtacagatgctatctgcaagccagcgcaggcgaaaacgaaacctttgtgatgcggctgaccgtggctgaaggcaaaacagataatcagtacacactcttcgttgccggcggaaccgtgctgctcctgctctttgtgattagcatcacaacgattatcgtcatcttcctcaaccgcaggcggagaagagagaggcgcgatctgttcaccgagtcttgggatacacagaaagctccgaacaactatcggagccctatctccaccggacagcccacaaatcagtctatggacgacacacgcgaggacatctatgtcaattaccccactttttctaggcggcctaagaccagagtgcgcgccaagagaagcggatctggcgtgaagcagaccctgaatttcgacctgctgaagctggctggcgacgtggaatccaacccaggcccttctagaggccatatgaccgagtacaagcccacggtgcgcctcgccacccgcgacgacgtccccagggccgtacgcaccctcgccgccgcgttcgccgactaccccgccacgcgccacaccgtcgatccggaccgccacatcgagcgggtcaccgagctgcaagaactcttcctcacgcgcgtcgggctcgacatcggcaaggtgtgggtcgcggacgacggcgccgcggtggcggtctggaccacgccggagagcgtcgaagcgggggcggtgttcgccgagatcggcccgcgcatggccgagttgagcggttcccggctggccgcgcagcaacagatggaaggcctcctggcgccgcaccggcccaaggagcccgcgtggttcctggccaccgtcggcgtctcgcccgaccaccagggcaagggtctgggcagcgccgtcgtgctccccggagtggaggcggccgagcgcgccggggtgcccgccttcctggagacctccgcgccccgcaacctccccttctacgagcggctcggcttcaccgtcaccgccgacgtcgaggtgcccgaaggaccgcgcacctggtgcatgacccgcaagcccggtgcctga

SEQ ID NO: 1910 - DNA, 3720 bp, Artificial Sequence
  Synthetic Polynucleotide
atggccttaccagtgaccgccttgctcctgccgctggccttgctgctccacgccgccaggccggaagtgcagctggttgaatctggcggaggactggttcaggctggcggatctctgagactgtcttgtgccgccagcggcagaacctttagcatgggctggtttagacaggcccctggcaaagagagagagttcgtcgccgccatcacatactctggcggcagcccttactacgccgactctgtgaagggcagattcaccatcagccgggacaacgccaagaacaccgtgtacctccagatgaacagcctgaagcctgaggacaccgccgtgtactactgcgccgccaatccaacatacggcagcgactggaacgccgagaattggggccagggaacccaagtgacagtgtctagcctcgaggacctgaagaacgtgttcccacctgaggtggccgtgttcgagcctagcgaggccgagatcagccacacccagaaagccaccctcgtgtgcctggctaccggcttctaccccgaccatgtggaactgtcttggtgggtcaacggcaaagaggtgcacagcggcgtgtctaccgacccccagccactgaaagaacagcccgccctgaacgacagccggtactgcctgagcagcagactgagagtgtccgccaccttctggcagaacccccggaaccacttcagatgccaggtgcagttctacggcctgagcgagaacgacgagtggacccaggacagagccaagcccgtgacccagatcgtgtctgccgaagcctggggcagagccgattgcggatccatcggctggctgttgctccaggcccctcggtgggtgttcaaggaggaagaccctattcacctgaggtgtcacagctggaagaacactgctctgcataaggtcacatatttacagaatggcaaaggcaggaagtattttcatcataattctgacttctacattccaaaagccacactcaaagacagcggctcctacttctgcagggggcttgttgggagtaaaaatgtgtcttcagagactgtgaacatcaccatcactcaaggtttggcagtgtcaaccatctcatcattctttccacctggctaccaagtgtccttctgcctggtcatggtgctgctgttcgccgtggataccggcctgtacttcagcgtcaagaccaacatccggtccagcaccagagactggaaggaccacaagttcaagtggcggaaggaccctcaggacaagagggccaagcgatctggatctggagcaacaaacttctcactactcaaacaagcaggtgacgtggaggagaatcccgggcctactagtatggactggatttggcgcatccttttccttgtcggcgctgctaccggcgcgcattccgggcccgaagtgcaactggttgaatccggtggcggcctggtgcaagcaggcggatctctcagacttagctgtgccgcctccggcagaaccttcacaatgggatggtttaggcaggctccagggaaagagagagagttcgtcgccgccatctctctgtctcccacactggcctactacgccgactctgtgaaaggccggttcaccatctccagagataatgccaagaacaccgtggtgctgcaaatgaactctctgaaacccgaggatacagccctgtactattgtgccgctgaccggaagtccgtgatgagcatcagacccgattactggggacagggcacacaagtcacagtgtcctctacgcgtatccagaaccctgatcctgccgtgtaccagctgcgggatagcaagagcagcgacaagagcgtgtgtctgttcaccgacttcgacagccagaccaacgtgtcccagagcaaggactccgacgtgtacatcaccgataagaccgtgctggacatgcggagcatggacttcaagagcaactccgccgtggcctggtccaacaagtccgatttcgcctgcgccaacgccttcaacaacagcattatccccgaggacacattcttcccaagccccgagagcagctgcggtaccgaagaagtgctctggcataccagcgtgccatttgccgagaatatgtcccttgagtgtgtgtacccctctatggggattctgacccaagtcgagtggtttaagattgggacgcagcaagacagcattgccatcttctctccaactcacggaatggttattcggaagccctatgccgagagagtctatttcctgaactctacgatggcaagcaacaatatgacgctgttttttcggaacgcctccgaggatgatgtggggtactattcctgtagcctgtacacctatccacaaggcacatggcaaaaagtcattcaagtggtccagtccgactccttcgaggccgcagttccaagcaactcccacatcgttagcgagcctgggaagaatgtcacactgacctgtcagccccaaatgacatggcccgtccaagctgtccgctgggagaaaattcagccaagacagattgatctcctcacctactgtaacctggttcatggccggaatttcacctccaagtttccacggcagattgtcagcaactgtagccacggacgttggagtgtcattgtgattccagacgtgacagtgtctgactccgggctgtacagatgctatctgcaagccagcgcaggcgaaaacgaaacctttgtgatgcggctgaccgtggctgaaggcaaaacagataatcagtacacactcttcgttgccggcggaaccgtgctgctcctgctctttgtgattagcatcacaacgattatcgtcatcttcctcaaccgcaggcggagaagagagaggcgcgatctgttcaccgagtcttgggatacacagaaagctccgaacaactatcggagccctatctccaccggacagcccacaaatcagtctatggacgacacacgcgaggacatctatgtcaattaccccactttttctaggcggcctaagaccagagtgcgcgccaagagaagcggatctggcgtgaagcagaccctgaatttcgacctgctgaagctggctggcgacgtggaatccaacccaggcccttctagaggccatatgaccgagtacaagcccacggtgcgcctcgccacccgcgacgacgtccccagggccgtacgcaccctcgccgccgcgttcgccgactaccccgccacgcgccacaccgtcgatccggaccgccacatcgagcgggtcaccgagctgcaagaactcttcctcacgcgcgtcgggctcgacatcggcaaggtgtgggtcgcggacgacggcgccgcggtggcggtctggaccacgccggagagcgtcgaagcgggggcggtgttcgccgagatcggcccgcgcatggccgagttgagcggttcccggctggccgcgcagcaacagatggaaggcctcctggcgccgcaccggcccaaggagcccgcgtggttcctggccaccgtcggcgtctcgcccgaccaccagggcaagggtctgggcagcgccgtcgtgctccccggagtggaggcggccgagcgcgccggggtgcccgccttcctggagacctccgcgccccgcaacctccccttctacgagcggctcggcttcaccgtcaccgccgacgtcgaggtgcccgaaggaccgcgcacctggtgcatgacccgcaagcccggtgcctga

SEQ ID NO: 1911 - DNA, 1635 bp, Artificial Sequence; identical to SEQ ID NO: 1664
  Synthetic Polynucleotide

SEQ ID NO: 1912 - DNA, 3528 bp, Artificial Sequence
  Synthetic Polynucleotide
atggccttaccagtgaccgccttgctcctgccgctggccttgctgctccacgccgccaggccggacatccagatgacacagagccctagcagcctgtctgccagcgtgggagacagagtgaccatcacatgcaaggccagcgaccacatcaacaactggctggcctggtatcagcagaagcctggacaggcccctaagctgctgatctacggcgctaccacactggaaacaggcgtgcccagcagattttctggcagcggctctggcaccgactacaccctgacaatatccagcctccagcctgaggacttcgccacctactactgtcagcagagctggaacaccccttggacattcggccagggcaccaagctggaaatcaagagactcgaggaagaggtgctgtggcacacctctgtgcccttcgccgagaacatgagcctggaatgcgtgtaccccagcatgggcatcctgacacaggtggaatggttcaagatcggcacccagcaggactctatcgccatcttcagccccacacacggcatggtcatcagaaagccttacgccgagcgggtgtacttcctgaacagcacaatggcctccaacaacatgaccctgttcttcagaaacgccagcgaggacgacgtgggctactacagctgttccctgtacacataccctcaaggcacctggcagaaagtgatccaggtggtgcagagcgacagcttcgaggctgccgtgcctagcaatagccacatcgtgtctgagcccggcaagaacgtgaccctgacttgccagcctcagatgacctggcctgtgcaggccgttagatgggagaagatccagcctcggcagatcgacctgctgacctactgcaatctggtgcacggcagaaacttcaccagcaagttccccagacagatcgtgtccaactgctcccacggacgttggagcgtgatcgtgatccctgatgtgaccgtgtccgacagcggcctgtatcggtgttacctgcaagcctctgccggcgagaacgagacattcgtgatgagactgacagtggccgagggcaagaccgacaaccagtacaccctgtttgtggctggcggcacagttctgctgctgctgttcgtgatctccatcacgactatcatcgtgatctttctgaaccggcggaggcggagagagcggagggatctgtttacagagagctgggacacccagttcaagaaggcccctaacaactacagaagccccatcagcaccggccagcctaccaaccagagcatggacgatacccgcgaggacatctacgtgaactaccctaccttcagcagacggcccaagacaagagttagggccaagcgatctggatctggagcaacaaacttctcactactcaaacaagcaggtgacgtggaggagaatcccgggcctactagtatggactggatttggcgcatccttttccttgtcggcgctgctaccggcgcgcattccttcgaacaagttcagcttcaacagcctggcgctgagctggtcaaacctggcgcttctgtgaagatgagctgcaaagccagcggctacgccttcagcagctactggatcaactggatgaagcagaaacccggccagggactcgaatggatcggccaaatctatcccggcgacggcgacaccaactacaacggcaagttcaagggcagagccacactgaccgccgatacctctagcagcacagcctacatgcagctgagcagcctgaccagcgaagatagcgccgtgtacttctgtgcccggtccatcacaacagtcgtgggctgcgctatggactattggggccagggaacaagcgtgaccgtgtctagtacgcgtgaagaagtgctctggcataccagcgtgccatttgccgagaatatgtcccttgagtgtgtgtacccctctatggggattctgacccaagtcgagtggtttaagattgggacgcagcaagacagcattgccatcttctctccaactcacggaatggttattcggaagccctatgccgagagagtctatttcctgaactctacgatggcaagcaacaatatgacgctgttttttcggaacgcctccgaggatgatgtggggtactattcctgtagcctgtacacctatccacaaggcacatggcaaaaagtcattcaagtggtccagtccgactccttcgaggccgcagttccaagcaactcccacatcgttagcgagcctgggaagaatgtcacactgacctgtcagccccaaatgacatggcccgtccaagctgtccgctgggagaaaattcagccaagacagattgatctcctcacctactgtaacctggttcatggccggaatttcacctccaagtttccacggcagattgtcagcaactgtagccacggacgttggagtgtcattgtgattccagacgtgacagtgtctgactccgggctgtacagatgctatctgcaagccagcgcaggcgaaaacgaaacctttgtgatgcggctgaccgtggctgaaggcaaaacagataatcagtacacactcttcgttgccggcggaaccgtgctgctcctgctctttgtgattagcatcacaacgattatcgtcatcttcctcaaccgcaggcggagaagagagaggcgcgatctgttcaccgagtcttgggatacacagaaagctccgaacaactatcggagccctatctccaccggacagcccacaaatcagtctatggacgacacacgcgaggacatctatgtcaattaccccactttttctaggcggcctaagaccagagtgcgcgccaagagaagcggatctggcgtgaagcagaccctgaatttcgacctgctgaagctggctggcgacgtggaatccaacccaggcccttctagaggccatatgaccgagtacaagcccacggtgcgcctcgccacccgcgacgacgtccccagggccgtacgcaccctcgccgccgcgttcgccgactaccccgccacgcgccacaccgtcgatccggaccgccacatcgagcgggtcaccgagctgcaagaactcttcctcacgcgcgtcgggctcgacatcggcaaggtgtgggtcgcggacgacggcgccgcggtggcggtctggaccacgccggagagcgtcgaagcgggggcggtgttcgccgagatcggcccgcgcatggccgagttgagcggttcccggctggccgcgcagcaacagatggaaggcctcctggcgccgcaccggcccaaggagcccgcgtggttcctggccaccgtcggcgtctcgcccgaccaccagggcaagggtctgggcagcgccgtcgtgctccccggagtggaggcggccgagcgcgccggggtgcccgccttcctggagacctccgcgccccgcaacctccccttctacgagcggctcggcttcaccgtcaccgccgacgtcgaggtgcccgaaggaccgcgcacctggtgcatgacccgcaagcccggtgcctga

SEQ ID NO: 1913 - DNA, 3690 bp, Artificial Sequence
  Synthetic Polynucleotide
atggccttaccagtgaccgccttgctcctgccgctggccttgctgctccacgccgccaggccggcatgcgaagtgcagctgcttgaaagtggcggcggactgattcagcctggcggatctctgagactgagctgtgccgccagcggcttcaccttttctagccacgccatgacctgggtccgacaggcacctggaaaagggcttgaatgggtgtccgccatcagcggctctggcgattacacacactacgccgacagcgtgaagggcagattcaccatcagcagagacaacagcaagaacaccgtgtacctccagatgaacagcctgagagccgaggacagcgccgtgtattattgcgccaaggatgaggatggcggcagcctgcttggacacagaggacaaggcaccctggtcaccgtttcttccggtaccggcggaggcggatctggcggcggaggtagcggtggcggaggatctgaattcggatctctcgaggaagaggtgctgtggcacacctctgtgcccttcgccgagaacatgagcctggaatgcgtgtaccccagcatgggcatcctgacacaggtggaatggttcaagatcggcacccagcaggactctatcgccatcttcagccccacacacggcatggtcatcagaaagccttacgccgagcgggtgtacttcctgaacagcacaatggcctccaacaacatgaccctgttcttcagaaacgccagcgaggacgacgtgggctactacagctgttccctgtacacataccctcaaggcacctggcagaaagtgatccaggtggtgcagagcgacagcttcgaggctgccgtgcctagcaatagccacatcgtgtctgagcccggcaagaacgtgaccctgacttgccagcctcagatgacctggcctgtgcaggccgttagatgggagaagatccagcctcggcagatcgacctgctgacctactgcaatctggtgcacggcagaaacttcaccagcaagttccccagacagatcgtgtccaactgctcccacggacgttggagcgtgatcgtgatccctgatgtgaccgtgtccgacagcggcctgtatcggtgttacctgcaagcctctgccggcgagaacgagacattcgtgatgagactgacagtggccgagggcaagaccgacaaccagtacaccctgtttgtggctggcggcacagttctgctgctgctgttcgtgatctccatcacgactatcatcgtgatctttctgaaccggcggaggcggagagagcggagggatctgtttacagagagctgggacacccagttcaagaaggcccctaacaactacagaagccccatcagcaccggccagcctaccaaccagagcatggacgatacccgcgaggacatctacgtgaactaccctaccttcagcagacggcccaagacaagagttagggccaagcgatctggatctggagcaacaaacttctcactactcaaacaagcaggtgacgtggaggagaatcccgggcctactagtgccaccatggactggatttggcgcatccttttccttgtcggcgctgctaccggcgcccattccgggcccgaagtgcagctggttgaatctggcggaggactggttcaggctggcggatctctgagactgtcttgtgccgccagcggcagaacctttagcatgggctggtttagacaggcccctggcaaagagagagagttcgtcgccgccatcacatactctggcggcagcccttactacgccgactctgtgaagggcagattcaccatcagccgggacaacgccaagaacaccgtgtacctccagatgaacagcctgaagcctgaggacaccgccgtgtactactgcgccgccaatccaacatacggcagcgactggaacgccgagaattggggccagggaacccaagtgacagtgtctagcggatccggcggcggaggatctggcggaggcggatctgggggcggaggctctttcgaaggcagcacgcgtgaagaagtgctctggcataccagcgtgccatttgccgagaatatgtcccttgagtgtgtgtacccctctatggggattctgacccaagtcgagtggtttaagattgggacgcagcaagacagcattgccatcttctctccaactcacggaatggttattcggaagccctatgccgagagagtctatttcctgaactctacgatggcaagcaacaatatgacgctgttttttcggaacgcctccgaggatgatgtggggtactattcctgtagcctgtacacctatccacaaggcacatggcaaaaagtcattcaagtggtccagtccgactccttcgaggccgcagttccaagcaactcccacatcgttagcgagcctgggaagaatgtcacactgacctgtcagccccaaatgacatggcccgtccaagctgtccgctgggagaaaattcagccaagacagattgatctcctcacctactgtaacctggttcatggccggaatttcacctccaagtttccacggcagattgtcagcaactgtagccacggacgttggagtgtcattgtgattccagacgtgacagtgtctgactccgggctgtacagatgctatctgcaagccagcgcaggcgaaaacgaaacctttgtgatgcggctgaccgtggctgaaggcaaaacagataatcagtacacactcttcgttgccggcggaaccgtgctgctcctgctctttgtgattagcatcacaacgattatcgtcatcttcctcaaccgcaggcggagaagagagaggcgcgatctgttcaccgagtcttgggatacacagaaagctccgaacaactatcggagccctatctccaccggacagcccacaaatcagtctatggacgacacacgcgaggacatctatgtcaattaccccactttttctaggcggcctaagaccagagtgcgcgccaagagaagcggatctggcgtgaagcagaccctgaatttcgacctgctgaagctggctggcgacgtggaatccaacccaggcccttctagaggccatatgaccgagtacaagcccacggtgcgcctcgccacccgcgacgacgtccccagggccgtacgcaccctcgccgccgcgttcgccgactaccccgccacgcgccacaccgtcgatccggaccgccacatcgagcgggtcaccgagctgcaagaactcttcctcacgcgcgtcgggctcgacatcggcaaggtgtgggtcgcggacgacggcgccgcggtggcggtctggaccacgccggagagcgtcgaagcgggggcggtgttcgccgagatcggcccgcgcatggccgagttgagcggttcccggctggccgcgcagcaacagatggaaggcctcctggcgccgcaccggcccaaggagcccgcgtggttcctggccaccgtcggcgtctcgcccgaccaccagggcaagggtctgggcagcgccgtcgtgctccccggagtggaggcggccgagcgcgccggggtgcccgccttcctggagacctccgcgccccgcaacctccccttctacgagcggctcggcttcaccgtcaccgccgacgtcgaggtgcccgaaggaccgcgcacctggtgcatgacccgcaagcccggtgcctga

SEQ ID NO: 1914 - DNA, 4140 bp, Artificial Sequence
  Synthetic Polynucleotide
atggccttaccagtgaccgccttgctcctgccgctggccttgctgctccacgccgccaggccggacatccagatgacacagagccctagcagcctgtctgccagcgtgggagacagagtgaccatcacatgcaaggccagcgaccacatcaacaactggctggcctggtatcagcagaagcctggacaggcccctaagctgctgatctacggcgctaccacactggaaacaggcgtgcccagcagattttctggcagcggctctggcaccgactacaccctgacaatatccagcctccagcctgaggacttcgccacctactactgtcagcagagctggaacaccccttggacattcggccagggcaccaagctggaaatcaagagactcgagggacagcctaaggccaatcctaccgtgacactgttccctccaagcagcgaagaactccaggccaacaaggccacacttgtgtgcctgatctccgacttctaccctggggctgtgacagtggcttggaaggccgatggatctcctgtgaaagccggcgtggaaaccaccaagccatccaagcagagcaacaacaaatacgccgccagctcctacctgagcctgacacctgagcagtggaagtcccacagatcctacagctgccaagtgacccacgaaggcagcaccgtggaaaagacagtggcccctacagagtgcagcggatccgaagaggtgctgtggcacacctctgtgcccttcgccgagaacatgagcctggaatgcgtgtaccccagcatgggcatcctgacacaggtggaatggttcaagatcggcacccagcaggactctatcgccatcttcagccccacacacggcatggtcatcagaaagccttacgccgagcgggtgtacttcctgaacagcacaatggcctccaacaacatgaccctgttcttcagaaacgccagcgaggacgacgtgggctactacagctgttccctgtacacataccctcaaggcacctggcagaaagtgatccaggtggtgcagagcgacagcttcgaggctgccgtgcctagcaatagccacatcgtgtctgagcccggcaagaacgtgaccctgacttgccagcctcagatgacctggcctgtgcaggccgttagatgggagaagatccagcctcggcagatcgacctgctgacctactgcaatctggtgcacggcagaaacttcaccagcaagttccccagacagatcgtgtccaactgctcccacggacgttggagcgtgatcgtgatccctgatgtgaccgtgtccgacagcggcctgtatcggtgttacctgcaagcctctgccggcgagaacgagacattcgtgatgagactgacagtggccgagggcaagaccgacaaccagtacaccctgtttgtggctggcggcacagttctgctgctgctgttcgtgatctccatcacgactatcatcgtgatctttctgaaccggcggaggcggagagagcggagggatctgtttacagagagctgggacacccagttcaagaaggcccctaacaactacagaagccccatcagcaccggccagcctaccaaccagagcatggacgatacccgcgaggacatctacgtgaactaccctaccttcagcagacggcccaagacaagagttagggccaagcgatctggatctggagcaacaaacttctcactactcaaacaagcaggtgacgtggaggagaatcccgggcctactagtatggactggatttggcgcatccttttccttgtcggcgctgctaccggcgcgcattccttcgaacaagttcagcttcaacagcctggcgctgagctggtcaaacctggcgcttctgtgaagatgagctgcaaagccagcggctacgccttcagcagctactggatcaactggatgaagcagaaacccggccagggactcgaatggatcggccaaatctatcccggcgacggcgacaccaactacaacggcaagttcaagggcagagccacactgaccgccgatacctctagcagcacagcctacatgcagctgagcagcctgaccagcgaagatagcgccgtgtacttctgtgcccggtccatcacaacagtcgtgggctgcgctatggactattggggccagggaacaagcgtgaccgtgtctagtacgcgtgcctctacaaagggaccctccgtgtttcctctggctcccagcagcaagtctacaagcggaggaacagccgctctgggctgcctggtcaaggattactttcccgagcctgtgaccgtgtcctggaatagcggagcactgacaagcggcgtgcacacctttccagccgtgctgcaaagcagcggcctgtactctctgagcagcgtggtcacagtgcctagctctagcctgggcacccagacctacatctgcaatgtgaaccacaagcctagcaacaccaaggtggacaagagagtggaacccaagagctgtggtaccgaagaagtgctctggcataccagcgtgccatttgccgagaatatgtcccttgagtgtgtgtacccctctatggggattctgacccaagtcgagtggtttaagattgggacgcagcaagacagcattgccatcttctctccaactcacggaatggttattcggaagccctatgccgagagagtctatttcctgaactctacgatggcaagcaacaatatgacgctgttttttcggaacgcctccgaggatgatgtggggtactattcctgtagcctgtacacctatccacaaggcacatggcaaaaagtcattcaagtggtccagtccgactccttcgaggccgcagttccaagcaactcccacatcgttagcgagcctgggaagaatgtcacactgacctgtcagccccaaatgacatggcccgtccaagctgtccgctgggagaaaattcagccaagacagattgatctcctcacctactgtaacctggttcatggccggaatttcacctccaagtttccacggcagattgtcagcaactgtagccacggacgttggagtgtcattgtgattccagacgtgacagtgtctgactccgggctgtacagatgctatctgcaagccagcgcaggcgaaaacgaaacctttgtgatgcggctgaccgtggctgaaggcaaaacagataatcagtacacactcttcgttgccggcggaaccgtgctgctcctgctctttgtgattagcatcacaacgattatcgtcatcttcctcaaccgcaggcggagaagagagaggcgcgatctgttcaccgagtcttgggatacacagaaagctccgaacaactatcggagccctatctccaccggacagcccacaaatcagtctatggacgacacacgcgaggacatctatgtcaattaccccactttttctaggcggcctaagaccagagtgcgcgccaagagaagcggatctggcgtgaagcagaccctgaatttcgacctgctgaagctggctggcgacgtggaatccaacccaggcccttctagaggcgggatccacaccatggctacctacgaggtgctgtgcgaggtggcaagaaagctgggcaccgacgacagagaagtggtgctgttcctgctgaacgtgttcatccctcagcctacactggcccagctgatcggtgcactgagagccctgaaagaggaaggccggctgacctttcctctgctggccgaatgcctgttcagagccggaagaagggatctgctgcgggacctgctgcatctggaccccagatttctggaaagacacctggccggcaccatgagctacttcagcccttaccagctgaccgtgctgcacgttgacggcgaactgtgcgccagagatattcggagcctgatcttcctgagcaaggacaccatcggcagccggtctacccctcagacatttctgcactgggtgtactgcatggaaaacctggacctgctcggccccacagatgtggatgccctgatgtccatgctgagaagcctgagcagagtggacctccagagacaggtgcagacactgatgggactgcacctgagcggacctagccacagccagcactacagacacacccct

SEQ ID NO: 1915 - DNA, 4299 bp, Artificial Sequence
  Synthetic Polynucleotide
atggccttaccagtgaccgccttgctcctgccgctggccttgctgctccacgccgccaggccggacatccagatgacacagagccctagcagcctgtctgccagcgtgggagacagagtgaccatcacatgcaaggccagcgaccacatcaacaactggctggcctggtatcagcagaagcctggacaggcccctaagctgctgatctacggcgctaccacactggaaacaggcgtgcccagcagattttctggcagcggctctggcaccgactacaccctgacaatatccagcctccagcctgaggacttcgccacctactactgtcagcagagctggaacaccccttggacattcggccagggcaccaagctggaaatcaagagactcgagggacagcctaaggccaatcctaccgtgacactgttccctccaagcagcgaagaactccaggccaacaaggccacacttgtgtgcctgatctccgacttctaccctggggctgtgacagtggcttggaaggccgatggatctcctgtgaaagccggcgtggaaaccaccaagccatccaagcagagcaacaacaaatacgccgccagctcctacctgagcctgacacctgagcagtggaagtcccacagatcctacagctgccaagtgacccacgaaggcagcaccgtggaaaagacagtggcccctacagagtgcagcggatccgaagaggtgctgtggcacacctctgtgcccttcgccgagaacatgagcctggaatgcgtgtaccccagcatgggcatcctgacacaggtggaatggttcaagatcggcacccagcaggactctatcgccatcttcagccccacacacggcatggtcatcagaaagccttacgccgagcgggtgtacttcctgaacagcacaatggcctccaacaacatgaccctgttcttcagaaacgccagcgaggacgacgtgggctactacagctgttccctgtacacataccctcaaggcacctggcagaaagtgatccaggtggtgcagagcgacagcttcgaggctgccgtgcctagcaatagccacatcgtgtctgagcccggcaagaacgtgaccctgacttgccagcctcagatgacctggcctgtgcaggccgttagatgggagaagatccagcctcggcagatcgacctgctgacctactgcaatctggtgcacggcagaaacttcaccagcaagttccccagacagatcgtgtccaactgctcccacggacgttggagcgtgatcgtgatccctgatgtgaccgtgtccgacagcggcctgtatcggtgttacctgcaagcctctgccggcgagaacgagacattcgtgatgagactgacagtggccgagggcaagaccgacaaccagtacaccctgtttgtggctggcggcacagttctgctgctgctgttcgtgatctccatcacgactatcatcgtgatctttctgaaccggcggaggcggagagagcggagggatctgtttacagagagctgggacacccagttcaagaaggcccctaacaactacagaagccccatcagcaccggccagcctaccaaccagagcatggacgatacccgcgaggacatctacgtgaactaccctaccttcagcagacggcccaagacaagagttagggccaagcgatctggatctggagcaacaaacttctcactactcaaacaagcaggtgacgtggaggagaatcccgggcctactagtatggactggatttggcgcatccttttccttgtcggcgctgctaccggcgcgcattccttcgaacaagttcagcttcaacagcctggcgctgagctggtcaaacctggcgcttctgtgaagatgagctgcaaagccagcggctacgccttcagcagctactggatcaactggatgaagcagaaacccggccagggactcgaatggatcggccaaatctatcccggcgacggcgacaccaactacaacggcaagttcaagggcagagccacactgaccgccgatacctctagcagcacagcctacatgcagctgagcagcctgaccagcgaagatagcgccgtgtacttctgtgcccggtccatcacaacagtcgtgggctgcgctatggactattggggccagggaacaagcgtgaccgtgtctagtacgcgtgcctctacaaagggaccctccgtgtttcctctggctcccagcagcaagtctacaagcggaggaacagccgctctgggctgcctggtcaaggattactttcccgagcctgtgaccgtgtcctggaatagcggagcactgacaagcggcgtgcacacctttccagccgtgctgcaaagcagcggcctgtactctctgagcagcgtggtcacagtgcctagctctagcctgggcacccagacctacatctgcaatgtgaaccacaagcctagcaacaccaaggtggacaagagagtggaacccaagagctgtggtaccgaagaagtgctctggcataccagcgtgccatttgccgagaatatgtcccttgagtgtgtgtacccctctatggggattctgacccaagtcgagtggtttaagattgggacgcagcaagacagcattgccatcttctctccaactcacggaatggttattcggaagccctatgccgagagagtctatttcctgaactctacgatggcaagcaacaatatgacgctgttttttcggaacgcctccgaggatgatgtggggtactattcctgtagcctgtacacctatccacaaggcacatggcaaaaagtcattcaagtggtccagtccgactccttcgaggccgcagttccaagcaactcccacatcgttagcgagcctgggaagaatgtcacactgacctgtcagccccaaatgacatggcccgtccaagctgtccgctgggagaaaattcagccaagacagattgatctcctcacctactgtaacctggttcatggccggaatttcacctccaagtttccacggcagattgtcagcaactgtagccacggacgttggagtgtcattgtgattccagacgtgacagtgtctgactccgggctgtacagatgctatctgcaagccagcgcaggcgaaaacgaaacctttgtgatgcggctgaccgtggctgaaggcaaaacagataatcagtacacactcttcgttgccggcggaaccgtgctgctcctgctctttgtgattagcatcacaacgattatcgtcatcttcctcaaccgcaggcggagaagagagaggcgcgatctgttcaccgagtcttgggatacacagaaagctccgaacaactatcggagccctatctccaccggacagcccacaaatcagtctatggacgacacacgcgaggacatctatgtcaattaccccactttttctaggcggcctaagaccagagtgcgcgccaagagaagcggatctggcgtgaagcagaccctgaatttcgacctgctgaagctggctggcgacgtggaatccaacccaggcccttctagaggcgggatccacaccatgtccgactccaaggaggtccctagccttccatttttgcgacacttgctcgaagagttggacagccatgaggacagcttgctgctgtttctgtgtcacgacgcggccccgggctgcacgacggtcacgcaagctttgtgctcgcttagccaacagcgcaagctgaccctcgcggctctggtcgagatgctctacgtgctgcagcgtatggatcttctcaagagccgcttcgggctcagcaaggagggggccgagcaattgctgggcacaagctttctcacgcgctaccgcaagctcatggtttgcgtgggtgaggagctcgactcgagcgagctacgcgctctacgcttgttcgcgtgcaacctgaatccgagcctgagcacggcgctttctgagagcagccgctttgtcgagcttgtactcgcgcttgaaaacgtaggactcgtctcgccatcgagtgtttccgtgcttgcggacatgttgcgcactcttcggcgcctcgatttgtgccagcagcttgttgagtacgaacaacaagagcaagccaggtaccgttactgttacgcggcctcgccctcattgccagttcgtacgttacgtcgggggcacggcgcgagtgaacacgagcagctgtgcatgcccgtgcaagaatcctctgacagccccgagctgctgcgcacgcccgtacaagaatcctccagcgacagccccgagcaaacgact

SEQ ID NO: 1916 - DNA, 4167 bp, Artificial Sequence
  Synthetic Polynucleotide
atggccttaccagtgaccgccttgctcctgccgctggccttgctgctccacgccgccaggccggacatccagatgacacagagccctagcagcctgtctgccagcgtgggagacagagtgaccatcacatgcaaggccagcgaccacatcaacaactggctggcctggtatcagcagaagcctggacaggcccctaagctgctgatctacggcgctaccacactggaaacaggcgtgcccagcagattttctggcagcggctctggcaccgactacaccctgacaatatccagcctccagcctgaggacttcgccacctactactgtcagcagagctggaacaccccttggacattcggccagggcaccaagctggaaatcaagagactcgagggacagcctaaggccaatcctaccgtgacactgttccctccaagcagcgaagaactccaggccaacaaggccacacttgtgtgcctgatctccgacttctaccctggggctgtgacagtggcttggaaggccgatggatctcctgtgaaagccggcgtggaaaccaccaagccatccaagcagagcaacaacaaatacgccgccagctcctacctgagcctgacacctgagcagtggaagtcccacagatcctacagctgccaagtgacccacgaaggcagcaccgtggaaaagacagtggcccctacagagtgcagcggatccgaagaggtgctgtggcacacctctgtgcccttcgccgagaacatgagcctggaatgcgtgtaccccagcatgggcatcctgacacaggtggaatggttcaagatcggcacccagcaggactctatcgccatcttcagccccacacacggcatggtcatcagaaagccttacgccgagcgggtgtacttcctgaacagcacaatggcctccaacaacatgaccctgttcttcagaaacgccagcgaggacgacgtgggctactacagctgttccctgtacacataccctcaaggcacctggcagaaagtgatccaggtggtgcagagcgacagcttcgaggctgccgtgcctagcaatagccacatcgtgtctgagcccggcaagaacgtgaccctgacttgccagcctcagatgacctggcctgtgcaggccgttagatgggagaagatccagcctcggcagatcgacctgctgacctactgcaatctggtgcacggcagaaacttcaccagcaagttccccagacagatcgtgtccaactgctcccacggacgttggagcgtgatcgtgatccctgatgtgaccgtgtccgacagcggcctgtatcggtgttacctgcaagcctctgccggcgagaacgagacattcgtgatgagactgacagtggccgagggcaagaccgacaaccagtacaccctgtttgtggctggcggcacagttctgctgctgctgttcgtgatctccatcacgactatcatcgtgatctttctgaaccggcggaggcggagagagcggagggatctgtttacagagagctgggacacccagttcaagaaggcccctaacaactacagaagccccatcagcaccggccagcctaccaaccagagcatggacgatacccgcgaggacatctacgtgaactaccctaccttcagcagacggcccaagacaagagttagggccaagcgatctggatctggagcaacaaacttctcactactcaaacaagcaggtgacgtggaggagaatcccgggcctactagtatggactggatttggcgcatccttttccttgtcggcgctgctaccggcgcgcattccttcgaacaagttcagcttcaacagcctggcgctgagctggtcaaacctggcgcttctgtgaagatgagctgcaaagccagcggctacgccttcagcagctactggatcaactggatgaagcagaaacccggccagggactcgaatggatcggccaaatctatcccggcgacggcgacaccaactacaacggcaagttcaagggcagagccacactgaccgccgatacctctagcagcacagcctacatgcagctgagcagcctgaccagcgaagatagcgccgtgtacttctgtgcccggtccatcacaacagtcgtgggctgcgctatggactattggggccagggaacaagcgtgaccgtgtctagtacgcgtgcctctacaaagggaccctccgtgtttcctctggctcccagcagcaagtctacaagcggaggaacagccgctctgggctgcctggtcaaggattactttcccgagcctgtgaccgtgtcctggaatagcggagcactgacaagcggcgtgcacacctttccagccgtgctgcaaagcagcggcctgtactctctgagcagcgtggtcacagtgcctagctctagcctgggcacccagacctacatctgcaatgtgaaccacaagcctagcaacaccaaggtggacaagagagtggaacccaagagctgtggtaccgaagaagtgctctggcataccagcgtgccatttgccgagaatatgtcccttgagtgtgtgtacccctctatggggattctgacccaagtcgagtggtttaagattgggacgcagcaagacagcattgccatcttctctccaactcacggaatggttattcggaagccctatgccgagagagtctatttcctgaactctacgatggcaagcaacaatatgacgctgttttttcggaacgcctccgaggatgatgtggggtactattcctgtagcctgtacacctatccacaaggcacatggcaaaaagtcattcaagtggtccagtccgactccttcgaggccgcagttccaagcaactcccacatcgttagcgagcctgggaagaatgtcacactgacctgtcagccccaaatgacatggcccgtccaagctgtccgctgggagaaaattcagccaagacagattgatctcctcacctactgtaacctggttcatggccggaatttcacctccaagtttccacggcagattgtcagcaactgtagccacggacgttggagtgtcattgtgattccagacgtgacagtgtctgactccgggctgtacagatgctatctgcaagccagcgcaggcgaaaacgaaacctttgtgatgcggctgaccgtggctgaaggcaaaacagataatcagtacacactcttcgttgccggcggaaccgtgctgctcctgctctttgtgattagcatcacaacgattatcgtcatcttcctcaaccgcaggcggagaagagagaggcgcgatctgttcaccgagtcttgggatacacagaaagctccgaacaactatcggagccctatctccaccggacagcccacaaatcagtctatggacgacacacgcgaggacatctatgtcaattaccccactttttctaggcggcctaagaccagagtgcgcgccaagagaagcggatctggcgtgaagcagaccctgaatttcgacctgctgaagctggctggcgacgtggaatccaacccaggcccttctagaggccatatgaccgagtacaagcccacggtgcgcctcgccacccgcgacgacgtccccagggccgtacgcaccctcgccgccgcgttcgccgactaccccgccacgcgccacaccgtcgatccggaccgccacatcgagcgggtcaccgagctgcaagaactcttcctcacgcgcgtcgggctcgacatcggcaaggtgtgggtcgcggacgacggcgccgcggtggcggtctggaccacgccggagagcgtcgaagcgggggcggtgttcgccgagatcggcccgcgcatggccgagttgagcggttcccggctggccgcgcagcaacagatggaaggcctcctggcgccgcaccggcccaaggagcccgcgtggttcctggccaccgtcggcgtctcgcccgaccaccagggcaagggtctgggcagcgccgtcgtgctccccggagtggaggcggccgagcgcgccggggtgcccgccttcctggagacctccgcgccccgcaacctccccttctacgagcggctcggcttcaccgtcaccgccgacgtcgaggtgcccgaaggaccgcgcacctggtgcatgacccgcaagcccggtgcctga

SEQ ID NO: 1917 - DNA, 4578 bp, Artificial Sequence
  Synthetic Polynucleotide
atggccttaccagtgaccgccttgctcctgccgctggccttgctgctccacgccgccaggccggaagtgcagctggttgaatctggcggaggactggttcaggctggcggatctctgagactgtcttgtgccgccagcggcagaacctttagcatgggctggtttagacaggcccctggcaaagagagagagttcgtcgccgccatcacatactctggcggcagcccttactacgccgactctgtgaagggcagattcaccatcagccgggacaacgccaagaacaccgtgtacctccagatgaacagcctgaagcctgaggacaccgccgtgtactactgcgccgccaatccaacatacggcagcgactggaacgccgagaattggggccagggaacccaagtgacagtgtctagcggtaccggcggaggcggatctggcggcggaggtagcggtggcggaggatctgaattcgacatccagatgacacagagccctagcagcctgtctgccagcgtgggagacagagtgaccatcacatgcaaggccagcgaccacatcaacaactggctggcctggtatcagcagaagcctggacaggcccctaagctgctgatctacggcgctaccacactggaaacaggcgtgcccagcagattttctggcagcggctctggcaccgactacaccctgacaatatccagcctccagcctgaggacttcgccacctactactgtcagcagagctggaacaccccttggacattcggccagggcaccaagctggaaatcaagagactcgagggacagcctaaggccaatcctaccgtgacactgttccctccaagcagcgaagaactccaggccaacaaggccacacttgtgtgcctgatctccgacttctaccctggggctgtgacagtggcttggaaggccgatggatctcctgtgaaagccggcgtggaaaccaccaagccatccaagcagagcaacaacaaatacgccgccagctcctacctgagcctgacacctgagcagtggaagtcccacagatcctacagctgccaagtgacccacgaaggcagcaccgtggaaaagacagtggcccctacagagtgcagcggatccgaagaggtgctgtggcacacctctgtgcccttcgccgagaacatgagcctggaatgcgtgtaccccagcatgggcatcctgacacaggtggaatggttcaagatcggcacccagcaggactctatcgccatcttcagccccacacacggcatggtcatcagaaagccttacgccgagcgggtgtacttcctgaacagcacaatggcctccaacaacatgaccctgttcttcagaaacgccagcgaggacgacgtgggctactacagctgttccctgtacacataccctcaaggcacctggcagaaagtgatccaggtggtgcagagcgacagcttcgaggctgccgtgcctagcaatagccacatcgtgtctgagcccggcaagaacgtgaccctgacttgccagcctcagatgacctggcctgtgcaggccgttagatgggagaagatccagcctcggcagatcgacctgctgacctactgcaatctggtgcacggcagaaacttcaccagcaagttccccagacagatcgtgtccaactgctcccacggacgttggagcgtgatcgtgatccctgatgtgaccgtgtccgacagcggcctgtatcggtgttacctgcaagcctctgccggcgagaacgagacattcgtgatgagactgacagtggccgagggcaagaccgacaaccagtacaccctgtttgtggctggcggcacagttctgctgctgctgttcgtgatctccatcacgactatcatcgtgatctttctgaaccggcggaggcggagagagcggagggatctgtttacagagagctgggacacccagttcaagaaggcccctaacaactacagaagccccatcagcaccggccagcctaccaaccagagcatggacgatacccgcgaggacatctacgtgaactaccctaccttcagcagacggcccaagacaagagttagggccaagcgatctggatctggagcaacaaacttctcactactcaaacaagcaggtgacgtggaggagaatcccgggcctactagtatggactggatttggcgcatccttttccttgtcggcgctgctaccggcgcgcattccttcgaacaagttcagcttcaacagcctggcgctgagctggtcaaacctggcgcttctgtgaagatgagctgcaaagccagcggctacgccttcagcagctactggatcaactggatgaagcagaaacccggccagggactcgaatggatcggccaaatctatcccggcgacggcgacaccaactacaacggcaagttcaagggcagagccacactgaccgccgatacctctagcagcacagcctacatgcagctgagcagcctgaccagcgaagatagcgccgtgtacttctgtgcccggtccatcacaacagtcgtgggctgcgctatggactattggggccagggaacaagcgtgaccgtgtctagtacgcgtgcctctacaaagggaccctccgtgtttcctctggctcccagcagcaagtctacaagcggaggaacagccgctctgggctgcctggtcaaggattactttcccgagcctgtgaccgtgtcctggaatagcggagcactgacaagcggcgtgcacacctttccagccgtgctgcaaagcagcggcctgtactctctgagcagcgtggtcacagtgcctagctctagcctgggcacccagacctacatctgcaatgtgaaccacaagcctagcaacaccaaggtggacaagagagtggaacccaagagctgtggtaccgaagaagtgctctggcataccagcgtgccatttgccgagaatatgtcccttgagtgtgtgtacccctctatggggattctgacccaagtcgagtggtttaagattgggacgcagcaagacagcattgccatcttctctccaactcacggaatggttattcggaagccctatgccgagagagtctatttcctgaactctacgatggcaagcaacaatatgacgctgttttttcggaacgcctccgaggatgatgtggggtactattcctgtagcctgtacacctatccacaaggcacatggcaaaaagtcattcaagtggtccagtccgactccttcgaggccgcagttccaagcaactcccacatcgttagcgagcctgggaagaatgtcacactgacctgtcagccccaaatgacatggcccgtccaagctgtccgctgggagaaaattcagccaagacagattgatctcctcacctactgtaacctggttcatggccggaatttcacctccaagtttccacggcagattgtcagcaactgtagccacggacgttggagtgtcattgtgattccagacgtgacagtgtctgactccgggctgtacagatgctatctgcaagccagcgcaggcgaaaacgaaacctttgtgatgcggctgaccgtggctgaaggcaaaacagataatcagtacacactcttcgttgccggcggaaccgtgctgctcctgctctttgtgattagcatcacaacgattatcgtcatcttcctcaaccgcaggcggagaagagagaggcgcgatctgttcaccgagtcttgggatacacagaaagctccgaacaactatcggagccctatctccaccggacagcccacaaatcagtctatggacgacacacgcgaggacatctatgtcaattaccccactttttctaggcggcctaagaccagagtgcgcgccaagagaagcggatctggcgtgaagcagaccctgaatttcgacctgctgaagctggctggcgacgtggaatccaacccaggcccttctagaggccatatgaccgagtacaagcccacggtgcgcctcgccacccgcgacgacgtccccagggccgtacgcaccctcgccgccgcgttcgccgactaccccgccacgcgccacaccgtcgatccggaccgccacatcgagcgggtcaccgagctgcaagaactcttcctcacgcgcgtcgggctcgacatcggcaaggtgtgggtcgcggacgacggcgccgcggtggcggtctggaccacgccggagagcgtcgaagcgggggcggtgttcgccgagatcggcccgcgcatggccgagttgagcggttcccggctggccgcgcagcaacagatggaaggcctcctggcgccgcaccggcccaaggagcccgcgtggttcctggccaccgtcggcgtctcgcccgaccaccagggcaagggtctgggcagcgccgtcgtgctccccggagtggaggcggccgagcgcgccggggtgcccgccttcctggagacctccgcgccccgcaacctccccttctacgagcggctcggcttcaccgtcaccgccgacgtcgaggtgcccgaaggaccgcgcacctggtgcatgacccgcaagcccggtgcctga

SEQ ID NO: 1918 - DNA, 4989 bp, Artificial Sequence
  Synthetic Polynucleotide
atggccttaccagtgaccgccttgctcctgccgctggccttgctgctccacgccgccaggccggaagtgcagctggttgaatctggcggaggactggttcaggctggcggatctctgagactgtcttgtgccgccagcggcagaacctttagcatgggctggtttagacaggcccctggcaaagagagagagttcgtcgccgccatcacatactctggcggcagcccttactacgccgactctgtgaagggcagattcaccatcagccgggacaacgccaagaacaccgtgtacctccagatgaacagcctgaagcctgaggacaccgccgtgtactactgcgccgccaatccaacatacggcagcgactggaacgccgagaattggggccagggaacccaagtgacagtgtctagcggtaccggcggaggcggatctggcggcggaggtagcggtggcggaggatctgaattcgacatccagatgacacagagccctagcagcctgtctgccagcgtgggagacagagtgaccatcacatgcaaggccagcgaccacatcaacaactggctggcctggtatcagcagaagcctggacaggcccctaagctgctgatctacggcgctaccacactggaaacaggcgtgcccagcagattttctggcagcggctctggcaccgactacaccctgacaatatccagcctccagcctgaggacttcgccacctactactgtcagcagagctggaacaccccttggacattcggccagggcaccaagctggaaatcaagagactcgagggacagcctaaggccaatcctaccgtgacactgttccctccaagcagcgaagaactccaggccaacaaggccacacttgtgtgcctgatctccgacttctaccctggggctgtgacagtggcttggaaggccgatggatctcctgtgaaagccggcgtggaaaccaccaagccatccaagcagagcaacaacaaatacgccgccagctcctacctgagcctgacacctgagcagtggaagtcccacagatcctacagctgccaagtgacccacgaaggcagcaccgtggaaaagacagtggcccctacagagtgcagcggatccgaagaggtgctgtggcacacctctgtgcccttcgccgagaacatgagcctggaatgcgtgtaccccagcatgggcatcctgacacaggtggaatggttcaagatcggcacccagcaggactctatcgccatcttcagccccacacacggcatggtcatcagaaagccttacgccgagcgggtgtacttcctgaacagcacaatggcctccaacaacatgaccctgttcttcagaaacgccagcgaggacgacgtgggctactacagctgttccctgtacacataccctcaaggcacctggcagaaagtgatccaggtggtgcagagcgacagcttcgaggctgccgtgcctagcaatagccacatcgtgtctgagcccggcaagaacgtgaccctgacttgccagcctcagatgacctggcctgtgcaggccgttagatgggagaagatccagcctcggcagatcgacctgctgacctactgcaatctggtgcacggcagaaacttcaccagcaagttccccagacagatcgtgtccaactgctcccacggacgttggagcgtgatcgtgatccctgatgtgaccgtgtccgacagcggcctgtatcggtgttacctgcaagcctctgccggcgagaacgagacattcgtgatgagactgacagtggccgagggcaagaccgacaaccagtacaccctgtttgtggctggcggcacagttctgctgctgctgttcgtgatctccatcacgactatcatcgtgatctttctgaaccggcggaggcggagagagcggagggatctgtttacagagagctgggacacccagttcaagaaggcccctaacaactacagaagccccatcagcaccggccagcctaccaaccagagcatggacgatacccgcgaggacatctacgtgaactaccctaccttcagcagacggcccaagacaagagttagggccaagcgatctggatctggagcaacaaacttctcactactcaaacaagcaggtgacgtggaggagaatcccgggcctactagtatggactggatttggcgcatccttttccttgtcggcgctgctaccggcgcgcattccgggcccgaagtgcaactggttgaatccggtggcggcctggtgcaagcaggcggatctctcagacttagctgtgccgcctccggcagaaccttcacaatgggatggtttaggcaggctccagggaaagagagagagttcgtcgccgccatctctctgtctcccacactggcctactacgccgactctgtgaaaggccggttcaccatctccagagataatgccaagaacaccgtggtgctgcaaatgaactctctgaaacccgaggatacagccctgtactattgtgccgctgaccggaagtccgtgatgagcatcagacccgattactggggacagggcacacaagtcacagtgtcctctggatccggcggcggaggatctggcggaggcggatctgggggcggaggctctttcgaacaagttcagcttcaacagcctggcgctgagctggtcaaacctggcgcttctgtgaagatgagctgcaaagccagcggctacgccttcagcagctactggatcaactggatgaagcagaaacccggccagggactcgaatggatcggccaaatctatcccggcgacggcgacaccaactacaacggcaagttcaagggcagagccacactgaccgccgatacctctagcagcacagcctacatgcagctgagcagcctgaccagcgaagatagcgccgtgtacttctgtgcccggtccatcacaacagtcgtgggctgcgctatggactattggggccagggaacaagcgtgaccgtgtctagtacgcgtgcctctacaaagggaccctccgtgtttcctctggctcccagcagcaagtctacaagcggaggaacagccgctctgggctgcctggtcaaggattactttcccgagcctgtgaccgtgtcctggaatagcggagcactgacaagcggcgtgcacacctttccagccgtgctgcaaagcagcggcctgtactctctgagcagcgtggtcacagtgcctagctctagcctgggcacccagacctacatctgcaatgtgaaccacaagcctagcaacaccaaggtggacaagagagtggaacccaagagctgtggtaccgaagaagtgctctggcataccagcgtgccatttgccgagaatatgtcccttgagtgtgtgtacccctctatggggattctgacccaagtcgagtggtttaagattgggacgcagcaagacagcattgccatcttctctccaactcacggaatggttattcggaagccctatgccgagagagtctatttcctgaactctacgatggcaagcaacaatatgacgctgttttttcggaacgcctccgaggatgatgtggggtactattcctgtagcctgtacacctatccacaaggcacatggcaaaaagtcattcaagtggtccagtccgactccttcgaggccgcagttccaagcaactcccacatcgttagcgagcctgggaagaatgtcacactgacctgtcagccccaaatgacatggcccgtccaagctgtccgctgggagaaaattcagccaagacagattgatctcctcacctactgtaacctggttcatggccggaatttcacctccaagtttccacggcagattgtcagcaactgtagccacggacgttggagtgtcattgtgattccagacgtgacagtgtctgactccgggctgtacagatgctatctgcaagccagcgcaggcgaaaacgaaacctttgtgatgcggctgaccgtggctgaaggcaaaacagataatcagtacacactcttcgttgccggcggaaccgtgctgctcctgctctttgtgattagcatcacaacgattatcgtcatcttcctcaaccgcaggcggagaagagagaggcgcgatctgttcaccgagtcttgggatacacagaaagctccgaacaactatcggagccctatctccaccggacagcccacaaatcagtctatggacgacacacgcgaggacatctatgtcaattaccccactttttctaggcggcctaagaccagagtgcgcgccaagagaagcggatctggcgtgaagcagaccctgaatttcgacctgctgaagctggctggcgacgtggaatccaacccaggcccttctagaggccatatgaccgagtacaagcccacggtgcgcctcgccacccgcgacgacgtccccagggccgtacgcaccctcgccgccgcgttcgccgactaccccgccacgcgccacaccgtcgatccggaccgccacatcgagcgggtcaccgagctgcaagaactcttcctcacgcgcgtcgggctcgacatcggcaaggtgtgggtcgcggacgacggcgccgcggtggcggtctggaccacgccggagagcgtcgaagcgggggcggtgttcgccgagatcggcccgcgcatggccgagttgagcggttcccggctggccgcgcagcaacagatggaaggcctcctggcgccgcaccggcccaaggagcccgcgtggttcctggccaccgtcggcgtctcgcccgaccaccagggcaagggtctgggcagcgccgtcgtgctccccggagtggaggcggccgagcgcgccggggtgcccgccttcctggagacctccgcgccccgcaacctccccttctacgagcggctcggcttcaccgtcaccgccgacgtcgaggtgcccgaaggaccgcgcacctggtgcatgacccgcaagcccggtgcctga

SEQ ID NO: 1919 - DNA, 4188 bp, Artificial Sequence
  Synthetic Polynucleotide
atggccttaccagtgaccgccttgctcctgccgctggccttgctgctccacgccgccaggccggaagtgcagctggttgaatctggcggaggactggttcaggctggcggatctctgagactgtcttgtgccgccagcggcagaacctttagcatgggctggtttagacaggcccctggcaaagagagagagttcgtcgccgccatcacatactctggcggcagcccttactacgccgactctgtgaagggcagattcaccatcagccgggacaacgccaagaacaccgtgtacctccagatgaacagcctgaagcctgaggacaccgccgtgtactactgcgccgccaatccaacatacggcagcgactggaacgccgagaattggggccagggaacccaagtgacagtgtctagcctcgagggacagcctaaggccaatcctaccgtgacactgttccctccaagcagcgaagaactccaggccaacaaggccacacttgtgtgcctgatctccgacttctaccctggggctgtgacagtggcttggaaggccgatggatctcctgtgaaagccggcgtggaaaccaccaagccatccaagcagagcaacaacaaatacgccgccagctcctacctgagcctgacacctgagcagtggaagtcccacagatcctacagctgccaagtgacccacgaaggcagcaccgtggaaaagacagtggcccctacagagtgcagcggatccgaagaggtgctgtggcacacctctgtgcccttcgccgagaacatgagcctggaatgcgtgtaccccagcatgggcatcctgacacaggtggaatggttcaagatcggcacccagcaggactctatcgccatcttcagccccacacacggcatggtcatcagaaagccttacgccgagcgggtgtacttcctgaacagcacaatggcctccaacaacatgaccctgttcttcagaaacgccagcgaggacgacgtgggctactacagctgttccctgtacacataccctcaaggcacctggcagaaagtgatccaggtggtgcagagcgacagcttcgaggctgccgtgcctagcaatagccacatcgtgtctgagcccggcaagaacgtgaccctgacttgccagcctcagatgacctggcctgtgcaggccgttagatgggagaagatccagcctcggcagatcgacctgctgacctactgcaatctggtgcacggcagaaacttcaccagcaagttccccagacagatcgtgtccaactgctcccacggacgttggagcgtgatcgtgatccctgatgtgaccgtgtccgacagcggcctgtatcggtgttacctgcaagcctctgccggcgagaacgagacattcgtgatgagactgacagtggccgagggcaagaccgacaaccagtacaccctgtttgtggctggcggcacagttctgctgctgctgttcgtgatctccatcacgactatcatcgtgatctttctgaaccggcggaggcggagagagcggagggatctgtttacagagagctgggacacccagttcaagaaggcccctaacaactacagaagccccatcagcaccggccagcctaccaaccagagcatggacgatacccgcgaggacatctacgtgaactaccctaccttcagcagacggcccaagacaagagttagggccaagcgatctggatctggagcaacaaacttctcactactcaaacaagcaggtgacgtggaggagaatcccgggcctactagtatggactggatttggcgcatccttttccttgtcggcgctgctaccggcgcgcattccgggcccgaagtgcaactggttgaatccggtggcggcctggtgcaagcaggcggatctctcagacttagctgtgccgcctccggcagaaccttcacaatgggatggtttaggcaggctccagggaaagagagagagttcgtcgccgccatctctctgtctcccacactggcctactacgccgactctgtgaaaggccggttcaccatctccagagataatgccaagaacaccgtggtgctgcaaatgaactctctgaaacccgaggatacagccctgtactattgtgccgctgaccggaagtccgtgatgagcatcagacccgattactggggacagggcacacaagtcacagtgtcctctacgcgtgcctctacaaagggaccctccgtgtttcctctggctcccagcagcaagtctacaagcggaggaacagccgctctgggctgcctggtcaaggattactttcccgagcctgtgaccgtgtcctggaatagcggagcactgacaagcggcgtgcacacctttccagccgtgctgcaaagcagcggcctgtactctctgagcagcgtggtcacagtgcctagctctagcctgggcacccagacctacatctgcaatgtgaaccacaagcctagcaacaccaaggtggacaagagagtggaacccaagagctgtggtaccgaagaagtgctctggcataccagcgtgccatttgccgagaatatgtcccttgagtgtgtgtacccctctatggggattctgacccaagtcgagtggtttaagattgggacgcagcaagacagcattgccatcttctctccaactcacggaatggttattcggaagccctatgccgagagagtctatttcctgaactctacgatggcaagcaacaatatgacgctgttttttcggaacgcctccgaggatgatgtggggtactattcctgtagcctgtacacctatccacaaggcacatggcaaaaagtcattcaagtggtccagtccgactccttcgaggccgcagttccaagcaactcccacatcgttagcgagcctgggaagaatgtcacactgacctgtcagccccaaatgacatggcccgtccaagctgtccgctgggagaaaattcagccaagacagattgatctcctcacctactgtaacctggttcatggccggaatttcacctccaagtttccacggcagattgtcagcaactgtagccacggacgttggagtgtcattgtgattccagacgtgacagtgtctgactccgggctgtacagatgctatctgcaagccagcgcaggcgaaaacgaaacctttgtgatgcggctgaccgtggctgaaggcaaaacagataatcagtacacactcttcgttgccggcggaaccgtgctgctcctgctctttgtgattagcatcacaacgattatcgtcatcttcctcaaccgcaggcggagaagagagaggcgcgatctgttcaccgagtcttgggatacacagaaagctccgaacaactatcggagccctatctccaccggacagcccacaaatcagtctatggacgacacacgcgaggacatctatgtcaattaccccactttttctaggcggcctaagaccagagtgcgcgccaagagaagcggatctggcgtgaagcagaccctgaatttcgacctgctgaagctggctggcgacgtggaatccaacccaggcccttctagaggccatatgaccgagtacaagcccacggtgcgcctcgccacccgcgacgacgtccccagggccgtacgcaccctcgccgccgcgttcgccgactaccccgccacgcgccacaccgtcgatccggaccgccacatcgagcgggtcaccgagctgcaagaactcttcctcacgcgcgtcgggctcgacatcggcaaggtgtgggtcgcggacgacggcgccgcggtggcggtctggaccacgccggagagcgtcgaagcgggggcggtgttcgccgagatcggcccgcgcatggccgagttgagcggttcccggctggccgcgcagcaacagatggaaggcctcctggcgccgcaccggcccaaggagcccgcgtggttcctggccaccgtcggcgtctcgcccgaccaccagggcaagggtctgggcagcgccgtcgtgctccccggagtggaggcggccgagcgcgccggggtgcccgccttcctggagacctccgcgccccgcaacctccccttctacgagcggctcggcttcaccgtcaccgccgacgtcgaggtgcccgaaggaccgcgcacctggtgcatgacccgcaagcccggtgcctga

SEQ ID NO: 1920 - DNA, 4212 bp, Artificial Sequence
  Synthetic Polynucleotide
atggccttaccagtgaccgccttgctcctgccgctggccttgctgctccacgccgccaggccggacatccagatgacacagagccctagcagcctgtctgccagcgtgggagacagagtgaccatcacatgcaaggccagcgaccacatcaacaactggctggcctggtatcagcagaagcctggacaggcccctaagctgctgatctacggcgctaccacactggaaacaggcgtgcccagcagattttctggcagcggctctggcaccgactacaccctgacaatatccagcctccagcctgaggacttcgccacctactactgtcagcagagctggaacaccccttggacattcggccagggcaccaagctggaaatcaagagactcgaggacctgaagaacgtgttcccacctgaggtggccgtgttcgagcctagcgaggccgagatcagccacacccagaaagccaccctcgtgtgcctggctaccggcttctaccccgaccatgtggaactgtcttggtgggtcaacggcaaagaggtgcacagcggcgtgtctaccgacccccagccactgaaagaacagcccgccctgaacgacagccggtactgcctgagcagcagactgagagtgtccgccaccttctggcagaacccccggaaccacttcagatgccaggtgcagttctacggcctgagcgagaacgacgagtggacccaggacagagccaagcccgtgacccagatcgtgtctgccgaagcctggggcagagccgattgcggatccgaagaggtgctgtggcacacctctgtgcccttcgccgagaacatgagcctggaatgcgtgtaccccagcatgggcatcctgacacaggtggaatggttcaagatcggcacccagcaggactctatcgccatcttcagccccacacacggcatggtcatcagaaagccttacgccgagcgggtgtacttcctgaacagcacaatggcctccaacaacatgaccctgttcttcagaaacgccagcgaggacgacgtgggctactacagctgttccctgtacacataccctcaaggcacctggcagaaagtgatccaggtggtgcagagcgacagcttcgaggctgccgtgcctagcaatagccacatcgtgtctgagcccggcaagaacgtgaccctgacttgccagcctcagatgacctggcctgtgcaggccgttagatgggagaagatccagcctcggcagatcgacctgctgacctactgcaatctggtgcacggcagaaacttcaccagcaagttccccagacagatcgtgtccaactgctcccacggacgttggagcgtgatcgtgatccctgatgtgaccgtgtccgacagcggcctgtatcggtgttacctgcaagcctctgccggcgagaacgagacattcgtgatgagactgacagtggccgagggcaagaccgacaaccagtacaccctgtttgtggctggcggcacagttctgctgctgctgttcgtgatctccatcacgactatcatcgtgatctttctgaaccggcggaggcggagagagcggagggatctgtttacagagagctgggacacccagttcaagaaggcccctaacaactacagaagccccatcagcaccggccagcctaccaaccagagcatggacgatacccgcgaggacatctacgtgaactaccctaccttcagcagacggcccaagacaagagttagggccaagcgatctggatctggagcaacaaacttctcactactcaaacaagcaggtgacgtggaggagaatcccgggcctactagtatggactggatttggcgcatccttttccttgtcggcgctgctaccggcgcgcattccttcgaacaagttcagcttcaacagcctggcgctgagctggtcaaacctggcgcttctgtgaagatgagctgcaaagccagcggctacgccttcagcagctactggatcaactggatgaagcagaaacccggccagggactcgaatggatcggccaaatctatcccggcgacggcgacaccaactacaacggcaagttcaagggcagagccacactgaccgccgatacctctagcagcacagcctacatgcagctgagcagcctgaccagcgaagatagcgccgtgtacttctgtgcccggtccatcacaacagtcgtgggctgcgctatggactattggggccagggaacaagcgtgaccgtgtctagtacgcgtatccagaaccctgatcctgccgtgtaccagctgcgggatagcaagagcagcgacaagagcgtgtgtctgttcaccgacttcgacagccagaccaacgtgtcccagagcaaggactccgacgtgtacatcaccgataagaccgtgctggacatgcggagcatggacttcaagagcaactccgccgtggcctggtccaacaagtccgatttcgcctgcgccaacgccttcaacaacagcattatccccgaggacacattcttcccaagccccgagagcagctgcggtaccgaagaagtgctctggcataccagcgtgccatttgccgagaatatgtcccttgagtgtgtgtacccctctatggggattctgacccaagtcgagtggtttaagattgggacgcagcaagacagcattgccatcttctctccaactcacggaatggttattcggaagccctatgccgagagagtctatttcctgaactctacgatggcaagcaacaatatgacgctgttttttcggaacgcctccgaggatgatgtggggtactattcctgtagcctgtacacctatccacaaggcacatggcaaaaagtcattcaagtggtccagtccgactccttcgaggccgcagttccaagcaactcccacatcgttagcgagcctgggaagaatgtcacactgacctgtcagccccaaatgacatggcccgtccaagctgtccgctgggagaaaattcagccaagacagattgatctcctcacctactgtaacctggttcatggccggaatttcacctccaagtttccacggcagattgtcagcaactgtagccacggacgttggagtgtcattgtgattccagacgtgacagtgtctgactccgggctgtacagatgctatctgcaagccagcgcaggcgaaaacgaaacctttgtgatgcggctgaccgtggctgaaggcaaaacagataatcagtacacactcttcgttgccggcggaaccgtgctgctcctgctctttgtgattagcatcacaacgattatcgtcatcttcctcaaccgcaggcggagaagagagaggcgcgatctgttcaccgagtcttgggatacacagaaagctccgaacaactatcggagccctatctccaccggacagcccacaaatcagtctatggacgacacacgcgaggacatctatgtcaattaccccactttttctaggcggcctaagaccagagtgcgcgccaagagaagcggatctggcgtgaagcagaccctgaatttcgacctgctgaagctggctggcgacgtggaatccaacccaggcccttctagaggccatatgaccgagtacaagcccacggtgcgcctcgccacccgcgacgacgtccccagggccgtacgcaccctcgccgccgcgttcgccgactaccccgccacgcgccacaccgtcgatccggaccgccacatcgagcgggtcaccgagctgcaagaactcttcctcacgcgcgtcgggctcgacatcggcaaggtgtgggtcgcggacgacggcgccgcggtggcggtctggaccacgccggagagcgtcgaagcgggggcggtgttcgccgagatcggcccgcgcatggccgagttgagcggttcccggctggccgcgcagcaacagatggaaggcctcctggcgccgcaccggcccaaggagcccgcgtggttcctggccaccgtcggcgtctcgcccgaccaccagggcaagggtctgggcagcgccgtcgtgctccccggagtggaggcggccgagcgcgccggggtgcccgccttcctggagacctccgcgccccgcaacctccccttctacgagcggctcggcttcaccgtcaccgccgacgtcgaggtgcccgaaggaccgcgcacctggtgcatgacccgcaagcccggtgcctga

SEQ ID NO: 1921 - DNA, 4623 bp, Artificial Sequence
  Synthetic Polynucleotide
atggccttaccagtgaccgccttgctcctgccgctggccttgctgctccacgccgccaggccggaagtgcagctggttgaatctggcggaggactggttcaggctggcggatctctgagactgtcttgtgccgccagcggcagaacctttagcatgggctggtttagacaggcccctggcaaagagagagagttcgtcgccgccatcacatactctggcggcagcccttactacgccgactctgtgaagggcagattcaccatcagccgggacaacgccaagaacaccgtgtacctccagatgaacagcctgaagcctgaggacaccgccgtgtactactgcgccgccaatccaacatacggcagcgactggaacgccgagaattggggccagggaacccaagtgacagtgtctagcggtaccggcggaggcggatctggcggcggaggtagcggtggcggaggatctgaattcgacatccagatgacacagagccctagcagcctgtctgccagcgtgggagacagagtgaccatcacatgcaaggccagcgaccacatcaacaactggctggcctggtatcagcagaagcctggacaggcccctaagctgctgatctacggcgctaccacactggaaacaggcgtgcccagcagattttctggcagcggctctggcaccgactacaccctgacaatatccagcctccagcctgaggacttcgccacctactactgtcagcagagctggaacaccccttggacattcggccagggcaccaagctggaaatcaagagactcgaggacctgaagaacgtgttcccacctgaggtggccgtgttcgagcctagcgaggccgagatcagccacacccagaaagccaccctcgtgtgcctggctaccggcttctaccccgaccatgtggaactgtcttggtgggtcaacggcaaagaggtgcacagcggcgtgtctaccgacccccagccactgaaagaacagcccgccctgaacgacagccggtactgcctgagcagcagactgagagtgtccgccaccttctggcagaacccccggaaccacttcagatgccaggtgcagttctacggcctgagcgagaacgacgagtggacccaggacagagccaagcccgtgacccagatcgtgtctgccgaagcctggggcagagccgattgcggatccgaagaggtgctgtggcacacctctgtgcccttcgccgagaacatgagcctggaatgcgtgtaccccagcatgggcatcctgacacaggtggaatggttcaagatcggcacccagcaggactctatcgccatcttcagccccacacacggcatggtcatcagaaagccttacgccgagcgggtgtacttcctgaacagcacaatggcctccaacaacatgaccctgttcttcagaaacgccagcgaggacgacgtgggctactacagctgttccctgtacacataccctcaaggcacctggcagaaagtgatccaggtggtgcagagcgacagcttcgaggctgccgtgcctagcaatagccacatcgtgtctgagcccggcaagaacgtgaccctgacttgccagcctcagatgacctggcctgtgcaggccgttagatgggagaagatccagcctcggcagatcgacctgctgacctactgcaatctggtgcacggcagaaacttcaccagcaagttccccagacagatcgtgtccaactgctcccacggacgttggagcgtgatcgtgatccctgatgtgaccgtgtccgacagcggcctgtatcggtgttacctgcaagcctctgccggcgagaacgagacattcgtgatgagactgacagtggccgagggcaagaccgacaaccagtacaccctgtttgtggctggcggcacagttctgctgctgctgttcgtgatctccatcacgactatcatcgtgatctttctgaaccggcggaggcggagagagcggagggatctgtttacagagagctgggacacccagttcaagaaggcccctaacaactacagaagccccatcagcaccggccagcctaccaaccagagcatggacgatacccgcgaggacatctacgtgaactaccctaccttcagcagacggcccaagacaagagttagggccaagcgatctggatctggagcaacaaacttctcactactcaaacaagcaggtgacgtggaggagaatcccgggcctactagtatggactggatttggcgcatccttttccttgtcggcgctgctaccggcgcgcattccttcgaacaagttcagcttcaacagcctggcgctgagctggtcaaacctggcgcttctgtgaagatgagctgcaaagccagcggctacgccttcagcagctactggatcaactggatgaagcagaaacccggccagggactcgaatggatcggccaaatctatcccggcgacggcgacaccaactacaacggcaagttcaagggcagagccacactgaccgccgatacctctagcagcacagcctacatgcagctgagcagcctgaccagcgaagatagcgccgtgtacttctgtgcccggtccatcacaacagtcgtgggctgcgctatggactattggggccagggaacaagcgtgaccgtgtctagtacgcgtatccagaaccctgatcctgccgtgtaccagctgcgggatagcaagagcagcgacaagagcgtgtgtctgttcaccgacttcgacagccagaccaacgtgtcccagagcaaggactccgacgtgtacatcaccgataagaccgtgctggacatgcggagcatggacttcaagagcaactccgccgtggcctggtccaacaagtccgatttcgcctgcgccaacgccttcaacaacagcattatccccgaggacacattcttcccaagccccgagagcagctgcggtaccgaagaagtgctctggcataccagcgtgccatttgccgagaatatgtcccttgagtgtgtgtacccctctatggggattctgacccaagtcgagtggtttaagattgggacgcagcaagacagcattgccatcttctctccaactcacggaatggttattcggaagccctatgccgagagagtctatttcctgaactctacgatggcaagcaacaatatgacgctgttttttcggaacgcctccgaggatgatgtggggtactattcctgtagcctgtacacctatccacaaggcacatggcaaaaagtcattcaagtggtccagtccgactccttcgaggccgcagttccaagcaactcccacatcgttagcgagcctgggaagaatgtcacactgacctgtcagccccaaatgacatggcccgtccaagctgtccgctgggagaaaattcagccaagacagattgatctcctcacctactgtaacctggttcatggccggaatttcacctccaagtttccacggcagattgtcagcaactgtagccacggacgttggagtgtcattgtgattccagacgtgacagtgtctgactccgggctgtacagatgctatctgcaagccagcgcaggcgaaaacgaaacctttgtgatgcggctgaccgtggctgaaggcaaaacagataatcagtacacactcttcgttgccggcggaaccgtgctgctcctgctctttgtgattagcatcacaacgattatcgtcatcttcctcaaccgcaggcggagaagagagaggcgcgatctgttcaccgagtcttgggatacacagaaagctccgaacaactatcggagccctatctccaccggacagcccacaaatcagtctatggacgacacacgcgaggacatctatgtcaattaccccactttttctaggcggcctaagaccagagtgcgcgccaagagaagcggatctggcgtgaagcagaccctgaatttcgacctgctgaagctggctggcgacgtggaatccaacccaggcccttctagaggccatatgaccgagtacaagcccacggtgcgcctcgccacccgcgacgacgtccccagggccgtacgcaccctcgccgccgcgttcgccgactaccccgccacgcgccacaccgtcgatccggaccgccacatcgagcgggtcaccgagctgcaagaactcttcctcacgcgcgtcgggctcgacatcggcaaggtgtgggtcgcggacgacggcgccgcggtggcggtctggaccacgccggagagcgtcgaagcgggggcggtgttcgccgagatcggcccgcgcatggccgagttgagcggttcccggctggccgcgcagcaacagatggaaggcctcctggcgccgcaccggcccaaggagcccgcgtggttcctggccaccgtcggcgtctcgcccgaccaccagggcaagggtctgggcagcgccgtcgtgctccccggagtggaggcggccgagcgcgccggggtgcccgccttcctggagacctccgcgccccgcaacctccccttctacgagcggctcggcttcaccgtcaccgccgacgtcgaggtgcccgaaggaccgcgcacctggtgcatgacccgcaagcccggtgcctga

SEQ ID NO: 1922 - DNA, 5034 bp, Artificial Sequence
  Synthetic Polynucleotide
atggccttaccagtgaccgccttgctcctgccgctggccttgctgctccacgccgccaggccggaagtgcagctggttgaatctggcggaggactggttcaggctggcggatctctgagactgtcttgtgccgccagcggcagaacctttagcatgggctggtttagacaggcccctggcaaagagagagagttcgtcgccgccatcacatactctggcggcagcccttactacgccgactctgtgaagggcagattcaccatcagccgggacaacgccaagaacaccgtgtacctccagatgaacagcctgaagcctgaggacaccgccgtgtactactgcgccgccaatccaacatacggcagcgactggaacgccgagaattggggccagggaacccaagtgacagtgtctagcggtaccggcggaggcggatctggcggcggaggtagcggtggcggaggatctgaattcgacatccagatgacacagagccctagcagcctgtctgccagcgtgggagacagagtgaccatcacatgcaaggccagcgaccacatcaacaactggctggcctggtatcagcagaagcctggacaggcccctaagctgctgatctacggcgctaccacactggaaacaggcgtgcccagcagattttctggcagcggctctggcaccgactacaccctgacaatatccagcctccagcctgaggacttcgccacctactactgtcagcagagctggaacaccccttggacattcggccagggcaccaagctggaaatcaagagactcgaggacctgaagaacgtgttcccacctgaggtggccgtgttcgagcctagcgaggccgagatcagccacacccagaaagccaccctcgtgtgcctggctaccggcttctaccccgaccatgtggaactgtcttggtgggtcaacggcaaagaggtgcacagcggcgtgtctaccgacccccagccactgaaagaacagcccgccctgaacgacagccggtactgcctgagcagcagactgagagtgtccgccaccttctggcagaacccccggaaccacttcagatgccaggtgcagttctacggcctgagcgagaacgacgagtggacccaggacagagccaagcccgtgacccagatcgtgtctgccgaagcctggggcagagccgattgcggatccgaagaggtgctgtggcacacctctgtgcccttcgccgagaacatgagcctggaatgcgtgtaccccagcatgggcatcctgacacaggtggaatggttcaagatcggcacccagcaggactctatcgccatcttcagccccacacacggcatggtcatcagaaagccttacgccgagcgggtgtacttcctgaacagcacaatggcctccaacaacatgaccctgttcttcagaaacgccagcgaggacgacgtgggctactacagctgttccctgtacacataccctcaaggcacctggcagaaagtgatccaggtggtgcagagcgacagcttcgaggctgccgtgcctagcaatagccacatcgtgtctgagcccggcaagaacgtgaccctgacttgccagcctcagatgacctggcctgtgcaggccgttagatgggagaagatccagcctcggcagatcgacctgctgacctactgcaatctggtgcacggcagaaacttcaccagcaagttccccagacagatcgtgtccaactgctcccacggacgttggagcgtgatcgtgatccctgatgtgaccgtgtccgacagcggcctgtatcggtgttacctgcaagcctctgccggcgagaacgagacattcgtgatgagactgacagtggccgagggcaagaccgacaaccagtacaccctgtttgtggctggcggcacagttctgctgctgctgttcgtgatctccatcacgactatcatcgtgatctttctgaaccggcggaggcggagagagcggagggatctgtttacagagagctgggacacccagttcaagaaggcccctaacaactacagaagccccatcagcaccggccagcctaccaaccagagcatggacgatacccgcgaggacatctacgtgaactaccctaccttcagcagacggcccaagacaagagttagggccaagcgatctggatctggagcaacaaacttctcactactcaaacaagcaggtgacgtggaggagaatcccgggcctactagtatggactggatttggcgcatccttttccttgtcggcgctgctaccggcgcgcattccgggcccgaagtgcaactggttgaatccggtggcggcctggtgcaagcaggcggatctctcagacttagctgtgccgcctccggcagaaccttcacaatgggatggtttaggcaggctccagggaaagagagagagttcgtcgccgccatctctctgtctcccacactggcctactacgccgactctgtgaaaggccggttcaccatctccagagataatgccaagaacaccgtggtgctgcaaatgaactctctgaaacccgaggatacagccctgtactattgtgccgctgaccggaagtccgtgatgagcatcagacccgattactggggacagggcacacaagtcacagtgtcctctggatccggcggcggaggatctggcggaggcggatctgggggcggaggctctttcgaacaagttcagcttcaacagcctggcgctgagctggtcaaacctggcgcttctgtgaagatgagctgcaaagccagcggctacgccttcagcagctactggatcaactggatgaagcagaaacccggccagggactcgaatggatcggccaaatctatcccggcgacggcgacaccaactacaacggcaagttcaagggcagagccacactgaccgccgatacctctagcagcacagcctacatgcagctgagcagcctgaccagcgaagatagcgccgtgtacttctgtgcccggtccatcacaacagtcgtgggctgcgctatggactattggggccagggaacaagcgtgaccgtgtctagtacgcgtatccagaaccctgatcctgccgtgtaccagctgcgggatagcaagagcagcgacaagagcgtgtgtctgttcaccgacttcgacagccagaccaacgtgtcccagagcaaggactccgacgtgtacatcaccgataagaccgtgctggacatgcggagcatggacttcaagagcaactccgccgtggcctggtccaacaagtccgatttcgcctgcgccaacgccttcaacaacagcattatccccgaggacacattcttcccaagccccgagagcagctgcggtaccgaagaagtgctctggcataccagcgtgccatttgccgagaatatgtcccttgagtgtgtgtacccctctatggggattctgacccaagtcgagtggtttaagattgggacgcagcaagacagcattgccatcttctctccaactcacggaatggttattcggaagccctatgccgagagagtctatttcctgaactctacgatggcaagcaacaatatgacgctgttttttcggaacgcctccgaggatgatgtggggtactattcctgtagcctgtacacctatccacaaggcacatggcaaaaagtcattcaagtggtccagtccgactccttcgaggccgcagttccaagcaactcccacatcgttagcgagcctgggaagaatgtcacactgacctgtcagccccaaatgacatggcccgtccaagctgtccgctgggagaaaattcagccaagacagattgatctcctcacctactgtaacctggttcatggccggaatttcacctccaagtttccacggcagattgtcagcaactgtagccacggacgttggagtgtcattgtgattccagacgtgacagtgtctgactccgggctgtacagatgctatctgcaagccagcgcaggcgaaaacgaaacctttgtgatgcggctgaccgtggctgaaggcaaaacagataatcagtacacactcttcgttgccggcggaaccgtgctgctcctgctctttgtgattagcatcacaacgattatcgtcatcttcctcaaccgcaggcggagaagagagaggcgcgatctgttcaccgagtcttgggatacacagaaagctccgaacaactatcggagccctatctccaccggacagcccacaaatcagtctatggacgacacacgcgaggacatctatgtcaattaccccactttttctaggcggcctaagaccagagtgcgcgccaagagaagcggatctggcgtgaagcagaccctgaatttcgacctgctgaagctggctggcgacgtggaatccaacccaggcccttctagaggccatatgaccgagtacaagcccacggtgcgcctcgccacccgcgacgacgtccccagggccgtacgcaccctcgccgccgcgttcgccgactaccccgccacgcgccacaccgtcgatccggaccgccacatcgagcgggtcaccgagctgcaagaactcttcctcacgcgcgtcgggctcgacatcggcaaggtgtgggtcgcggacgacggcgccgcggtggcggtctggaccacgccggagagcgtcgaagcgggggcggtgttcgccgagatcggcccgcgcatggccgagttgagcggttcccggctggccgcgcagcaacagatggaaggcctcctggcgccgcaccggcccaaggagcccgcgtggttcctggccaccgtcggcgtctcgcccgaccaccagggcaagggtctgggcagcgccgtcgtgctccccggagtggaggcggccgagcgcgccggggtgcccgccttcctggagacctccgcgccccgcaacctccccttctacgagcggctcggcttcaccgtcaccgccgacgtcgaggtgcccgaaggaccgcgcacctggtgcatgacccgcaagcccggtgcctga

SEQ ID NO: 1923 - DNA, 4233 bp, Artificial Sequence
  Synthetic Polynucleotide
atggccttaccagtgaccgccttgctcctgccgctggccttgctgctccacgccgccaggccggaagtgcagctggttgaatctggcggaggactggttcaggctggcggatctctgagactgtcttgtgccgccagcggcagaacctttagcatgggctggtttagacaggcccctggcaaagagagagagttcgtcgccgccatcacatactctggcggcagcccttactacgccgactctgtgaagggcagattcaccatcagccgggacaacgccaagaacaccgtgtacctccagatgaacagcctgaagcctgaggacaccgccgtgtactactgcgccgccaatccaacatacggcagcgactggaacgccgagaattggggccagggaacccaagtgacagtgtctagcctcgaggacctgaagaacgtgttcccacctgaggtggccgtgttcgagcctagcgaggccgagatcagccacacccagaaagccaccctcgtgtgcctggctaccggcttctaccccgaccatgtggaactgtcttggtgggtcaacggcaaagaggtgcacagcggcgtgtctaccgacccccagccactgaaagaacagcccgccctgaacgacagccggtactgcctgagcagcagactgagagtgtccgccaccttctggcagaacccccggaaccacttcagatgccaggtgcagttctacggcctgagcgagaacgacgagtggacccaggacagagccaagcccgtgacccagatcgtgtctgccgaagcctggggcagagccgattgcggatccgaagaggtgctgtggcacacctctgtgcccttcgccgagaacatgagcctggaatgcgtgtaccccagcatgggcatcctgacacaggtggaatggttcaagatcggcacccagcaggactctatcgccatcttcagccccacacacggcatggtcatcagaaagccttacgccgagcgggtgtacttcctgaacagcacaatggcctccaacaacatgaccctgttcttcagaaacgccagcgaggacgacgtgggctactacagctgttccctgtacacataccctcaaggcacctggcagaaagtgatccaggtggtgcagagcgacagcttcgaggctgccgtgcctagcaatagccacatcgtgtctgagcccggcaagaacgtgaccctgacttgccagcctcagatgacctggcctgtgcaggccgttagatgggagaagatccagcctcggcagatcgacctgctgacctactgcaatctggtgcacggcagaaacttcaccagcaagttccccagacagatcgtgtccaactgctcccacggacgttggagcgtgatcgtgatccctgatgtgaccgtgtccgacagcggcctgtatcggtgttacctgcaagcctctgccggcgagaacgagacattcgtgatgagactgacagtggccgagggcaagaccgacaaccagtacaccctgtttgtggctggcggcacagttctgctgctgctgttcgtgatctccatcacgactatcatcgtgatctttctgaaccggcggaggcggagagagcggagggatctgtttacagagagctgggacacccagttcaagaaggcccctaacaactacagaagccccatcagcaccggccagcctaccaaccagagcatggacgatacccgcgaggacatctacgtgaactaccctaccttcagcagacggcccaagacaagagttagggccaagcgatctggatctggagcaacaaacttctcactactcaaacaagcaggtgacgtggaggagaatcccgggcctactagtatggactggatttggcgcatccttttccttgtcggcgctgctaccggcgcgcattccgggcccgaagtgcaactggttgaatccggtggcggcctggtgcaagcaggcggatctctcagacttagctgtgccgcctccggcagaaccttcacaatgggatggtttaggcaggctccagggaaagagagagagttcgtcgccgccatctctctgtctcccacactggcctactacgccgactctgtgaaaggccggttcaccatctccagagataatgccaagaacaccgtggtgctgcaaatgaactctctgaaacccgaggatacagccctgtactattgtgccgctgaccggaagtccgtgatgagcatcagacccgattactggggacagggcacacaagtcacagtgtcctctacgcgtatccagaaccctgatcctgccgtgtaccagctgcgggatagcaagagcagcgacaagagcgtgtgtctgttcaccgacttcgacagccagaccaacgtgtcccagagcaaggactccgacgtgtacatcaccgataagaccgtgctggacatgcggagcatggacttcaagagcaactccgccgtggcctggtccaacaagtccgatttcgcctgcgccaacgccttcaacaacagcattatccccgaggacacattcttcccaagccccgagagcagctgcggtaccgaagaagtgctctggcataccagcgtgccatttgccgagaatatgtcccttgagtgtgtgtacccctctatggggattctgacccaagtcgagtggtttaagattgggacgcagcaagacagcattgccatcttctctccaactcacggaatggttattcggaagccctatgccgagagagtctatttcctgaactctacgatggcaagcaacaatatgacgctgttttttcggaacgcctccgaggatgatgtggggtactattcctgtagcctgtacacctatccacaaggcacatggcaaaaagtcattcaagtggtccagtccgactccttcgaggccgcagttccaagcaactcccacatcgttagcgagcctgggaagaatgtcacactgacctgtcagccccaaatgacatggcccgtccaagctgtccgctgggagaaaattcagccaagacagattgatctcctcacctactgtaacctggttcatggccggaatttcacctccaagtttccacggcagattgtcagcaactgtagccacggacgttggagtgtcattgtgattccagacgtgacagtgtctgactccgggctgtacagatgctatctgcaagccagcgcaggcgaaaacgaaacctttgtgatgcggctgaccgtggctgaaggcaaaacagataatcagtacacactcttcgttgccggcggaaccgtgctgctcctgctctttgtgattagcatcacaacgattatcgtcatcttcctcaaccgcaggcggagaagagagaggcgcgatctgttcaccgagtcttgggatacacagaaagctccgaacaactatcggagccctatctccaccggacagcccacaaatcagtctatggacgacacacgcgaggacatctatgtcaattaccccactttttctaggcggcctaagaccagagtgcgcgccaagagaagcggatctggcgtgaagcagaccctgaatttcgacctgctgaagctggctggcgacgtggaatccaacccaggcccttctagaggccatatgaccgagtacaagcccacggtgcgcctcgccacccgcgacgacgtccccagggccgtacgcaccctcgccgccgcgttcgccgactaccccgccacgcgccacaccgtcgatccggaccgccacatcgagcgggtcaccgagctgcaagaactcttcctcacgcgcgtcgggctcgacatcggcaaggtgtgggtcgcggacgacggcgccgcggtggcggtctggaccacgccggagagcgtcgaagcgggggcggtgttcgccgagatcggcccgcgcatggccgagttgagcggttcccggctggccgcgcagcaacagatggaaggcctcctggcgccgcaccggcccaaggagcccgcgtggttcctggccaccgtcggcgtctcgcccgaccaccagggcaagggtctgggcagcgccgtcgtgctccccggagtggaggcggccgagcgcgccggggtgcccgccttcctggagacctccgcgccccgcaacctccccttctacgagcggctcggcttcaccgtcaccgccgacgtcgaggtgcccgaaggaccgcgcacctggtgcatgacccgcaagcccggtgcctga

SEQ ID NO: 1924 - DNA, 2148 bp, Artificial Sequence
  Synthetic Polynucleotide
atggccttaccagtgaccgccttgctcctgccgctggccttgctgctccacgccgccaggccggcatgcgaagtgcagctgcttgaaagtggcggcggactgattcagcctggcggatctctgagactgagctgtgccgccagcggcttcaccttttctagccacgccatgacctgggtccgacaggcacctggaaaagggcttgaatgggtgtccgccatcagcggctctggcgattacacacactacgccgacagcgtgaagggcagattcaccatcagcagagacaacagcaagaacaccgtgtacctccagatgaacagcctgagagccgaggacagcgccgtgtattattgcgccaaggatgaggatggcggcagcctgcttggacacagaggacaaggcaccctggtcaccgtttcttccggtaccggcggaggcggatctggcggcggaggtagcggtggcggaggatctgaattcggatctctcgaggaagaggtgctgtggcacacctctgtgcccttcgccgagaacatgagcctggaatgcgtgtaccccagcatgggcatcctgacacaggtggaatggttcaagatcggcacccagcaggactctatcgccatcttcagccccacacacggcatggtcatcagaaagccttacgccgagcgggtgtacttcctgaacagcacaatggcctccaacaacatgaccctgttcttcagaaacgccagcgaggacgacgtgggctactacagctgttccctgtacacataccctcaaggcacctggcagaaagtgatccaggtggtgcagagcgacagcttcgaggctgccgtgcctagcaatagccacatcgtgtctgagcccggcaagaacgtgaccctgacttgccagcctcagatgacctggcctgtgcaggccgttagatgggagaagatccagcctcggcagatcgacctgctgacctactgcaatctggtgcacggcagaaacttcaccagcaagttccccagacagatcgtgtccaactgctcccacggacgttggagcgtgatcgtgatccctgatgtgaccgtgtccgacagcggcctgtatcggtgttacctgcaagcctctgccggcgagaacgagacattcgtgatgagactgacagtggccgagggcaagaccgacaaccagtacaccctgtttgtggctggcggcacagttctgctgctgctgttcgtgatctccatcacgactatcatcgtgatctttctgaaccggcggaggcggagagagcggagggatctgtttacagagagctgggacacccagttcaagaaggcccctaacaactacagaagccccatcagcaccggccagcctaccaaccagagcatggacgatacccgcgaggacatctacgtgaactaccctaccttcagcagacggcccaagacaagagttagggccaagcgatctggatctggagcaacaaacttctcactactcaaacaagcaggtgacgtggaggagaatcccgggcctactagaggccatatgaccgagtacaagcccacggtgcgcctcgccacccgcgacgacgtccccagggccgtacgcaccctcgccgccgcgttcgccgactaccccgccacgcgccacaccgtcgatccggaccgccacatcgagcgggtcaccgagctgcaagaactcttcctcacgcgcgtcgggctcgacatcggcaaggtgtgggtcgcggacgacggcgccgcggtggcggtctggaccacgccggagagcgtcgaagcgggggcggtgttcgccgagatcggcccgcgcatggccgagttgagcggttcccggctggccgcgcagcaacagatggaaggcctcctggcgccgcaccggcccaaggagcccgcgtggttcctggccaccgtcggcgtctcgcccgaccaccagggcaagggtctgggcagcgccgtcgtgctccccggagtggaggcggccgagcgcgccggggtgcccgccttcctggagacctccgcgccccgcaacctccccttctacgagcggctcggcttcaccgtcaccgccgacgtcgaggtgcccgaaggaccgcgcacctggtgcatgacccgcaagcccggtgcctga

SEQ ID NO: 1925 - DNA, 2319 bp, Artificial Sequence
  Synthetic Polynucleotide
atggccttaccagtgaccgccttgctcctgccgctggccttgctgctccacgccgccaggccggacatccagatgacacagagccctagcagcctgtctgccagcgtgggagacagagtgaccatcacatgcaaggccagcgaccacatcaacaactggctggcctggtatcagcagaagcctggacaggcccctaagctgctgatctacggcgctaccacactggaaacaggcgtgcccagcagattttctggcagcggctctggcaccgactacaccctgacaatatccagcctccagcctgaggacttcgccacctactactgtcagcagagctggaacaccccttggacattcggccagggcaccaagctggaaatcaagagactcgagatcggctggctgttgctccaggcccctcggtgggtgttcaaggaggaagaccctattcacctgaggtgtcacagctggaagaacactgctctgcataaggtcacatatttacagaatggcaaaggcaggaagtattttcatcataattctgacttctacattccaaaagccacactcaaagacagcggctcctacttctgcagggggcttgttgggagtaaaaatgtgtcttcagagactgtgaacatcaccatcactcaaggtttggcagtgtcaaccatctcatcattctttccacctggctaccaagtgtccttctgcctggtcatggtgctgctgttcgccgtggataccggcctgtacttcagcgtcaagaccaacatccggtccagcaccagagactggaaggaccacaagttcaagtggcggaaggaccctcaggacaagagggccaagcgatctggatctggagcaacaaacttctcactactcaaacaagcaggtgacgtggaggagaatcccgggcctactagtatggactggatttggcgcatccttttccttgtcggcgctgctaccggcgcgcattccttcgaacaagttcagcttcaacagcctggcgctgagctggtcaaacctggcgcttctgtgaagatgagctgcaaagccagcggctacgccttcagcagctactggatcaactggatgaagcagaaacccggccagggactcgaatggatcggccaaatctatcccggcgacggcgacaccaactacaacggcaagttcaagggcagagccacactgaccgccgatacctctagcagcacagcctacatgcagctgagcagcctgaccagcgaagatagcgccgtgtacttctgtgcccggtccatcacaacagtcgtgggctgcgctatggactattggggccagggaacaagcgtgaccgtgtctagtacgcgtcaggcacagtctgactgtagctgctccacagttagccctggcgttctggctggcatcgttatgggcgacctcgtcctgactgtcctgatcgctctggcagtgtattttctcggacggctggtcccaagaggaaggggagcagctgaagctgctacccggaagcagcggatcacagagactgagtctccataccaagaactccagggacagagatccgatgtgtactccgacctgaacacacagaggccctattataagcgcgccaagagaagcggatctggcgtgaagcagaccctgaatttcgacctgctgaagctggctggcgacgtggaatccaacccaggcccttctagaggccatatgaccgagtacaagcccacggtgcgcctcgccacccgcgacgacgtccccagggccgtacgcaccctcgccgccgcgttcgccgactaccccgccacgcgccacaccgtcgatccggaccgccacatcgagcgggtcaccgagctgcaagaactcttcctcacgcgcgtcgggctcgacatcggcaaggtgtgggtcgcggacgacggcgccgcggtggcggtctggaccacgccggagagcgtcgaagcgggggcggtgttcgccgagatcggcccgcgcatggccgagttgagcggttcccggctggccgcgcagcaacagatggaaggcctcctggcgccgcaccggcccaaggagcccgcgtggttcctggccaccgtcggcgtctcgcccgaccaccagggcaagggtctgggcagcgccgtcgtgctccccggagtggaggcggccgagcgcgccggggtgcccgccttcctggagacctccgcgccccgcaacctccccttctacgagcggctcggcttcaccgtcaccgccgacgtcgaggtgcccgaaggaccgcgcacctggtgcatgacccgcaagcccggtgcctga

SEQ ID NO: 1926 - DNA, 2481 bp, Artificial Sequence
  Synthetic Polynucleotide
atggccttaccagtgaccgccttgctcctgccgctggccttgctgctccacgccgccaggccggcatgcgaagtgcagctgcttgaaagtggcggcggactgattcagcctggcggatctctgagactgagctgtgccgccagcggcttcaccttttctagccacgccatgacctgggtccgacaggcacctggaaaagggcttgaatgggtgtccgccatcagcggctctggcgattacacacactacgccgacagcgtgaagggcagattcaccatcagcagagacaacagcaagaacaccgtgtacctccagatgaacagcctgagagccgaggacagcgccgtgtattattgcgccaaggatgaggatggcggcagcctgcttggacacagaggacaaggcaccctggtcaccgtttcttccggtaccggcggaggcggatctggcggcggaggtagcggtggcggaggatctgaattcggatctctcgagatcggctggctgttgctccaggcccctcggtgggtgttcaaggaggaagaccctattcacctgaggtgtcacagctggaagaacactgctctgcataaggtcacatatttacagaatggcaaaggcaggaagtattttcatcataattctgacttctacattccaaaagccacactcaaagacagcggctcctacttctgcagggggcttgttgggagtaaaaatgtgtcttcagagactgtgaacatcaccatcactcaaggtttggcagtgtcaaccatctcatcattctttccacctggctaccaagtgtccttctgcctggtcatggtgctgctgttcgccgtggataccggcctgtacttcagcgtcaagaccaacatccggtccagcaccagagactggaaggaccacaagttcaagtggcggaaggaccctcaggacaagagggccaagcgatctggatctggagcaacaaacttctcactactcaaacaagcaggtgacgtggaggagaatcccgggcctactagtgccaccatggactggatttggcgcatccttttccttgtcggcgctgctaccggcgcccattccgggcccgaagtgcagctggttgaatctggcggaggactggttcaggctggcggatctctgagactgtcttgtgccgccagcggcagaacctttagcatgggctggtttagacaggcccctggcaaagagagagagttcgtcgccgccatcacatactctggcggcagcccttactacgccgactctgtgaagggcagattcaccatcagccgggacaacgccaagaacaccgtgtacctccagatgaacagcctgaagcctgaggacaccgccgtgtactactgcgccgccaatccaacatacggcagcgactggaacgccgagaattggggccagggaacccaagtgacagtgtctagcggatccggcggcggaggatctggcggaggcggatctgggggcggaggctctttcgaaggcagcacgcgtcaggcacagtctgactgtagctgctccacagttagccctggcgttctggctggcatcgttatgggcgacctcgtcctgactgtcctgatcgctctggcagtgtattttctcggacggctggtcccaagaggaaggggagcagctgaagctgctacccggaagcagcggatcacagagactgagtctccataccaagaactccagggacagagatccgatgtgtactccgacctgaacacacagaggccctattataagcgcgccaagagaagcggatctggcgtgaagcagaccctgaatttcgacctgctgaagctggctggcgacgtggaatccaacccaggcccttctagaggccatatgaccgagtacaagcccacggtgcgcctcgccacccgcgacgacgtccccagggccgtacgcaccctcgccgccgcgttcgccgactaccccgccacgcgccacaccgtcgatccggaccgccacatcgagcgggtcaccgagctgcaagaactcttcctcacgcgcgtcgggctcgacatcggcaaggtgtgggtcgcggacgacggcgccgcggtggcggtctggaccacgccggagagcgtcgaagcgggggcggtgttcgccgagatcggcccgcgcatggccgagttgagcggttcccggctggccgcgcagcaacagatggaaggcctcctggcgccgcaccggcccaaggagcccgcgtggttcctggccaccgtcggcgtctcgcccgaccaccagggcaagggtctgggcagcgccgtcgtgctccccggagtggaggcggccgagcgcgccggggtgcccgccttcctggagacctccgcgccccgcaacctccccttctacgagcggctcggcttcaccgtcaccgccgacgtcgaggtgcccgaaggaccgcgcacctggtgcatgacccgcaagcccggtgcctga

SEQ ID NO: 1927 - DNA, 2931 bp, Artificial Sequence
  Synthetic Polynucleotide
atggccttaccagtgaccgccttgctcctgccgctggccttgctgctccacgccgccaggccggacatccagatgacacagagccctagcagcctgtctgccagcgtgggagacagagtgaccatcacatgcaaggccagcgaccacatcaacaactggctggcctggtatcagcagaagcctggacaggcccctaagctgctgatctacggcgctaccacactggaaacaggcgtgcccagcagattttctggcagcggctctggcaccgactacaccctgacaatatccagcctccagcctgaggacttcgccacctactactgtcagcagagctggaacaccccttggacattcggccagggcaccaagctggaaatcaagagactcgagggacagcctaaggccaatcctaccgtgacactgttccctccaagcagcgaagaactccaggccaacaaggccacacttgtgtgcctgatctccgacttctaccctggggctgtgacagtggcttggaaggccgatggatctcctgtgaaagccggcgtggaaaccaccaagccatccaagcagagcaacaacaaatacgccgccagctcctacctgagcctgacacctgagcagtggaagtcccacagatcctacagctgccaagtgacccacgaaggcagcaccgtggaaaagacagtggcccctacagagtgcagcggatccatcggctggctgttgctccaggcccctcggtgggtgttcaaggaggaagaccctattcacctgaggtgtcacagctggaagaacactgctctgcataaggtcacatatttacagaatggcaaaggcaggaagtattttcatcataattctgacttctacattccaaaagccacactcaaagacagcggctcctacttctgcagggggcttgttgggagtaaaaatgtgtcttcagagactgtgaacatcaccatcactcaaggtttggcagtgtcaaccatctcatcattctttccacctggctaccaagtgtccttctgcctggtcatggtgctgctgttcgccgtggataccggcctgtacttcagcgtcaagaccaacatccggtccagcaccagagactggaaggaccacaagttcaagtggcggaaggaccctcaggacaagagggccaagcgatctggatctggagcaacaaacttctcactactcaaacaagcaggtgacgtggaggagaatcccgggcctactagtatggactggatttggcgcatccttttccttgtcggcgctgctaccggcgcgcattccttcgaacaagttcagcttcaacagcctggcgctgagctggtcaaacctggcgcttctgtgaagatgagctgcaaagccagcggctacgccttcagcagctactggatcaactggatgaagcagaaacccggccagggactcgaatggatcggccaaatctatcccggcgacggcgacaccaactacaacggcaagttcaagggcagagccacactgaccgccgatacctctagcagcacagcctacatgcagctgagcagcctgaccagcgaagatagcgccgtgtacttctgtgcccggtccatcacaacagtcgtgggctgcgctatggactattggggccagggaacaagcgtgaccgtgtctagtacgcgtgcctctacaaagggaccctccgtgtttcctctggctcccagcagcaagtctacaagcggaggaacagccgctctgggctgcctggtcaaggattactttcccgagcctgtgaccgtgtcctggaatagcggagcactgacaagcggcgtgcacacctttccagccgtgctgcaaagcagcggcctgtactctctgagcagcgtggtcacagtgcctagctctagcctgggcacccagacctacatctgcaatgtgaaccacaagcctagcaacaccaaggtggacaagagagtggaacccaagagctgtggtacccaggcacagtctgactgtagctgctccacagttagccctggcgttctggctggcatcgttatgggcgacctcgtcctgactgtcctgatcgctctggcagtgtattttctcggacggctggtcccaagaggaaggggagcagctgaagctgctacccggaagcagcggatcacagagactgagtctccataccaagaactccagggacagagatccgatgtgtactccgacctgaacacacagaggccctattataagcgcgccaagagaagcggatctggcgtgaagcagaccctgaatttcgacctgctgaagctggctggcgacgtggaatccaacccaggcccttctagaggcgggatccacaccatggctacctacgaggtgctgtgcgaggtggcaagaaagctgggcaccgacgacagagaagtggtgctgttcctgctgaacgtgttcatccctcagcctacactggcccagctgatcggtgcactgagagccctgaaagaggaaggccggctgacctttcctctgctggccgaatgcctgttcagagccggaagaagggatctgctgcgggacctgctgcatctggaccccagatttctggaaagacacctggccggcaccatgagctacttcagcccttaccagctgaccgtgctgcacgttgacggcgaactgtgcgccagagatattcggagcctgatcttcctgagcaaggacaccatcggcagccggtctacccctcagacatttctgcactgggtgtactgcatggaaaacctggacctgctcggccccacagatgtggatgccctgatgtccatgctgagaagcctgagcagagtggacctccagagacaggtgcagacactgatgggactgcacctgagcggacctagccacagccagcactacagacacacccct

SEQ ID NO: 1928 - DNA, 3090 bp, Artificial Sequence
  Synthetic Polynucleotide
atggccttaccagtgaccgccttgctcctgccgctggccttgctgctccacgccgccaggccggacatccagatgacacagagccctagcagcctgtctgccagcgtgggagacagagtgaccatcacatgcaaggccagcgaccacatcaacaactggctggcctggtatcagcagaagcctggacaggcccctaagctgctgatctacggcgctaccacactggaaacaggcgtgcccagcagattttctggcagcggctctggcaccgactacaccctgacaatatccagcctccagcctgaggacttcgccacctactactgtcagcagagctggaacaccccttggacattcggccagggcaccaagctggaaatcaagagactcgagggacagcctaaggccaatcctaccgtgacactgttccctccaagcagcgaagaactccaggccaacaaggccacacttgtgtgcctgatctccgacttctaccctggggctgtgacagtggcttggaaggccgatggatctcctgtgaaagccggcgtggaaaccaccaagccatccaagcagagcaacaacaaatacgccgccagctcctacctgagcctgacacctgagcagtggaagtcccacagatcctacagctgccaagtgacccacgaaggcagcaccgtggaaaagacagtggcccctacagagtgcagcggatccatcggctggctgttgctccaggcccctcggtgggtgttcaaggaggaagaccctattcacctgaggtgtcacagctggaagaacactgctctgcataaggtcacatatttacagaatggcaaaggcaggaagtattttcatcataattctgacttctacattccaaaagccacactcaaagacagcggctcctacttctgcagggggcttgttgggagtaaaaatgtgtcttcagagactgtgaacatcaccatcactcaaggtttggcagtgtcaaccatctcatcattctttccacctggctaccaagtgtccttctgcctggtcatggtgctgctgttcgccgtggataccggcctgtacttcagcgtcaagaccaacatccggtccagcaccagagactggaaggaccacaagttcaagtggcggaaggaccctcaggacaagagggccaagcgatctggatctggagcaacaaacttctcactactcaaacaagcaggtgacgtggaggagaatcccgggcctactagtatggactggatttggcgcatccttttccttgtcggcgctgctaccggcgcgcattccttcgaacaagttcagcttcaacagcctggcgctgagctggtcaaacctggcgcttctgtgaagatgagctgcaaagccagcggctacgccttcagcagctactggatcaactggatgaagcagaaacccggccagggactcgaatggatcggccaaatctatcccggcgacggcgacaccaactacaacggcaagttcaagggcagagccacactgaccgccgatacctctagcagcacagcctacatgcagctgagcagcctgaccagcgaagatagcgccgtgtacttctgtgcccggtccatcacaacagtcgtgggctgcgctatggactattggggccagggaacaagcgtgaccgtgtctagtacgcgtgcctctacaaagggaccctccgtgtttcctctggctcccagcagcaagtctacaagcggaggaacagccgctctgggctgcctggtcaaggattactttcccgagcctgtgaccgtgtcctggaatagcggagcactgacaagcggcgtgcacacctttccagccgtgctgcaaagcagcggcctgtactctctgagcagcgtggtcacagtgcctagctctagcctgggcacccagacctacatctgcaatgtgaaccacaagcctagcaacaccaaggtggacaagagagtggaacccaagagctgtggtacccaggcacagtctgactgtagctgctccacagttagccctggcgttctggctggcatcgttatgggcgacctcgtcctgactgtcctgatcgctctggcagtgtattttctcggacggctggtcccaagaggaaggggagcagctgaagctgctacccggaagcagcggatcacagagactgagtctccataccaagaactccagggacagagatccgatgtgtactccgacctgaacacacagaggccctattataagcgcgccaagagaagcggatctggcgtgaagcagaccctgaatttcgacctgctgaagctggctggcgacgtggaatccaacccaggcccttctagaggcgggatccacaccatgtccgactccaaggaggtccctagccttccatttttgcgacacttgctcgaagagttggacagccatgaggacagcttgctgctgtttctgtgtcacgacgcggccccgggctgcacgacggtcacgcaagctttgtgctcgcttagccaacagcgcaagctgaccctcgcggctctggtcgagatgctctacgtgctgcagcgtatggatcttctcaagagccgcttcgggctcagcaaggagggggccgagcaattgctgggcacaagctttctcacgcgctaccgcaagctcatggtttgcgtgggtgaggagctcgactcgagcgagctacgcgctctacgcttgttcgcgtgcaacctgaatccgagcctgagcacggcgctttctgagagcagccgctttgtcgagcttgtactcgcgcttgaaaacgtaggactcgtctcgccatcgagtgtttccgtgcttgcggacatgttgcgcactcttcggcgcctcgatttgtgccagcagcttgttgagtacgaacaacaagagcaagccaggtaccgttactgttacgcggcctcgccctcattgccagttcgtacgttacgtcgggggcacggcgcgagtgaacacgagcagctgtgcatgcccgtgcaagaatcctctgacagccccgagctgctgcgcacgcccgtacaagaatcctccagcgacagccccgagcaaacgact

SEQ ID NO: 1929 - DNA, 2958 bp, Artificial Sequence
  Synthetic Polynucleotide
atggccttaccagtgaccgccttgctcctgccgctggccttgctgctccacgccgccaggccggacatccagatgacacagagccctagcagcctgtctgccagcgtgggagacagagtgaccatcacatgcaaggccagcgaccacatcaacaactggctggcctggtatcagcagaagcctggacaggcccctaagctgctgatctacggcgctaccacactggaaacaggcgtgcccagcagattttctggcagcggctctggcaccgactacaccctgacaatatccagcctccagcctgaggacttcgccacctactactgtcagcagagctggaacaccccttggacattcggccagggcaccaagctggaaatcaagagactcgagggacagcctaaggccaatcctaccgtgacactgttccctccaagcagcgaagaactccaggccaacaaggccacacttgtgtgcctgatctccgacttctaccctggggctgtgacagtggcttggaaggccgatggatctcctgtgaaagccggcgtggaaaccaccaagccatccaagcagagcaacaacaaatacgccgccagctcctacctgagcctgacacctgagcagtggaagtcccacagatcctacagctgccaagtgacccacgaaggcagcaccgtggaaaagacagtggcccctacagagtgcagcggatccatcggctggctgttgctccaggcccctcggtgggtgttcaaggaggaagaccctattcacctgaggtgtcacagctggaagaacactgctctgcataaggtcacatatttacagaatggcaaaggcaggaagtattttcatcataattctgacttctacattccaaaagccacactcaaagacagcggctcctacttctgcagggggcttgttgggagtaaaaatgtgtcttcagagactgtgaacatcaccatcactcaaggtttggcagtgtcaaccatctcatcattctttccacctggctaccaagtgtccttctgcctggtcatggtgctgctgttcgccgtggataccggcctgtacttcagcgtcaagaccaacatccggtccagcaccagagactggaaggaccacaagttcaagtggcggaaggaccctcaggacaagagggccaagcgatctggatctggagcaacaaacttctcactactcaaacaagcaggtgacgtggaggagaatcccgggcctactagtatggactggatttggcgcatccttttccttgtcggcgctgctaccggcgcgcattccttcgaacaagttcagcttcaacagcctggcgctgagctggtcaaacctggcgcttctgtgaagatgagctgcaaagccagcggctacgccttcagcagctactggatcaactggatgaagcagaaacccggccagggactcgaatggatcggccaaatctatcccggcgacggcgacaccaactacaacggcaagttcaagggcagagccacactgaccgccgatacctctagcagcacagcctacatgcagctgagcagcctgaccagcgaagatagcgccgtgtacttctgtgcccggtccatcacaacagtcgtgggctgcgctatggactattggggccagggaacaagcgtgaccgtgtctagtacgcgtgcctctacaaagggaccctccgtgtttcctctggctcccagcagcaagtctacaagcggaggaacagccgctctgggctgcctggtcaaggattactttcccgagcctgtgaccgtgtcctggaatagcggagcactgacaagcggcgtgcacacctttccagccgtgctgcaaagcagcggcctgtactctctgagcagcgtggtcacagtgcctagctctagcctgggcacccagacctacatctgcaatgtgaaccacaagcctagcaacaccaaggtggacaagagagtggaacccaagagctgtggtacccaggcacagtctgactgtagctgctccacagttagccctggcgttctggctggcatcgttatgggcgacctcgtcctgactgtcctgatcgctctggcagtgtattttctcggacggctggtcccaagaggaaggggagcagctgaagctgctacccggaagcagcggatcacagagactgagtctccataccaagaactccagggacagagatccgatgtgtactccgacctgaacacacagaggccctattataagcgcgccaagagaagcggatctggcgtgaagcagaccctgaatttcgacctgctgaagctggctggcgacgtggaatccaacccaggcccttctagaggccatatgaccgagtacaagcccacggtgcgcctcgccacccgcgacgacgtccccagggccgtacgcaccctcgccgccgcgttcgccgactaccccgccacgcgccacaccgtcgatccggaccgccacatcgagcgggtcaccgagctgcaagaactcttcctcacgcgcgtcgggctcgacatcggcaaggtgtgggtcgcggacgacggcgccgcggtggcggtctggaccacgccggagagcgtcgaagcgggggcggtgttcgccgagatcggcccgcgcatggccgagttgagcggttcccggctggccgcgcagcaacagatggaaggcctcctggcgccgcaccggcccaaggagcccgcgtggttcctggccaccgtcggcgtctcgcccgaccaccagggcaagggtctgggcagcgccgtcgtgctccccggagtggaggcggccgagcgcgccggggtgcccgccttcctggagacctccgcgccccgcaacctccccttctacgagcggctcggcttcaccgtcaccgccgacgtcgaggtgcccgaaggaccgcgcacctggtgcatgacccgcaagcccggtgcctga

SEQ ID NO: 1930 - DNA, 3369 bp, Artificial Sequence
  Synthetic Polynucleotide
atggccttaccagtgaccgccttgctcctgccgctggccttgctgctccacgccgccaggccggaagtgcagctggttgaatctggcggaggactggttcaggctggcggatctctgagactgtcttgtgccgccagcggcagaacctttagcatgggctggtttagacaggcccctggcaaagagagagagttcgtcgccgccatcacatactctggcggcagcccttactacgccgactctgtgaagggcagattcaccatcagccgggacaacgccaagaacaccgtgtacctccagatgaacagcctgaagcctgaggacaccgccgtgtactactgcgccgccaatccaacatacggcagcgactggaacgccgagaattggggccagggaacccaagtgacagtgtctagcggtaccggcggaggcggatctggcggcggaggtagcggtggcggaggatctgaattcgacatccagatgacacagagccctagcagcctgtctgccagcgtgggagacagagtgaccatcacatgcaaggccagcgaccacatcaacaactggctggcctggtatcagcagaagcctggacaggcccctaagctgctgatctacggcgctaccacactggaaacaggcgtgcccagcagattttctggcagcggctctggcaccgactacaccctgacaatatccagcctccagcctgaggacttcgccacctactactgtcagcagagctggaacaccccttggacattcggccagggcaccaagctggaaatcaagagactcgagggacagcctaaggccaatcctaccgtgacactgttccctccaagcagcgaagaactccaggccaacaaggccacacttgtgtgcctgatctccgacttctaccctggggctgtgacagtggcttggaaggccgatggatctcctgtgaaagccggcgtggaaaccaccaagccatccaagcagagcaacaacaaatacgccgccagctcctacctgagcctgacacctgagcagtggaagtcccacagatcctacagctgccaagtgacccacgaaggcagcaccgtggaaaagacagtggcccctacagagtgcagcggatccatcggctggctgttgctccaggcccctcggtgggtgttcaaggaggaagaccctattcacctgaggtgtcacagctggaagaacactgctctgcataaggtcacatatttacagaatggcaaaggcaggaagtattttcatcataattctgacttctacattccaaaagccacactcaaagacagcggctcctacttctgcagggggcttgttgggagtaaaaatgtgtcttcagagactgtgaacatcaccatcactcaaggtttggcagtgtcaaccatctcatcattctttccacctggctaccaagtgtccttctgcctggtcatggtgctgctgttcgccgtggataccggcctgtacttcagcgtcaagaccaacatccggtccagcaccagagactggaaggaccacaagttcaagtggcggaaggaccctcaggacaagagggccaagcgatctggatctggagcaacaaacttctcactactcaaacaagcaggtgacgtggaggagaatcccgggcctactagtatggactggatttggcgcatccttttccttgtcggcgctgctaccggcgcgcattccttcgaacaagttcagcttcaacagcctggcgctgagctggtcaaacctggcgcttctgtgaagatgagctgcaaagccagcggctacgccttcagcagctactggatcaactggatgaagcagaaacccggccagggactcgaatggatcggccaaatctatcccggcgacggcgacaccaactacaacggcaagttcaagggcagagccacactgaccgccgatacctctagcagcacagcctacatgcagctgagcagcctgaccagcgaagatagcgccgtgtacttctgtgcccggtccatcacaacagtcgtgggctgcgctatggactattggggccagggaacaagcgtgaccgtgtctagtacgcgtgcctctacaaagggaccctccgtgtttcctctggctcccagcagcaagtctacaagcggaggaacagccgctctgggctgcctggtcaaggattactttcccgagcctgtgaccgtgtcctggaatagcggagcactgacaagcggcgtgcacacctttccagccgtgctgcaaagcagcggcctgtactctctgagcagcgtggtcacagtgcctagctctagcctgggcacccagacctacatctgcaatgtgaaccacaagcctagcaacaccaaggtggacaagagagtggaacccaagagctgtggtacccaggcacagtctgactgtagctgctccacagttagccctggcgttctggctggcatcgttatgggcgacctcgtcctgactgtcctgatcgctctggcagtgtattttctcggacggctggtcccaagaggaaggggagcagctgaagctgctacccggaagcagcggatcacagagactgagtctccataccaagaactccagggacagagatccgatgtgtactccgacctgaacacacagaggccctattataagcgcgccaagagaagcggatctggcgtgaagcagaccctgaatttcgacctgctgaagctggctggcgacgtggaatccaacccaggcccttctagaggccatatgaccgagtacaagcccacggtgcgcctcgccacccgcgacgacgtccccagggccgtacgcaccctcgccgccgcgttcgccgactaccccgccacgcgccacaccgtcgatccggaccgccacatcgagcgggtcaccgagctgcaagaactcttcctcacgcgcgtcgggctcgacatcggcaaggtgtgggtcgcggacgacggcgccgcggtggcggtctggaccacgccggagagcgtcgaagcgggggcggtgttcgccgagatcggcccgcgcatggccgagttgagcggttcccggctggccgcgcagcaacagatggaaggcctcctggcgccgcaccggcccaaggagcccgcgtggttcctggccaccgtcggcgtctcgcccgaccaccagggcaagggtctgggcagcgccgtcgtgctccccggagtggaggcggccgagcgcgccggggtgcccgccttcctggagacctccgcgccccgcaacctccccttctacgagcggctcggcttcaccgtcaccgccgacgtcgaggtgcccgaaggaccgcgcacctggtgcatgacccgcaagcccggtgcctga

SEQ ID NO: 1931 - DNA, 3780 bp, Artificial Sequence
  Synthetic Polynucleotide
atggccttaccagtgaccgccttgctcctgccgctggccttgctgctccacgccgccaggccggaagtgcagctggttgaatctggcggaggactggttcaggctggcggatctctgagactgtcttgtgccgccagcggcagaacctttagcatgggctggtttagacaggcccctggcaaagagagagagttcgtcgccgccatcacatactctggcggcagcccttactacgccgactctgtgaagggcagattcaccatcagccgggacaacgccaagaacaccgtgtacctccagatgaacagcctgaagcctgaggacaccgccgtgtactactgcgccgccaatccaacatacggcagcgactggaacgccgagaattggggccagggaacccaagtgacagtgtctagcggtaccggcggaggcggatctggcggcggaggtagcggtggcggaggatctgaattcgacatccagatgacacagagccctagcagcctgtctgccagcgtgggagacagagtgaccatcacatgcaaggccagcgaccacatcaacaactggctggcctggtatcagcagaagcctggacaggcccctaagctgctgatctacggcgctaccacactggaaacaggcgtgcccagcagattttctggcagcggctctggcaccgactacaccctgacaatatccagcctccagcctgaggacttcgccacctactactgtcagcagagctggaacaccccttggacattcggccagggcaccaagctggaaatcaagagactcgagggacagcctaaggccaatcctaccgtgacactgttccctccaagcagcgaagaactccaggccaacaaggccacacttgtgtgcctgatctccgacttctaccctggggctgtgacagtggcttggaaggccgatggatctcctgtgaaagccggcgtggaaaccaccaagccatccaagcagagcaacaacaaatacgccgccagctcctacctgagcctgacacctgagcagtggaagtcccacagatcctacagctgccaagtgacccacgaaggcagcaccgtggaaaagacagtggcccctacagagtgcagcggatccatcggctggctgttgctccaggcccctcggtgggtgttcaaggaggaagaccctattcacctgaggtgtcacagctggaagaacactgctctgcataaggtcacatatttacagaatggcaaaggcaggaagtattttcatcataattctgacttctacattccaaaagccacactcaaagacagcggctcctacttctgcagggggcttgttgggagtaaaaatgtgtcttcagagactgtgaacatcaccatcactcaaggtttggcagtgtcaaccatctcatcattctttccacctggctaccaagtgtccttctgcctggtcatggtgctgctgttcgccgtggataccggcctgtacttcagcgtcaagaccaacatccggtccagcaccagagactggaaggaccacaagttcaagtggcggaaggaccctcaggacaagagggccaagcgatctggatctggagcaacaaacttctcactactcaaacaagcaggtgacgtggaggagaatcccgggcctactagtatggactggatttggcgcatccttttccttgtcggcgctgctaccggcgcgcattccgggcccgaagtgcaactggttgaatccggtggcggcctggtgcaagcaggcggatctctcagacttagctgtgccgcctccggcagaaccttcacaatgggatggtttaggcaggctccagggaaagagagagagttcgtcgccgccatctctctgtctcccacactggcctactacgccgactctgtgaaaggccggttcaccatctccagagataatgccaagaacaccgtggtgctgcaaatgaactctctgaaacccgaggatacagccctgtactattgtgccgctgaccggaagtccgtgatgagcatcagacccgattactggggacagggcacacaagtcacagtgtcctctggatccggcggcggaggatctggcggaggcggatctgggggcggaggctctttcgaacaagttcagcttcaacagcctggcgctgagctggtcaaacctggcgcttctgtgaagatgagctgcaaagccagcggctacgccttcagcagctactggatcaactggatgaagcagaaacccggccagggactcgaatggatcggccaaatctatcccggcgacggcgacaccaactacaacggcaagttcaagggcagagccacactgaccgccgatacctctagcagcacagcctacatgcagctgagcagcctgaccagcgaagatagcgccgtgtacttctgtgcccggtccatcacaacagtcgtgggctgcgctatggactattggggccagggaacaagcgtgaccgtgtctagtacgcgtgcctctacaaagggaccctccgtgtttcctctggctcccagcagcaagtctacaagcggaggaacagccgctctgggctgcctggtcaaggattactttcccgagcctgtgaccgtgtcctggaatagcggagcactgacaagcggcgtgcacacctttccagccgtgctgcaaagcagcggcctgtactctctgagcagcgtggtcacagtgcctagctctagcctgggcacccagacctacatctgcaatgtgaaccacaagcctagcaacaccaaggtggacaagagagtggaacccaagagctgtggtacccaggcacagtctgactgtagctgctccacagttagccctggcgttctggctggcatcgttatgggcgacctcgtcctgactgtcctgatcgctctggcagtgtattttctcggacggctggtcccaagaggaaggggagcagctgaagctgctacccggaagcagcggatcacagagactgagtctccataccaagaactccagggacagagatccgatgtgtactccgacctgaacacacagaggccctattataagcgcgccaagagaagcggatctggcgtgaagcagaccctgaatttcgacctgctgaagctggctggcgacgtggaatccaacccaggcccttctagaggccatatgaccgagtacaagcccacggtgcgcctcgccacccgcgacgacgtccccagggccgtacgcaccctcgccgccgcgttcgccgactaccccgccacgcgccacaccgtcgatccggaccgccacatcgagcgggtcaccgagctgcaagaactcttcctcacgcgcgtcgggctcgacatcggcaaggtgtgggtcgcggacgacggcgccgcggtggcggtctggaccacgccggagagcgtcgaagcgggggcggtgttcgccgagatcggcccgcgcatggccgagttgagcggttcccggctggccgcgcagcaacagatggaaggcctcctggcgccgcaccggcccaaggagcccgcgtggttcctggccaccgtcggcgtctcgcccgaccaccagggcaagggtctgggcagcgccgtcgtgctccccggagtggaggcggccgagcgcgccggggtgcccgccttcctggagacctccgcgccccgcaacctccccttctacgagcggctcggcttcaccgtcaccgccgacgtcgaggtgcccgaaggaccgcgcacctggtgcatgacccgcaagcccggtgcctga

SEQ ID NO: 1932 - DNA, 2979 bp, Artificial Sequence
  Synthetic Polynucleotide
atggccttaccagtgaccgccttgctcctgccgctggccttgctgctccacgccgccaggccggaagtgcagctggttgaatctggcggaggactggttcaggctggcggatctctgagactgtcttgtgccgccagcggcagaacctttagcatgggctggtttagacaggcccctggcaaagagagagagttcgtcgccgccatcacatactctggcggcagcccttactacgccgactctgtgaagggcagattcaccatcagccgggacaacgccaagaacaccgtgtacctccagatgaacagcctgaagcctgaggacaccgccgtgtactactgcgccgccaatccaacatacggcagcgactggaacgccgagaattggggccagggaacccaagtgacagtgtctagcctcgagggacagcctaaggccaatcctaccgtgacactgttccctccaagcagcgaagaactccaggccaacaaggccacacttgtgtgcctgatctccgacttctaccctggggctgtgacagtggcttggaaggccgatggatctcctgtgaaagccggcgtggaaaccaccaagccatccaagcagagcaacaacaaatacgccgccagctcctacctgagcctgacacctgagcagtggaagtcccacagatcctacagctgccaagtgacccacgaaggcagcaccgtggaaaagacagtggcccctacagagtgcagcggatccatcggctggctgttgctccaggcccctcggtgggtgttcaaggaggaagaccctattcacctgaggtgtcacagctggaagaacactgctctgcataaggtcacatatttacagaatggcaaaggcaggaagtattttcatcataattctgacttctacattccaaaagccacactcaaagacagcggctcctacttctgcagggggcttgttgggagtaaaaatgtgtcttcagagactgtgaacatcaccatcactcaaggtttggcagtgtcaaccatctcatcattctttccacctggctaccaagtgtccttctgcctggtcatggtgctgctgttcgccgtggataccggcctgtacttcagcgtcaagaccaacatccggtccagcaccagagactggaaggaccacaagttcaagtggcggaaggaccctcaggacaagagggccaagcgatctggatctggagcaacaaacttctcactactcaaacaagcaggtgacgtggaggagaatcccgggcctactagtatggactggatttggcgcatccttttccttgtcggcgctgctaccggcgcgcattccgggcccgaagtgcaactggttgaatccggtggcggcctggtgcaagcaggcggatctctcagacttagctgtgccgcctccggcagaaccttcacaatgggatggtttaggcaggctccagggaaagagagagagttcgtcgccgccatctctctgtctcccacactggcctactacgccgactctgtgaaaggccggttcaccatctccagagataatgccaagaacaccgtggtgctgcaaatgaactctctgaaacccgaggatacagccctgtactattgtgccgctgaccggaagtccgtgatgagcatcagacccgattactggggacagggcacacaagtcacagtgtcctctacgcgtgcctctacaaagggaccctccgtgtttcctctggctcccagcagcaagtctacaagcggaggaacagccgctctgggctgcctggtcaaggattactttcccgagcctgtgaccgtgtcctggaatagcggagcactgacaagcggcgtgcacacctttccagccgtgctgcaaagcagcggcctgtactctctgagcagcgtggtcacagtgcctagctctagcctgggcacccagacctacatctgcaatgtgaaccacaagcctagcaacaccaaggtggacaagagagtggaacccaagagctgtggtacccaggcacagtctgactgtagctgctccacagttagccctggcgttctggctggcatcgttatgggcgacctcgtcctgactgtcctgatcgctctggcagtgtattttctcggacggctggtcccaagaggaaggggagcagctgaagctgctacccggaagcagcggatcacagagactgagtctccataccaagaactccagggacagagatccgatgtgtactccgacctgaacacacagaggccctattataagcgcgccaagagaagcggatctggcgtgaagcagaccctgaatttcgacctgctgaagctggctggcgacgtggaatccaacccaggcccttctagaggccatatgaccgagtacaagcccacggtgcgcctcgccacccgcgacgacgtccccagggccgtacgcaccctcgccgccgcgttcgccgactaccccgccacgcgccacaccgtcgatccggaccgccacatcgagcgggtcaccgagctgcaagaactcttcctcacgcgcgtcgggctcgacatcggcaaggtgtgggtcgcggacgacggcgccgcggtggcggtctggaccacgccggagagcgtcgaagcgggggcggtgttcgccgagatcggcccgcgcatggccgagttgagcggttcccggctggccgcgcagcaacagatggaaggcctcctggcgccgcaccggcccaaggagcccgcgtggttcctggccaccgtcggcgtctcgcccgaccaccagggcaagggtctgggcagcgccgtcgtgctccccggagtggaggcggccgagcgcgccggggtgcccgccttcctggagacctccgcgccccgcaacctccccttctacgagcggctcggcttcaccgtcaccgccgacgtcgaggtgcccgaaggaccgcgcacctggtgcatgacccgcaagcccggtgcctga

SEQ ID NO: 1933 - DNA, 3003 bp, Artificial Sequence
  Synthetic Polynucleotide
atggccttaccagtgaccgccttgctcctgccgctggccttgctgctccacgccgccaggccggacatccagatgacacagagccctagcagcctgtctgccagcgtgggagacagagtgaccatcacatgcaaggccagcgaccacatcaacaactggctggcctggtatcagcagaagcctggacaggcccctaagctgctgatctacggcgctaccacactggaaacaggcgtgcccagcagattttctggcagcggctctggcaccgactacaccctgacaatatccagcctccagcctgaggacttcgccacctactactgtcagcagagctggaacaccccttggacattcggccagggcaccaagctggaaatcaagagactcgaggacctgaagaacgtgttcccacctgaggtggccgtgttcgagcctagcgaggccgagatcagccacacccagaaagccaccctcgtgtgcctggctaccggcttctaccccgaccatgtggaactgtcttggtgggtcaacggcaaagaggtgcacagcggcgtgtctaccgacccccagccactgaaagaacagcccgccctgaacgacagccggtactgcctgagcagcagactgagagtgtccgccaccttctggcagaacccccggaaccacttcagatgccaggtgcagttctacggcctgagcgagaacgacgagtggacccaggacagagccaagcccgtgacccagatcgtgtctgccgaagcctggggcagagccgattgcggatccatcggctggctgttgctccaggcccctcggtgggtgttcaaggaggaagaccctattcacctgaggtgtcacagctggaagaacactgctctgcataaggtcacatatttacagaatggcaaaggcaggaagtattttcatcataattctgacttctacattccaaaagccacactcaaagacagcggctcctacttctgcagggggcttgttgggagtaaaaatgtgtcttcagagactgtgaacatcaccatcactcaaggtttggcagtgtcaaccatctcatcattctttccacctggctaccaagtgtccttctgcctggtcatggtgctgctgttcgccgtggataccggcctgtacttcagcgtcaagaccaacatccggtccagcaccagagactggaaggaccacaagttcaagtggcggaaggaccctcaggacaagagggccaagcgatctggatctggagcaacaaacttctcactactcaaacaagcaggtgacgtggaggagaatcccgggcctactagtatggactggatttggcgcatccttttccttgtcggcgctgctaccggcgcgcattccttcgaacaagttcagcttcaacagcctggcgctgagctggtcaaacctggcgcttctgtgaagatgagctgcaaagccagcggctacgccttcagcagctactggatcaactggatgaagcagaaacccggccagggactcgaatggatcggccaaatctatcccggcgacggcgacaccaactacaacggcaagttcaagggcagagccacactgaccgccgatacctctagcagcacagcctacatgcagctgagcagcctgaccagcgaagatagcgccgtgtacttctgtgcccggtccatcacaacagtcgtgggctgcgctatggactattggggccagggaacaagcgtgaccgtgtctagtacgcgtatccagaaccctgatcctgccgtgtaccagctgcgggatagcaagagcagcgacaagagcgtgtgtctgttcaccgacttcgacagccagaccaacgtgtcccagagcaaggactccgacgtgtacatcaccgataagaccgtgctggacatgcggagcatggacttcaagagcaactccgccgtggcctggtccaacaagtccgatttcgcctgcgccaacgccttcaacaacagcattatccccgaggacacattcttcccaagccccgagagcagctgcggtacccaggcacagtctgactgtagctgctccacagttagccctggcgttctggctggcatcgttatgggcgacctcgtcctgactgtcctgatcgctctggcagtgtattttctcggacggctggtcccaagaggaaggggagcagctgaagctgctacccggaagcagcggatcacagagactgagtctccataccaagaactccagggacagagatccgatgtgtactccgacctgaacacacagaggccctattataagcgcgccaagagaagcggatctggcgtgaagcagaccctgaatttcgacctgctgaagctggctggcgacgtggaatccaacccaggcccttctagaggccatatgaccgagtacaagcccacggtgcgcctcgccacccgcgacgacgtccccagggccgtacgcaccctcgccgccgcgttcgccgactaccccgccacgcgccacaccgtcgatccggaccgccacatcgagcgggtcaccgagctgcaagaactcttcctcacgcgcgtcgggctcgacatcggcaaggtgtgggtcgcggacgacggcgccgcggtggcggtctggaccacgccggagagcgtcgaagcgggggcggtgttcgccgagatcggcccgcgcatggccgagttgagcggttcccggctggccgcgcagcaacagatggaaggcctcctggcgccgcaccggcccaaggagcccgcgtggttcctggccaccgtcggcgtctcgcccgaccaccagggcaagggtctgggcagcgccgtcgtgctccccggagtggaggcggccgagcgcgccggggtgcccgccttcctggagacctccgcgccccgcaacctccccttctacgagcggctcggcttcaccgtcaccgccgacgtcgaggtgcccgaaggaccgcgcacctggtgcatgacccgcaagcccggtgcctga

SEQ ID NO: 1934 - DNA, 3414 bp, Artificial Sequence
  Synthetic Polynucleotide
atggccttaccagtgaccgccttgctcctgccgctggccttgctgctccacgccgccaggccggaagtgcagctggttgaatctggcggaggactggttcaggctggcggatctctgagactgtcttgtgccgccagcggcagaacctttagcatgggctggtttagacaggcccctggcaaagagagagagttcgtcgccgccatcacatactctggcggcagcccttactacgccgactctgtgaagggcagattcaccatcagccgggacaacgccaagaacaccgtgtacctccagatgaacagcctgaagcctgaggacaccgccgtgtactactgcgccgccaatccaacatacggcagcgactggaacgccgagaattggggccagggaacccaagtgacagtgtctagcggtaccggcggaggcggatctggcggcggaggtagcggtggcggaggatctgaattcgacatccagatgacacagagccctagcagcctgtctgccagcgtgggagacagagtgaccatcacatgcaaggccagcgaccacatcaacaactggctggcctggtatcagcagaagcctggacaggcccctaagctgctgatctacggcgctaccacactggaaacaggcgtgcccagcagattttctggcagcggctctggcaccgactacaccctgacaatatccagcctccagcctgaggacttcgccacctactactgtcagcagagctggaacaccccttggacattcggccagggcaccaagctggaaatcaagagactcgaggacctgaagaacgtgttcccacctgaggtggccgtgttcgagcctagcgaggccgagatcagccacacccagaaagccaccctcgtgtgcctggctaccggcttctaccccgaccatgtggaactgtcttggtgggtcaacggcaaagaggtgcacagcggcgtgtctaccgacccccagccactgaaagaacagcccgccctgaacgacagccggtactgcctgagcagcagactgagagtgtccgccaccttctggcagaacccccggaaccacttcagatgccaggtgcagttctacggcctgagcgagaacgacgagtggacccaggacagagccaagcccgtgacccagatcgtgtctgccgaagcctggggcagagccgattgcggatccatcggctggctgttgctccaggcccctcggtgggtgttcaaggaggaagaccctattcacctgaggtgtcacagctggaagaacactgctctgcataaggtcacatatttacagaatggcaaaggcaggaagtattttcatcataattctgacttctacattccaaaagccacactcaaagacagcggctcctacttctgcagggggcttgttgggagtaaaaatgtgtcttcagagactgtgaacatcaccatcactcaaggtttggcagtgtcaaccatctcatcattctttccacctggctaccaagtgtccttctgcctggtcatggtgctgctgttcgccgtggataccggcctgtacttcagcgtcaagaccaacatccggtccagcaccagagactggaaggaccacaagttcaagtggcggaaggaccctcaggacaagagggccaagcgatctggatctggagcaacaaacttctcactactcaaacaagcaggtgacgtggaggagaatcccgggcctactagtatggactggatttggcgcatccttttccttgtcggcgctgctaccggcgcgcattccttcgaacaagttcagcttcaacagcctggcgctgagctggtcaaacctggcgcttctgtgaagatgagctgcaaagccagcggctacgccttcagcagctactggatcaactggatgaagcagaaacccggccagggactcgaatggatcggccaaatctatcccggcgacggcgacaccaactacaacggcaagttcaagggcagagccacactgaccgccgatacctctagcagcacagcctacatgcagctgagcagcctgaccagcgaagatagcgccgtgtacttctgtgcccggtccatcacaacagtcgtgggctgcgctatggactattggggccagggaacaagcgtgaccgtgtctagtacgcgtatccagaaccctgatcctgccgtgtaccagctgcgggatagcaagagcagcgacaagagcgtgtgtctgttcaccgacttcgacagccagaccaacgtgtcccagagcaaggactccgacgtgtacatcaccgataagaccgtgctggacatgcggagcatggacttcaagagcaactccgccgtggcctggtccaacaagtccgatttcgcctgcgccaacgccttcaacaacagcattatccccgaggacacattcttcccaagccccgagagcagctgcggtacccaggcacagtctgactgtagctgctccacagttagccctggcgttctggctggcatcgttatgggcgacctcgtcctgactgtcctgatcgctctggcagtgtattttctcggacggctggtcccaagaggaaggggagcagctgaagctgctacccggaagcagcggatcacagagactgagtctccataccaagaactccagggacagagatccgatgtgtactccgacctgaacacacagaggccctattataagcgcgccaagagaagcggatctggcgtgaagcagaccctgaatttcgacctgctgaagctggctggcgacgtggaatccaacccaggcccttctagaggccatatgaccgagtacaagcccacggtgcgcctcgccacccgcgacgacgtccccagggccgtacgcaccctcgccgccgcgttcgccgactaccccgccacgcgccacaccgtcgatccggaccgccacatcgagcgggtcaccgagctgcaagaactcttcctcacgcgcgtcgggctcgacatcggcaaggtgtgggtcgcggacgacggcgccgcggtggcggtctggaccacgccggagagcgtcgaagcgggggcggtgttcgccgagatcggcccgcgcatggccgagttgagcggttcccggctggccgcgcagcaacagatggaaggcctcctggcgccgcaccggcccaaggagcccgcgtggttcctggccaccgtcggcgtctcgcccgaccaccagggcaagggtctgggcagcgccgtcgtgctccccggagtggaggcggccgagcgcgccggggtgcccgccttcctggagacctccgcgccccgcaacctccccttctacgagcggctcggcttcaccgtcaccgccgacgtcgaggtgcccgaaggaccgcgcacctggtgcatgacccgcaagcccggtgcctga

SEQ ID NO: 1935 - DNA, 3825 bp, Artificial Sequence
  Synthetic Polynucleotide
atggccttaccagtgaccgccttgctcctgccgctggccttgctgctccacgccgccaggccggaagtgcagctggttgaatctggcggaggactggttcaggctggcggatctctgagactgtcttgtgccgccagcggcagaacctttagcatgggctggtttagacaggcccctggcaaagagagagagttcgtcgccgccatcacatactctggcggcagcccttactacgccgactctgtgaagggcagattcaccatcagccgggacaacgccaagaacaccgtgtacctccagatgaacagcctgaagcctgaggacaccgccgtgtactactgcgccgccaatccaacatacggcagcgactggaacgccgagaattggggccagggaacccaagtgacagtgtctagcggtaccggcggaggcggatctggcggcggaggtagcggtggcggaggatctgaattcgacatccagatgacacagagccctagcagcctgtctgccagcgtgggagacagagtgaccatcacatgcaaggccagcgaccacatcaacaactggctggcctggtatcagcagaagcctggacaggcccctaagctgctgatctacggcgctaccacactggaaacaggcgtgcccagcagattttctggcagcggctctggcaccgactacaccctgacaatatccagcctccagcctgaggacttcgccacctactactgtcagcagagctggaacaccccttggacattcggccagggcaccaagctggaaatcaagagactcgaggacctgaagaacgtgttcccacctgaggtggccgtgttcgagcctagcgaggccgagatcagccacacccagaaagccaccctcgtgtgcctggctaccggcttctaccccgaccatgtggaactgtcttggtgggtcaacggcaaagaggtgcacagcggcgtgtctaccgacccccagccactgaaagaacagcccgccctgaacgacagccggtactgcctgagcagcagactgagagtgtccgccaccttctggcagaacccccggaaccacttcagatgccaggtgcagttctacggcctgagcgagaacgacgagtggacccaggacagagccaagcccgtgacccagatcgtgtctgccgaagcctggggcagagccgattgcggatccatcggctggctgttgctccaggcccctcggtgggtgttcaaggaggaagaccctattcacctgaggtgtcacagctggaagaacactgctctgcataaggtcacatatttacagaatggcaaaggcaggaagtattttcatcataattctgacttctacattccaaaagccacactcaaagacagcggctcctacttctgcagggggcttgttgggagtaaaaatgtgtcttcagagactgtgaacatcaccatcactcaaggtttggcagtgtcaaccatctcatcattctttccacctggctaccaagtgtccttctgcctggtcatggtgctgctgttcgccgtggataccggcctgtacttcagcgtcaagaccaacatccggtccagcaccagagactggaaggaccacaagttcaagtggcggaaggaccctcaggacaagagggccaagcgatctggatctggagcaacaaacttctcactactcaaacaagcaggtgacgtggaggagaatcccgggcctactagtatggactggatttggcgcatccttttccttgtcggcgctgctaccggcgcgcattccgggcccgaagtgcaactggttgaatccggtggcggcctggtgcaagcaggcggatctctcagacttagctgtgccgcctccggcagaaccttcacaatgggatggtttaggcaggctccagggaaagagagagagttcgtcgccgccatctctctgtctcccacactggcctactacgccgactctgtgaaaggccggttcaccatctccagagataatgccaagaacaccgtggtgctgcaaatgaactctctgaaacccgaggatacagccctgtactattgtgccgctgaccggaagtccgtgatgagcatcagacccgattactggggacagggcacacaagtcacagtgtcctctggatccggcggcggaggatctggcggaggcggatctgggggcggaggctctttcgaacaagttcagcttcaacagcctggcgctgagctggtcaaacctggcgcttctgtgaagatgagctgcaaagccagcggctacgccttcagcagctactggatcaactggatgaagcagaaacccggccagggactcgaatggatcggccaaatctatcccggcgacggcgacaccaactacaacggcaagttcaagggcagagccacactgaccgccgatacctctagcagcacagcctacatgcagctgagcagcctgaccagcgaagatagcgccgtgtacttctgtgcccggtccatcacaacagtcgtgggctgcgctatggactattggggccagggaacaagcgtgaccgtgtctagtacgcgtatccagaaccctgatcctgccgtgtaccagctgcgggatagcaagagcagcgacaagagcgtgtgtctgttcaccgacttcgacagccagaccaacgtgtcccagagcaaggactccgacgtgtacatcaccgataagaccgtgctggacatgcggagcatggacttcaagagcaactccgccgtggcctggtccaacaagtccgatttcgcctgcgccaacgccttcaacaacagcattatccccgaggacacattcttcccaagccccgagagcagctgcggtacccaggcacagtctgactgtagctgctccacagttagccctggcgttctggctggcatcgttatgggcgacctcgtcctgactgtcctgatcgctctggcagtgtattttctcggacggctggtcccaagaggaaggggagcagctgaagctgctacccggaagcagcggatcacagagactgagtctccataccaagaactccagggacagagatccgatgtgtactccgacctgaacacacagaggccctattataagcgcgccaagagaagcggatctggcgtgaagcagaccctgaatttcgacctgctgaagctggctggcgacgtggaatccaacccaggcccttctagaggccatatgaccgagtacaagcccacggtgcgcctcgccacccgcgacgacgtccccagggccgtacgcaccctcgccgccgcgttcgccgactaccccgccacgcgccacaccgtcgatccggaccgccacatcgagcgggtcaccgagctgcaagaactcttcctcacgcgcgtcgggctcgacatcggcaaggtgtgggtcgcggacgacggcgccgcggtggcggtctggaccacgccggagagcgtcgaagcgggggcggtgttcgccgagatcggcccgcgcatggccgagttgagcggttcccggctggccgcgcagcaacagatggaaggcctcctggcgccgcaccggcccaaggagcccgcgtggttcctggccaccgtcggcgtctcgcccgaccaccagggcaagggtctgggcagcgccgtcgtgctccccggagtggaggcggccgagcgcgccggggtgcccgccttcctggagacctccgcgccccgcaacctccccttctacgagcggctcggcttcaccgtcaccgccgacgtcgaggtgcccgaaggaccgcgcacctggtgcatgacccgcaagcccggtgcctga

SEQ ID NO: 1936 - DNA, 3024 bp, Artificial Sequence
  Synthetic Polynucleotide
atggccttaccagtgaccgccttgctcctgccgctggccttgctgctccacgccgccaggccggaagtgcagctggttgaatctggcggaggactggttcaggctggcggatctctgagactgtcttgtgccgccagcggcagaacctttagcatgggctggtttagacaggcccctggcaaagagagagagttcgtcgccgccatcacatactctggcggcagcccttactacgccgactctgtgaagggcagattcaccatcagccgggacaacgccaagaacaccgtgtacctccagatgaacagcctgaagcctgaggacaccgccgtgtactactgcgccgccaatccaacatacggcagcgactggaacgccgagaattggggccagggaacccaagtgacagtgtctagcctcgaggacctgaagaacgtgttcccacctgaggtggccgtgttcgagcctagcgaggccgagatcagccacacccagaaagccaccctcgtgtgcctggctaccggcttctaccccgaccatgtggaactgtcttggtgggtcaacggcaaagaggtgcacagcggcgtgtctaccgacccccagccactgaaagaacagcccgccctgaacgacagccggtactgcctgagcagcagactgagagtgtccgccaccttctggcagaacccccggaaccacttcagatgccaggtgcagttctacggcctgagcgagaacgacgagtggacccaggacagagccaagcccgtgacccagatcgtgtctgccgaagcctggggcagagccgattgcggatccatcggctggctgttgctccaggcccctcggtgggtgttcaaggaggaagaccctattcacctgaggtgtcacagctggaagaacactgctctgcataaggtcacatatttacagaatggcaaaggcaggaagtattttcatcataattctgacttctacattccaaaagccacactcaaagacagcggctcctacttctgcagggggcttgttgggagtaaaaatgtgtcttcagagactgtgaacatcaccatcactcaaggtttggcagtgtcaaccatctcatcattctttccacctggctaccaagtgtccttctgcctggtcatggtgctgctgttcgccgtggataccggcctgtacttcagcgtcaagaccaacatccggtccagcaccagagactggaaggaccacaagttcaagtggcggaaggaccctcaggacaagagggccaagcgatctggatctggagcaacaaacttctcactactcaaacaagcaggtgacgtggaggagaatcccgggcctactagtatggactggatttggcgcatccttttccttgtcggcgctgctaccggcgcgcattccgggcccgaagtgcaactggttgaatccggtggcggcctggtgcaagcaggcggatctctcagacttagctgtgccgcctccggcagaaccttcacaatgggatggtttaggcaggctccagggaaagagagagagttcgtcgccgccatctctctgtctcccacactggcctactacgccgactctgtgaaaggccggttcaccatctccagagataatgccaagaacaccgtggtgctgcaaatgaactctctgaaacccgaggatacagccctgtactattgtgccgctgaccggaagtccgtgatgagcatcagacccgattactggggacagggcacacaagtcacagtgtcctctacgcgtatccagaaccctgatcctgccgtgtaccagctgcgggatagcaagagcagcgacaagagcgtgtgtctgttcaccgacttcgacagccagaccaacgtgtcccagagcaaggactccgacgtgtacatcaccgataagaccgtgctggacatgcggagcatggacttcaagagcaactccgccgtggcctggtccaacaagtccgatttcgcctgcgccaacgccttcaacaacagcattatccccgaggacacattcttcccaagccccgagagcagctgcggtacccaggcacagtctgactgtagctgctccacagttagccctggcgttctggctggcatcgttatgggcgacctcgtcctgactgtcctgatcgctctggcagtgtattttctcggacggctggtcccaagaggaaggggagcagctgaagctgctacccggaagcagcggatcacagagactgagtctccataccaagaactccagggacagagatccgatgtgtactccgacctgaacacacagaggccctattataagcgcgccaagagaagcggatctggcgtgaagcagaccctgaatttcgacctgctgaagctggctggcgacgtggaatccaacccaggcccttctagaggccatatgaccgagtacaagcccacggtgcgcctcgccacccgcgacgacgtccccagggccgtacgcaccctcgccgccgcgttcgccgactaccccgccacgcgccacaccgtcgatccggaccgccacatcgagcgggtcaccgagctgcaagaactcttcctcacgcgcgtcgggctcgacatcggcaaggtgtgggtcgcggacgacggcgccgcggtggcggtctggaccacgccggagagcgtcgaagcgggggcggtgttcgccgagatcggcccgcgcatggccgagttgagcggttcccggctggccgcgcagcaacagatggaaggcctcctggcgccgcaccggcccaaggagcccgcgtggttcctggccaccgtcggcgtctcgcccgaccaccagggcaagggtctgggcagcgccgtcgtgctccccggagtggaggcggccgagcgcgccggggtgcccgccttcctggagacctccgcgccccgcaacctccccttctacgagcggctcggcttcaccgtcaccgccgacgtcgaggtgcccgaaggaccgcgcacctggtgcatgacccgcaagcccggtgcctga

SEQ ID NO: 1937 - DNA, 1635 bp, Artificial Sequence; identical to SEQ ID NO: 1664
  Synthetic Polynucleotide

SEQ ID NO: 1938 - DNA, 2130 bp, Artificial Sequence
  Synthetic Polynucleotide
atggccttaccagtgaccgccttgctcctgccgctggccttgctgctccacgccgccaggccggacatccagatgacacagagccctagcagcctgtctgccagcgtgggagacagagtgaccatcacatgcaaggccagcgaccacatcaacaactggctggcctggtatcagcagaagcctggacaggcccctaagctgctgatctacggcgctaccacactggaaacaggcgtgcccagcagattttctggcagcggctctggcaccgactacaccctgacaatatccagcctccagcctgaggacttcgccacctactactgtcagcagagctggaacaccccttggacattcggccagggcaccaagctggaaatcaagagactcgagcaggctcagagcgattgcagctgtagcacagtgtctccaggcgtgctggccggaattgtgatgggcgatctggtgctgacagtgctgattgccctggccgtgtacttcctgggtagactggtgcctagaggaagaggcgctgccgaagccgccacaagaaagcagagaatcaccgagacagagagcccctaccaagagctgcaaggccagagaagcgacgtgtacagcgacctgaatacccagcggccttactacaaaagggccaagcgatctggatctggagcaacaaacttctcactactcaaacaagcaggtgacgtggaggagaatcccgggcctactagtatggactggatttggcgcatccttttccttgtcggcgctgctaccggcgcgcattccttcgaacaagttcagcttcaacagcctggcgctgagctggtcaaacctggcgcttctgtgaagatgagctgcaaagccagcggctacgccttcagcagctactggatcaactggatgaagcagaaacccggccagggactcgaatggatcggccaaatctatcccggcgacggcgacaccaactacaacggcaagttcaagggcagagccacactgaccgccgatacctctagcagcacagcctacatgcagctgagcagcctgaccagcgaagatagcgccgtgtacttctgtgcccggtccatcacaacagtcgtgggctgcgctatggactattggggccagggaacaagcgtgaccgtgtctagtacgcgtcaggcacagtctgactgtagctgctccacagttagccctggcgttctggctggcatcgttatgggcgacctcgtcctgactgtcctgatcgctctggcagtgtattttctcggacggctggtcccaagaggaaggggagcagctgaagctgctacccggaagcagcggatcacagagactgagtctccataccaagaactccagggacagagatccgatgtgtactccgacctgaacacacagaggccctattataagcgcgccaagagaagcggatctggcgtgaagcagaccctgaatttcgacctgctgaagctggctggcgacgtggaatccaacccaggcccttctagaggccatatgaccgagtacaagcccacggtgcgcctcgccacccgcgacgacgtccccagggccgtacgcaccctcgccgccgcgttcgccgactaccccgccacgcgccacaccgtcgatccggaccgccacatcgagcgggtcaccgagctgcaagaactcttcctcacgcgcgtcgggctcgacatcggcaaggtgtgggtcgcggacgacggcgccgcggtggcggtctggaccacgccggagagcgtcgaagcgggggcggtgttcgccgagatcggcccgcgcatggccgagttgagcggttcccggctggccgcgcagcaacagatggaaggcctcctggcgccgcaccggcccaaggagcccgcgtggttcctggccaccgtcggcgtctcgcccgaccaccagggcaagggtctgggcagcgccgtcgtgctccccggagtggaggcggccgagcgcgccggggtgcccgccttcctggagacctccgcgccccgcaacctccccttctacgagcggctcggcttcaccgtcaccgccgacgtcgaggtgcccgaaggaccgcgcacctggtgcatgacccgcaagcccggtgcctga

SEQ ID NO: 1939 - DNA, 2292 bp, Artificial Sequence
  Synthetic Polynucleotide
atggccttaccagtgaccgccttgctcctgccgctggccttgctgctccacgccgccaggccggcatgcgaagtgcagctgcttgaaagtggcggcggactgattcagcctggcggatctctgagactgagctgtgccgccagcggcttcaccttttctagccacgccatgacctgggtccgacaggcacctggaaaagggcttgaatgggtgtccgccatcagcggctctggcgattacacacactacgccgacagcgtgaagggcagattcaccatcagcagagacaacagcaagaacaccgtgtacctccagatgaacagcctgagagccgaggacagcgccgtgtattattgcgccaaggatgaggatggcggcagcctgcttggacacagaggacaaggcaccctggtcaccgtttcttccggtaccggcggaggcggatctggcggcggaggtagcggtggcggaggatctgaattcggatctctcgagcaggctcagagcgattgcagctgtagcacagtgtctccaggcgtgctggccggaattgtgatgggcgatctggtgctgacagtgctgattgccctggccgtgtacttcctgggtagactggtgcctagaggaagaggcgctgccgaagccgccacaagaaagcagagaatcaccgagacagagagcccctaccaagagctgcaaggccagagaagcgacgtgtacagcgacctgaatacccagcggccttactacaaaagggccaagcgatctggatctggagcaacaaacttctcactactcaaacaagcaggtgacgtggaggagaatcccgggcctactagtgccaccatggactggatttggcgcatccttttccttgtcggcgctgctaccggcgcccattccgggcccgaagtgcagctggttgaatctggcggaggactggttcaggctggcggatctctgagactgtcttgtgccgccagcggcagaacctttagcatgggctggtttagacaggcccctggcaaagagagagagttcgtcgccgccatcacatactctggcggcagcccttactacgccgactctgtgaagggcagattcaccatcagccgggacaacgccaagaacaccgtgtacctccagatgaacagcctgaagcctgaggacaccgccgtgtactactgcgccgccaatccaacatacggcagcgactggaacgccgagaattggggccagggaacccaagtgacagtgtctagcggatccggcggcggaggatctggcggaggcggatctgggggcggaggctctttcgaaggcagcacgcgtcaggcacagtctgactgtagctgctccacagttagccctggcgttctggctggcatcgttatgggcgacctcgtcctgactgtcctgatcgctctggcagtgtattttctcggacggctggtcccaagaggaaggggagcagctgaagctgctacccggaagcagcggatcacagagactgagtctccataccaagaactccagggacagagatccgatgtgtactccgacctgaacacacagaggccctattataagcgcgccaagagaagcggatctggcgtgaagcagaccctgaatttcgacctgctgaagctggctggcgacgtggaatccaacccaggcccttctagaggccatatgaccgagtacaagcccacggtgcgcctcgccacccgcgacgacgtccccagggccgtacgcaccctcgccgccgcgttcgccgactaccccgccacgcgccacaccgtcgatccggaccgccacatcgagcgggtcaccgagctgcaagaactcttcctcacgcgcgtcgggctcgacatcggcaaggtgtgggtcgcggacgacggcgccgcggtggcggtctggaccacgccggagagcgtcgaagcgggggcggtgttcgccgagatcggcccgcgcatggccgagttgagcggttcccggctggccgcgcagcaacagatggaaggcctcctggcgccgcaccggcccaaggagcccgcgtggttcctggccaccgtcggcgtctcgcccgaccaccagggcaagggtctgggcagcgccgtcgtgctccccggagtggaggcggccgagcgcgccggggtgcccgccttcctggagacctccgcgccccgcaacctccccttctacgagcggctcggcttcaccgtcaccgccgacgtcgaggtgcccgaaggaccgcgcacctggtgcatgacccgcaagcccggtgcctga

SEQ ID NO: 1940 - DNA, 2742 bp, Artificial Sequence
  Synthetic Polynucleotide
atggccttaccagtgaccgccttgctcctgccgctggccttgctgctccacgccgccaggccggacatccagatgacacagagccctagcagcctgtctgccagcgtgggagacagagtgaccatcacatgcaaggccagcgaccacatcaacaactggctggcctggtatcagcagaagcctggacaggcccctaagctgctgatctacggcgctaccacactggaaacaggcgtgcccagcagattttctggcagcggctctggcaccgactacaccctgacaatatccagcctccagcctgaggacttcgccacctactactgtcagcagagctggaacaccccttggacattcggccagggcaccaagctggaaatcaagagactcgagggacagcctaaggccaatcctaccgtgacactgttccctccaagcagcgaagaactccaggccaacaaggccacacttgtgtgcctgatctccgacttctaccctggggctgtgacagtggcttggaaggccgatggatctcctgtgaaagccggcgtggaaaccaccaagccatccaagcagagcaacaacaaatacgccgccagctcctacctgagcctgacacctgagcagtggaagtcccacagatcctacagctgccaagtgacccacgaaggcagcaccgtggaaaagacagtggcccctacagagtgcagcggatcccaggctcagagcgattgcagctgtagcacagtgtctccaggcgtgctggccggaattgtgatgggcgatctggtgctgacagtgctgattgccctggccgtgtacttcctgggtagactggtgcctagaggaagaggcgctgccgaagccgccacaagaaagcagagaatcaccgagacagagagcccctaccaagagctgcaaggccagagaagcgacgtgtacagcgacctgaatacccagcggccttactacaaaagggccaagcgatctggatctggagcaacaaacttctcactactcaaacaagcaggtgacgtggaggagaatcccgggcctactagtatggactggatttggcgcatccttttccttgtcggcgctgctaccggcgcgcattccttcgaacaagttcagcttcaacagcctggcgctgagctggtcaaacctggcgcttctgtgaagatgagctgcaaagccagcggctacgccttcagcagctactggatcaactggatgaagcagaaacccggccagggactcgaatggatcggccaaatctatcccggcgacggcgacaccaactacaacggcaagttcaagggcagagccacactgaccgccgatacctctagcagcacagcctacatgcagctgagcagcctgaccagcgaagatagcgccgtgtacttctgtgcccggtccatcacaacagtcgtgggctgcgctatggactattggggccagggaacaagcgtgaccgtgtctagtacgcgtgcctctacaaagggaccctccgtgtttcctctggctcccagcagcaagtctacaagcggaggaacagccgctctgggctgcctggtcaaggattactttcccgagcctgtgaccgtgtcctggaatagcggagcactgacaagcggcgtgcacacctttccagccgtgctgcaaagcagcggcctgtactctctgagcagcgtggtcacagtgcctagctctagcctgggcacccagacctacatctgcaatgtgaaccacaagcctagcaacaccaaggtggacaagagagtggaacccaagagctgtggtacccaggcacagtctgactgtagctgctccacagttagccctggcgttctggctggcatcgttatgggcgacctcgtcctgactgtcctgatcgctctggcagtgtattttctcggacggctggtcccaagaggaaggggagcagctgaagctgctacccggaagcagcggatcacagagactgagtctccataccaagaactccagggacagagatccgatgtgtactccgacctgaacacacagaggccctattataagcgcgccaagagaagcggatctggcgtgaagcagaccctgaatttcgacctgctgaagctggctggcgacgtggaatccaacccaggcccttctagaggcgggatccacaccatggctacctacgaggtgctgtgcgaggtggcaagaaagctgggcaccgacgacagagaagtggtgctgttcctgctgaacgtgttcatccctcagcctacactggcccagctgatcggtgcactgagagccctgaaagaggaaggccggctgacctttcctctgctggccgaatgcctgttcagagccggaagaagggatctgctgcgggacctgctgcatctggaccccagatttctggaaagacacctggccggcaccatgagctacttcagcccttaccagctgaccgtgctgcacgttgacggcgaactgtgcgccagagatattcggagcctgatcttcctgagcaaggacaccatcggcagccggtctacccctcagacatttctgcactgggtgtactgcatggaaaacctggacctgctcggccccacagatgtggatgccctgatgtccatgctgagaagcctgagcagagtggacctccagagacaggtgcagacactgatgggactgcacctgagcggacctagccacagccagcactacagacacacccct

SEQ ID NO: 1941 - DNA, 2901 bp, Artificial Sequence
  Synthetic Polynucleotide
atggccttaccagtgaccgccttgctcctgccgctggccttgctgctccacgccgccaggccggacatccagatgacacagagccctagcagcctgtctgccagcgtgggagacagagtgaccatcacatgcaaggccagcgaccacatcaacaactggctggcctggtatcagcagaagcctggacaggcccctaagctgctgatctacggcgctaccacactggaaacaggcgtgcccagcagattttctggcagcggctctggcaccgactacaccctgacaatatccagcctccagcctgaggacttcgccacctactactgtcagcagagctggaacaccccttggacattcggccagggcaccaagctggaaatcaagagactcgagggacagcctaaggccaatcctaccgtgacactgttccctccaagcagcgaagaactccaggccaacaaggccacacttgtgtgcctgatctccgacttctaccctggggctgtgacagtggcttggaaggccgatggatctcctgtgaaagccggcgtggaaaccaccaagccatccaagcagagcaacaacaaatacgccgccagctcctacctgagcctgacacctgagcagtggaagtcccacagatcctacagctgccaagtgacccacgaaggcagcaccgtggaaaagacagtggcccctacagagtgcagcggatcccaggctcagagcgattgcagctgtagcacagtgtctccaggcgtgctggccggaattgtgatgggcgatctggtgctgacagtgctgattgccctggccgtgtacttcctgggtagactggtgcctagaggaagaggcgctgccgaagccgccacaagaaagcagagaatcaccgagacagagagcccctaccaagagctgcaaggccagagaagcgacgtgtacagcgacctgaatacccagcggccttactacaaaagggccaagcgatctggatctggagcaacaaacttctcactactcaaacaagcaggtgacgtggaggagaatcccgggcctactagtatggactggatttggcgcatccttttccttgtcggcgctgctaccggcgcgcattccttcgaacaagttcagcttcaacagcctggcgctgagctggtcaaacctggcgcttctgtgaagatgagctgcaaagccagcggctacgccttcagcagctactggatcaactggatgaagcagaaacccggccagggactcgaatggatcggccaaatctatcccggcgacggcgacaccaactacaacggcaagttcaagggcagagccacactgaccgccgatacctctagcagcacagcctacatgcagctgagcagcctgaccagcgaagatagcgccgtgtacttctgtgcccggtccatcacaacagtcgtgggctgcgctatggactattggggccagggaacaagcgtgaccgtgtctagtacgcgtgcctctacaaagggaccctccgtgtttcctctggctcccagcagcaagtctacaagcggaggaacagccgctctgggctgcctggtcaaggattactttcccgagcctgtgaccgtgtcctggaatagcggagcactgacaagcggcgtgcacacctttccagccgtgctgcaaagcagcggcctgtactctctgagcagcgtggtcacagtgcctagctctagcctgggcacccagacctacatctgcaatgtgaaccacaagcctagcaacaccaaggtggacaagagagtggaacccaagagctgtggtacccaggcacagtctgactgtagctgctccacagttagccctggcgttctggctggcatcgttatgggcgacctcgtcctgactgtcctgatcgctctggcagtgtattttctcggacggctggtcccaagaggaaggggagcagctgaagctgctacccggaagcagcggatcacagagactgagtctccataccaagaactccagggacagagatccgatgtgtactccgacctgaacacacagaggccctattataagcgcgccaagagaagcggatctggcgtgaagcagaccctgaatttcgacctgctgaagctggctggcgacgtggaatccaacccaggcccttctagaggcgggatccacaccatgtccgactccaaggaggtccctagccttccatttttgcgacacttgctcgaagagttggacagccatgaggacagcttgctgctgtttctgtgtcacgacgcggccccgggctgcacgacggtcacgcaagctttgtgctcgcttagccaacagcgcaagctgaccctcgcggctctggtcgagatgctctacgtgctgcagcgtatggatcttctcaagagccgcttcgggctcagcaaggagggggccgagcaattgctgggcacaagctttctcacgcgctaccgcaagctcatggtttgcgtgggtgaggagctcgactcgagcgagctacgcgctctacgcttgttcgcgtgcaacctgaatccgagcctgagcacggcgctttctgagagcagccgctttgtcgagcttgtactcgcgcttgaaaacgtaggactcgtctcgccatcgagtgtttccgtgcttgcggacatgttgcgcactcttcggcgcctcgatttgtgccagcagcttgttgagtacgaacaacaagagcaagccaggtaccgttactgttacgcggcctcgccctcattgccagttcgtacgttacgtcgggggcacggcgcgagtgaacacgagcagctgtgcatgcccgtgcaagaatcctctgacagccccgagctgctgcgcacgcccgtacaagaatcctccagcgacagccccgagcaaacgact

SEQ ID NO: 1942 - DNA, 2769 bp, Artificial Sequence
  Synthetic Polynucleotide
atggccttaccagtgaccgccttgctcctgccgctggccttgctgctccacgccgccaggccggacatccagatgacacagagccctagcagcctgtctgccagcgtgggagacagagtgaccatcacatgcaaggccagcgaccacatcaacaactggctggcctggtatcagcagaagcctggacaggcccctaagctgctgatctacggcgctaccacactggaaacaggcgtgcccagcagattttctggcagcggctctggcaccgactacaccctgacaatatccagcctccagcctgaggacttcgccacctactactgtcagcagagctggaacaccccttggacattcggccagggcaccaagctggaaatcaagagactcgagggacagcctaaggccaatcctaccgtgacactgttccctccaagcagcgaagaactccaggccaacaaggccacacttgtgtgcctgatctccgacttctaccctggggctgtgacagtggcttggaaggccgatggatctcctgtgaaagccggcgtggaaaccaccaagccatccaagcagagcaacaacaaatacgccgccagctcctacctgagcctgacacctgagcagtggaagtcccacagatcctacagctgccaagtgacccacgaaggcagcaccgtggaaaagacagtggcccctacagagtgcagcggatcccaggctcagagcgattgcagctgtagcacagtgtctccaggcgtgctggccggaattgtgatgggcgatctggtgctgacagtgctgattgccctggccgtgtacttcctgggtagactggtgcctagaggaagaggcgctgccgaagccgccacaagaaagcagagaatcaccgagacagagagcccctaccaagagctgcaaggccagagaagcgacgtgtacagcgacctgaatacccagcggccttactacaaaagggccaagcgatctggatctggagcaacaaacttctcactactcaaacaagcaggtgacgtggaggagaatcccgggcctactagtatggactggatttggcgcatccttttccttgtcggcgctgctaccggcgcgcattccttcgaacaagttcagcttcaacagcctggcgctgagctggtcaaacctggcgcttctgtgaagatgagctgcaaagccagcggctacgccttcagcagctactggatcaactggatgaagcagaaacccggccagggactcgaatggatcggccaaatctatcccggcgacggcgacaccaactacaacggcaagttcaagggcagagccacactgaccgccgatacctctagcagcacagcctacatgcagctgagcagcctgaccagcgaagatagcgccgtgtacttctgtgcccggtccatcacaacagtcgtgggctgcgctatggactattggggccagggaacaagcgtgaccgtgtctagtacgcgtgcctctacaaagggaccctccgtgtttcctctggctcccagcagcaagtctacaagcggaggaacagccgctctgggctgcctggtcaaggattactttcccgagcctgtgaccgtgtcctggaatagcggagcactgacaagcggcgtgcacacctttccagccgtgctgcaaagcagcggcctgtactctctgagcagcgtggtcacagtgcctagctctagcctgggcacccagacctacatctgcaatgtgaaccacaagcctagcaacaccaaggtggacaagagagtggaacccaagagctgtggtacccaggcacagtctgactgtagctgctccacagttagccctggcgttctggctggcatcgttatgggcgacctcgtcctgactgtcctgatcgctctggcagtgtattttctcggacggctggtcccaagaggaaggggagcagctgaagctgctacccggaagcagcggatcacagagactgagtctccataccaagaactccagggacagagatccgatgtgtactccgacctgaacacacagaggccctattataagcgcgccaagagaagcggatctggcgtgaagcagaccctgaatttcgacctgctgaagctggctggcgacgtggaatccaacccaggcccttctagaggccatatgaccgagtacaagcccacggtgcgcctcgccacccgcgacgacgtccccagggccgtacgcaccctcgccgccgcgttcgccgactaccccgccacgcgccacaccgtcgatccggaccgccacatcgagcgggtcaccgagctgcaagaactcttcctcacgcgcgtcgggctcgacatcggcaaggtgtgggtcgcggacgacggcgccgcggtggcggtctggaccacgccggagagcgtcgaagcgggggcggtgttcgccgagatcggcccgcgcatggccgagttgagcggttcccggctggccgcgcagcaacagatggaaggcctcctggcgccgcaccggcccaaggagcccgcgtggttcctggccaccgtcggcgtctcgcccgaccaccagggcaagggtctgggcagcgccgtcgtgctccccggagtggaggcggccgagcgcgccggggtgcccgccttcctggagacctccgcgccccgcaacctccccttctacgagcggctcggcttcaccgtcaccgccgacgtcgaggtgcccgaaggaccgcgcacctggtgcatgacccgcaagcccggtgcctga

SEQ ID NO: 1943 - DNA, 3180 bp, Artificial Sequence
  Synthetic Polynucleotide
atggccttaccagtgaccgccttgctcctgccgctggccttgctgctccacgccgccaggccggaagtgcagctggttgaatctggcggaggactggttcaggctggcggatctctgagactgtcttgtgccgccagcggcagaacctttagcatgggctggtttagacaggcccctggcaaagagagagagttcgtcgccgccatcacatactctggcggcagcccttactacgccgactctgtgaagggcagattcaccatcagccgggacaacgccaagaacaccgtgtacctccagatgaacagcctgaagcctgaggacaccgccgtgtactactgcgccgccaatccaacatacggcagcgactggaacgccgagaattggggccagggaacccaagtgacagtgtctagcggtaccggcggaggcggatctggcggcggaggtagcggtggcggaggatctgaattcgacatccagatgacacagagccctagcagcctgtctgccagcgtgggagacagagtgaccatcacatgcaaggccagcgaccacatcaacaactggctggcctggtatcagcagaagcctggacaggcccctaagctgctgatctacggcgctaccacactggaaacaggcgtgcccagcagattttctggcagcggctctggcaccgactacaccctgacaatatccagcctccagcctgaggacttcgccacctactactgtcagcagagctggaacaccccttggacattcggccagggcaccaagctggaaatcaagagactcgagggacagcctaaggccaatcctaccgtgacactgttccctccaagcagcgaagaactccaggccaacaaggccacacttgtgtgcctgatctccgacttctaccctggggctgtgacagtggcttggaaggccgatggatctcctgtgaaagccggcgtggaaaccaccaagccatccaagcagagcaacaacaaatacgccgccagctcctacctgagcctgacacctgagcagtggaagtcccacagatcctacagctgccaagtgacccacgaaggcagcaccgtggaaaagacagtggcccctacagagtgcagcggatcccaggctcagagcgattgcagctgtagcacagtgtctccaggcgtgctggccggaattgtgatgggcgatctggtgctgacagtgctgattgccctggccgtgtacttcctgggtagactggtgcctagaggaagaggcgctgccgaagccgccacaagaaagcagagaatcaccgagacagagagcccctaccaagagctgcaaggccagagaagcgacgtgtacagcgacctgaatacccagcggccttactacaaaagggccaagcgatctggatctggagcaacaaacttctcactactcaaacaagcaggtgacgtggaggagaatcccgggcctactagtatggactggatttggcgcatccttttccttgtcggcgctgctaccggcgcgcattccttcgaacaagttcagcttcaacagcctggcgctgagctggtcaaacctggcgcttctgtgaagatgagctgcaaagccagcggctacgccttcagcagctactggatcaactggatgaagcagaaacccggccagggactcgaatggatcggccaaatctatcccggcgacggcgacaccaactacaacggcaagttcaagggcagagccacactgaccgccgatacctctagcagcacagcctacatgcagctgagcagcctgaccagcgaagatagcgccgtgtacttctgtgcccggtccatcacaacagtcgtgggctgcgctatggactattggggccagggaacaagcgtgaccgtgtctagtacgcgtgcctctacaaagggaccctccgtgtttcctctggctcccagcagcaagtctacaagcggaggaacagccgctctgggctgcctggtcaaggattactttcccgagcctgtgaccgtgtcctggaatagcggagcactgacaagcggcgtgcacacctttccagccgtgctgcaaagcagcggcctgtactctctgagcagcgtggtcacagtgcctagctctagcctgggcacccagacctacatctgcaatgtgaaccacaagcctagcaacaccaaggtggacaagagagtggaacccaagagctgtggtacccaggcacagtctgactgtagctgctccacagttagccctggcgttctggctggcatcgttatgggcgacctcgtcctgactgtcctgatcgctctggcagtgtattttctcggacggctggtcccaagaggaaggggagcagctgaagctgctacccggaagcagcggatcacagagactgagtctccataccaagaactccagggacagagatccgatgtgtactccgacctgaacacacagaggccctattataagcgcgccaagagaagcggatctggcgtgaagcagaccctgaatttcgacctgctgaagctggctggcgacgtggaatccaacccaggcccttctagaggccatatgaccgagtacaagcccacggtgcgcctcgccacccgcgacgacgtccccagggccgtacgcaccctcgccgccgcgttcgccgactaccccgccacgcgccacaccgtcgatccggaccgccacatcgagcgggtcaccgagctgcaagaactcttcctcacgcgcgtcgggctcgacatcggcaaggtgtgggtcgcggacgacggcgccgcggtggcggtctggaccacgccggagagcgtcgaagcgggggcggtgttcgccgagatcggcccgcgcatggccgagttgagcggttcccggctggccgcgcagcaacagatggaaggcctcctggcgccgcaccggcccaaggagcccgcgtggttcctggccaccgtcggcgtctcgcccgaccaccagggcaagggtctgggcagcgccgtcgtgctccccggagtggaggcggccgagcgcgccggggtgcccgccttcctggagacctccgcgccccgcaacctccccttctacgagcggctcggcttcaccgtcaccgccgacgtcgaggtgcccgaaggaccgcgcacctggtgcatgacccgcaagcccggtgcctga

SEQ ID NO: 1944 - DNA, 3591 bp, Artificial Sequence
  Synthetic Polynucleotide
atggccttaccagtgaccgccttgctcctgccgctggccttgctgctccacgccgccaggccggaagtgcagctggttgaatctggcggaggactggttcaggctggcggatctctgagactgtcttgtgccgccagcggcagaacctttagcatgggctggtttagacaggcccctggcaaagagagagagttcgtcgccgccatcacatactctggcggcagcccttactacgccgactctgtgaagggcagattcaccatcagccgggacaacgccaagaacaccgtgtacctccagatgaacagcctgaagcctgaggacaccgccgtgtactactgcgccgccaatccaacatacggcagcgactggaacgccgagaattggggccagggaacccaagtgacagtgtctagcggtaccggcggaggcggatctggcggcggaggtagcggtggcggaggatctgaattcgacatccagatgacacagagccctagcagcctgtctgccagcgtgggagacagagtgaccatcacatgcaaggccagcgaccacatcaacaactggctggcctggtatcagcagaagcctggacaggcccctaagctgctgatctacggcgctaccacactggaaacaggcgtgcccagcagattttctggcagcggctctggcaccgactacaccctgacaatatccagcctccagcctgaggacttcgccacctactactgtcagcagagctggaacaccccttggacattcggccagggcaccaagctggaaatcaagagactcgagggacagcctaaggccaatcctaccgtgacactgttccctccaagcagcgaagaactccaggccaacaaggccacacttgtgtgcctgatctccgacttctaccctggggctgtgacagtggcttggaaggccgatggatctcctgtgaaagccggcgtggaaaccaccaagccatccaagcagagcaacaacaaatacgccgccagctcctacctgagcctgacacctgagcagtggaagtcccacagatcctacagctgccaagtgacccacgaaggcagcaccgtggaaaagacagtggcccctacagagtgcagcggatcccaggctcagagcgattgcagctgtagcacagtgtctccaggcgtgctggccggaattgtgatgggcgatctggtgctgacagtgctgattgccctggccgtgtacttcctgggtagactggtgcctagaggaagaggcgctgccgaagccgccacaagaaagcagagaatcaccgagacagagagcccctaccaagagctgcaaggccagagaagcgacgtgtacagcgacctgaatacccagcggccttactacaaaagggccaagcgatctggatctggagcaacaaacttctcactactcaaacaagcaggtgacgtggaggagaatcccgggcctactagtatggactggatttggcgcatccttttccttgtcggcgctgctaccggcgcgcattccgggcccgaagtgcaactggttgaatccggtggcggcctggtgcaagcaggcggatctctcagacttagctgtgccgcctccggcagaaccttcacaatgggatggtttaggcaggctccagggaaagagagagagttcgtcgccgccatctctctgtctcccacactggcctactacgccgactctgtgaaaggccggttcaccatctccagagataatgccaagaacaccgtggtgctgcaaatgaactctctgaaacccgaggatacagccctgtactattgtgccgctgaccggaagtccgtgatgagcatcagacccgattactggggacagggcacacaagtcacagtgtcctctggatccggcggcggaggatctggcggaggcggatctgggggcggaggctctttcgaacaagttcagcttcaacagcctggcgctgagctggtcaaacctggcgcttctgtgaagatgagctgcaaagccagcggctacgccttcagcagctactggatcaactggatgaagcagaaacccggccagggactcgaatggatcggccaaatctatcccggcgacggcgacaccaactacaacggcaagttcaagggcagagccacactgaccgccgatacctctagcagcacagcctacatgcagctgagcagcctgaccagcgaagatagcgccgtgtacttctgtgcccggtccatcacaacagtcgtgggctgcgctatggactattggggccagggaacaagcgtgaccgtgtctagtacgcgtgcctctacaaagggaccctccgtgtttcctctggctcccagcagcaagtctacaagcggaggaacagccgctctgggctgcctggtcaaggattactttcccgagcctgtgaccgtgtcctggaatagcggagcactgacaagcggcgtgcacacctttccagccgtgctgcaaagcagcggcctgtactctctgagcagcgtggtcacagtgcctagctctagcctgggcacccagacctacatctgcaatgtgaaccacaagcctagcaacaccaaggtggacaagagagtggaacccaagagctgtggtacccaggcacagtctgactgtagctgctccacagttagccctggcgttctggctggcatcgttatgggcgacctcgtcctgactgtcctgatcgctctggcagtgtattttctcggacggctggtcccaagaggaaggggagcagctgaagctgctacccggaagcagcggatcacagagactgagtctccataccaagaactccagggacagagatccgatgtgtactccgacctgaacacacagaggccctattataagcgcgccaagagaagcggatctggcgtgaagcagaccctgaatttcgacctgctgaagctggctggcgacgtggaatccaacccaggcccttctagaggccatatgaccgagtacaagcccacggtgcgcctcgccacccgcgacgacgtccccagggccgtacgcaccctcgccgccgcgttcgccgactaccccgccacgcgccacaccgtcgatccggaccgccacatcgagcgggtcaccgagctgcaagaactcttcctcacgcgcgtcgggctcgacatcggcaaggtgtgggtcgcggacgacggcgccgcggtggcggtctggaccacgccggagagcgtcgaagcgggggcggtgttcgccgagatcggcccgcgcatggccgagttgagcggttcccggctggccgcgcagcaacagatggaaggcctcctggcgccgcaccggcccaaggagcccgcgtggttcctggccaccgtcggcgtctcgcccgaccaccagggcaagggtctgggcagcgccgtcgtgctccccggagtggaggcggccgagcgcgccggggtgcccgccttcctggagacctccgcgccccgcaacctccccttctacgagcggctcggcttcaccgtcaccgccgacgtcgaggtgcccgaaggaccgcgcacctggtgcatgacccgcaagcccggtgcctga

SEQ ID NO: 1945 - DNA, 2790 bp, Artificial Sequence
  Synthetic Polynucleotide
atggccttaccagtgaccgccttgctcctgccgctggccttgctgctccacgccgccaggccggaagtgcagctggttgaatctggcggaggactggttcaggctggcggatctctgagactgtcttgtgccgccagcggcagaacctttagcatgggctggtttagacaggcccctggcaaagagagagagttcgtcgccgccatcacatactctggcggcagcccttactacgccgactctgtgaagggcagattcaccatcagccgggacaacgccaagaacaccgtgtacctccagatgaacagcctgaagcctgaggacaccgccgtgtactactgcgccgccaatccaacatacggcagcgactggaacgccgagaattggggccagggaacccaagtgacagtgtctagcctcgagggacagcctaaggccaatcctaccgtgacactgttccctccaagcagcgaagaactccaggccaacaaggccacacttgtgtgcctgatctccgacttctaccctggggctgtgacagtggcttggaaggccgatggatctcctgtgaaagccggcgtggaaaccaccaagccatccaagcagagcaacaacaaatacgccgccagctcctacctgagcctgacacctgagcagtggaagtcccacagatcctacagctgccaagtgacccacgaaggcagcaccgtggaaaagacagtggcccctacagagtgcagcggatcccaggctcagagcgattgcagctgtagcacagtgtctccaggcgtgctggccggaattgtgatgggcgatctggtgctgacagtgctgattgccctggccgtgtacttcctgggtagactggtgcctagaggaagaggcgctgccgaagccgccacaagaaagcagagaatcaccgagacagagagcccctaccaagagctgcaaggccagagaagcgacgtgtacagcgacctgaatacccagcggccttactacaaaagggccaagcgatctggatctggagcaacaaacttctcactactcaaacaagcaggtgacgtggaggagaatcccgggcctactagtatggactggatttggcgcatccttttccttgtcggcgctgctaccggcgcgcattccgggcccgaagtgcaactggttgaatccggtggcggcctggtgcaagcaggcggatctctcagacttagctgtgccgcctccggcagaaccttcacaatgggatggtttaggcaggctccagggaaagagagagagttcgtcgccgccatctctctgtctcccacactggcctactacgccgactctgtgaaaggccggttcaccatctccagagataatgccaagaacaccgtggtgctgcaaatgaactctctgaaacccgaggatacagccctgtactattgtgccgctgaccggaagtccgtgatgagcatcagacccgattactggggacagggcacacaagtcacagtgtcctctacgcgtgcctctacaaagggaccctccgtgtttcctctggctcccagcagcaagtctacaagcggaggaacagccgctctgggctgcctggtcaaggattactttcccgagcctgtgaccgtgtcctggaatagcggagcactgacaagcggcgtgcacacctttccagccgtgctgcaaagcagcggcctgtactctctgagcagcgtggtcacagtgcctagctctagcctgggcacccagacctacatctgcaatgtgaaccacaagcctagcaacaccaaggtggacaagagagtggaacccaagagctgtggtacccaggcacagtctgactgtagctgctccacagttagccctggcgttctggctggcatcgttatgggcgacctcgtcctgactgtcctgatcgctctggcagtgtattttctcggacggctggtcccaagaggaaggggagcagctgaagctgctacccggaagcagcggatcacagagactgagtctccataccaagaactccagggacagagatccgatgtgtactccgacctgaacacacagaggccctattataagcgcgccaagagaagcggatctggcgtgaagcagaccctgaatttcgacctgctgaagctggctggcgacgtggaatccaacccaggcccttctagaggccatatgaccgagtacaagcccacggtgcgcctcgccacccgcgacgacgtccccagggccgtacgcaccctcgccgccgcgttcgccgactaccccgccacgcgccacaccgtcgatccggaccgccacatcgagcgggtcaccgagctgcaagaactcttcctcacgcgcgtcgggctcgacatcggcaaggtgtgggtcgcggacgacggcgccgcggtggcggtctggaccacgccggagagcgtcgaagcgggggcggtgttcgccgagatcggcccgcgcatggccgagttgagcggttcccggctggccgcgcagcaacagatggaaggcctcctggcgccgcaccggcccaaggagcccgcgtggttcctggccaccgtcggcgtctcgcccgaccaccagggcaagggtctgggcagcgccgtcgtgctccccggagtggaggcggccgagcgcgccggggtgcccgccttcctggagacctccgcgccccgcaacctccccttctacgagcggctcggcttcaccgtcaccgccgacgtcgaggtgcccgaaggaccgcgcacctggtgcatgacccgcaagcccggtgcctga

SEQ ID NO: 1946 - DNA, 2814 bp, Artificial Sequence
  Synthetic Polynucleotide
atggccttaccagtgaccgccttgctcctgccgctggccttgctgctccacgccgccaggccggacatccagatgacacagagccctagcagcctgtctgccagcgtgggagacagagtgaccatcacatgcaaggccagcgaccacatcaacaactggctggcctggtatcagcagaagcctggacaggcccctaagctgctgatctacggcgctaccacactggaaacaggcgtgcccagcagattttctggcagcggctctggcaccgactacaccctgacaatatccagcctccagcctgaggacttcgccacctactactgtcagcagagctggaacaccccttggacattcggccagggcaccaagctggaaatcaagagactcgaggacctgaagaacgtgttcccacctgaggtggccgtgttcgagcctagcgaggccgagatcagccacacccagaaagccaccctcgtgtgcctggctaccggcttctaccccgaccatgtggaactgtcttggtgggtcaacggcaaagaggtgcacagcggcgtgtctaccgacccccagccactgaaagaacagcccgccctgaacgacagccggtactgcctgagcagcagactgagagtgtccgccaccttctggcagaacccccggaaccacttcagatgccaggtgcagttctacggcctgagcgagaacgacgagtggacccaggacagagccaagcccgtgacccagatcgtgtctgccgaagcctggggcagagccgattgcggatcccaggctcagagcgattgcagctgtagcacagtgtctccaggcgtgctggccggaattgtgatgggcgatctggtgctgacagtgctgattgccctggccgtgtacttcctgggtagactggtgcctagaggaagaggcgctgccgaagccgccacaagaaagcagagaatcaccgagacagagagcccctaccaagagctgcaaggccagagaagcgacgtgtacagcgacctgaatacccagcggccttactacaaaagggccaagcgatctggatctggagcaacaaacttctcactactcaaacaagcaggtgacgtggaggagaatcccgggcctactagtatggactggatttggcgcatccttttccttgtcggcgctgctaccggcgcgcattccttcgaacaagttcagcttcaacagcctggcgctgagctggtcaaacctggcgcttctgtgaagatgagctgcaaagccagcggctacgccttcagcagctactggatcaactggatgaagcagaaacccggccagggactcgaatggatcggccaaatctatcccggcgacggcgacaccaactacaacggcaagttcaagggcagagccacactgaccgccgatacctctagcagcacagcctacatgcagctgagcagcctgaccagcgaagatagcgccgtgtacttctgtgcccggtccatcacaacagtcgtgggctgcgctatggactattggggccagggaacaagcgtgaccgtgtctagtacgcgtatccagaaccctgatcctgccgtgtaccagctgcgggatagcaagagcagcgacaagagcgtgtgtctgttcaccgacttcgacagccagaccaacgtgtcccagagcaaggactccgacgtgtacatcaccgataagaccgtgctggacatgcggagcatggacttcaagagcaactccgccgtggcctggtccaacaagtccgatttcgcctgcgccaacgccttcaacaacagcattatccccgaggacacattcttcccaagccccgagagcagctgcggtacccaggcacagtctgactgtagctgctccacagttagccctggcgttctggctggcatcgttatgggcgacctcgtcctgactgtcctgatcgctctggcagtgtattttctcggacggctggtcccaagaggaaggggagcagctgaagctgctacccggaagcagcggatcacagagactgagtctccataccaagaactccagggacagagatccgatgtgtactccgacctgaacacacagaggccctattataagcgcgccaagagaagcggatctggcgtgaagcagaccctgaatttcgacctgctgaagctggctggcgacgtggaatccaacccaggcccttctagaggccatatgaccgagtacaagcccacggtgcgcctcgccacccgcgacgacgtccccagggccgtacgcaccctcgccgccgcgttcgccgactaccccgccacgcgccacaccgtcgatccggaccgccacatcgagcgggtcaccgagctgcaagaactcttcctcacgcgcgtcgggctcgacatcggcaaggtgtgggtcgcggacgacggcgccgcggtggcggtctggaccacgccggagagcgtcgaagcgggggcggtgttcgccgagatcggcccgcgcatggccgagttgagcggttcccggctggccgcgcagcaacagatggaaggcctcctggcgccgcaccggcccaaggagcccgcgtggttcctggccaccgtcggcgtctcgcccgaccaccagggcaagggtctgggcagcgccgtcgtgctccccggagtggaggcggccgagcgcgccggggtgcccgccttcctggagacctccgcgccccgcaacctccccttctacgagcggctcggcttcaccgtcaccgccgacgtcgaggtgcccgaaggaccgcgcacctggtgcatgacccgcaagcccggtgcctga

SEQ ID NO: 1947 - DNA, 3225 bp, Artificial Sequence
  Synthetic Polynucleotide
atggccttaccagtgaccgccttgctcctgccgctggccttgctgctccacgccgccaggccggaagtgcagctggttgaatctggcggaggactggttcaggctggcggatctctgagactgtcttgtgccgccagcggcagaacctttagcatgggctggtttagacaggcccctggcaaagagagagagttcgtcgccgccatcacatactctggcggcagcccttactacgccgactctgtgaagggcagattcaccatcagccgggacaacgccaagaacaccgtgtacctccagatgaacagcctgaagcctgaggacaccgccgtgtactactgcgccgccaatccaacatacggcagcgactggaacgccgagaattggggccagggaacccaagtgacagtgtctagcggtaccggcggaggcggatctggcggcggaggtagcggtggcggaggatctgaattcgacatccagatgacacagagccctagcagcctgtctgccagcgtgggagacagagtgaccatcacatgcaaggccagcgaccacatcaacaactggctggcctggtatcagcagaagcctggacaggcccctaagctgctgatctacggcgctaccacactggaaacaggcgtgcccagcagattttctggcagcggctctggcaccgactacaccctgacaatatccagcctccagcctgaggacttcgccacctactactgtcagcagagctggaacaccccttggacattcggccagggcaccaagctggaaatcaagagactcgaggacctgaagaacgtgttcccacctgaggtggccgtgttcgagcctagcgaggccgagatcagccacacccagaaagccaccctcgtgtgcctggctaccggcttctaccccgaccatgtggaactgtcttggtgggtcaacggcaaagaggtgcacagcggcgtgtctaccgacccccagccactgaaagaacagcccgccctgaacgacagccggtactgcctgagcagcagactgagagtgtccgccaccttctggcagaacccccggaaccacttcagatgccaggtgcagttctacggcctgagcgagaacgacgagtggacccaggacagagccaagcccgtgacccagatcgtgtctgccgaagcctggggcagagccgattgcggatcccaggctcagagcgattgcagctgtagcacagtgtctccaggcgtgctggccggaattgtgatgggcgatctggtgctgacagtgctgattgccctggccgtgtacttcctgggtagactggtgcctagaggaagaggcgctgccgaagccgccacaagaaagcagagaatcaccgagacagagagcccctaccaagagctgcaaggccagagaagcgacgtgtacagcgacctgaatacccagcggccttactacaaaagggccaagcgatctggatctggagcaacaaacttctcactactcaaacaagcaggtgacgtggaggagaatcccgggcctactagtatggactggatttggcgcatccttttccttgtcggcgctgctaccggcgcgcattccttcgaacaagttcagcttcaacagcctggcgctgagctggtcaaacctggcgcttctgtgaagatgagctgcaaagccagcggctacgccttcagcagctactggatcaactggatgaagcagaaacccggccagggactcgaatggatcggccaaatctatcccggcgacggcgacaccaactacaacggcaagttcaagggcagagccacactgaccgccgatacctctagcagcacagcctacatgcagctgagcagcctgaccagcgaagatagcgccgtgtacttctgtgcccggtccatcacaacagtcgtgggctgcgctatggactattggggccagggaacaagcgtgaccgtgtctagtacgcgtatccagaaccctgatcctgccgtgtaccagctgcgggatagcaagagcagcgacaagagcgtgtgtctgttcaccgacttcgacagccagaccaacgtgtcccagagcaaggactccgacgtgtacatcaccgataagaccgtgctggacatgcggagcatggacttcaagagcaactccgccgtggcctggtccaacaagtccgatttcgcctgcgccaacgccttcaacaacagcattatccccgaggacacattcttcccaagccccgagagcagctgcggtacccaggcacagtctgactgtagctgctccacagttagccctggcgttctggctggcatcgttatgggcgacctcgtcctgactgtcctgatcgctctggcagtgtattttctcggacggctggtcccaagaggaaggggagcagctgaagctgctacccggaagcagcggatcacagagactgagtctccataccaagaactccagggacagagatccgatgtgtactccgacctgaacacacagaggccctattataagcgcgccaagagaagcggatctggcgtgaagcagaccctgaatttcgacctgctgaagctggctggcgacgtggaatccaacccaggcccttctagaggccatatgaccgagtacaagcccacggtgcgcctcgccacccgcgacgacgtccccagggccgtacgcaccctcgccgccgcgttcgccgactaccccgccacgcgccacaccgtcgatccggaccgccacatcgagcgggtcaccgagctgcaagaactcttcctcacgcgcgtcgggctcgacatcggcaaggtgtgggtcgcggacgacggcgccgcggtggcggtctggaccacgccggagagcgtcgaagcgggggcggtgttcgccgagatcggcccgcgcatggccgagttgagcggttcccggctggccgcgcagcaacagatggaaggcctcctggcgccgcaccggcccaaggagcccgcgtggttcctggccaccgtcggcgtctcgcccgaccaccagggcaagggtctgggcagcgccgtcgtgctccccggagtggaggcggccgagcgcgccggggtgcccgccttcctggagacctccgcgccccgcaacctccccttctacgagcggctcggcttcaccgtcaccgccgacgtcgaggtgcccgaaggaccgcgcacctggtgcatgacccgcaagcccggtgcctga

SEQ ID NO: 1948 - DNA, 3636 bp, Artificial Sequence
  Synthetic Polynucleotide
atggccttaccagtgaccgccttgctcctgccgctggccttgctgctccacgccgccaggccggaagtgcagctggttgaatctggcggaggactggttcaggctggcggatctctgagactgtcttgtgccgccagcggcagaacctttagcatgggctggtttagacaggcccctggcaaagagagagagttcgtcgccgccatcacatactctggcggcagcccttactacgccgactctgtgaagggcagattcaccatcagccgggacaacgccaagaacaccgtgtacctccagatgaacagcctgaagcctgaggacaccgccgtgtactactgcgccgccaatccaacatacggcagcgactggaacgccgagaattggggccagggaacccaagtgacagtgtctagcggtaccggcggaggcggatctggcggcggaggtagcggtggcggaggatctgaattcgacatccagatgacacagagccctagcagcctgtctgccagcgtgggagacagagtgaccatcacatgcaaggccagcgaccacatcaacaactggctggcctggtatcagcagaagcctggacaggcccctaagctgctgatctacggcgctaccacactggaaacaggcgtgcccagcagattttctggcagcggctctggcaccgactacaccctgacaatatccagcctccagcctgaggacttcgccacctactactgtcagcagagctggaacaccccttggacattcggccagggcaccaagctggaaatcaagagactcgaggacctgaagaacgtgttcccacctgaggtggccgtgttcgagcctagcgaggccgagatcagccacacccagaaagccaccctcgtgtgcctggctaccggcttctaccccgaccatgtggaactgtcttggtgggtcaacggcaaagaggtgcacagcggcgtgtctaccgacccccagccactgaaagaacagcccgccctgaacgacagccggtactgcctgagcagcagactgagagtgtccgccaccttctggcagaacccccggaaccacttcagatgccaggtgcagttctacggcctgagcgagaacgacgagtggacccaggacagagccaagcccgtgacccagatcgtgtctgccgaagcctggggcagagccgattgcggatcccaggctcagagcgattgcagctgtagcacagtgtctccaggcgtgctggccggaattgtgatgggcgatctggtgctgacagtgctgattgccctggccgtgtacttcctgggtagactggtgcctagaggaagaggcgctgccgaagccgccacaagaaagcagagaatcaccgagacagagagcccctaccaagagctgcaaggccagagaagcgacgtgtacagcgacctgaatacccagcggccttactacaaaagggccaagcgatctggatctggagcaacaaacttctcactactcaaacaagcaggtgacgtggaggagaatcccgggcctactagtatggactggatttggcgcatccttttccttgtcggcgctgctaccggcgcgcattccgggcccgaagtgcaactggttgaatccggtggcggcctggtgcaagcaggcggatctctcagacttagctgtgccgcctccggcagaaccttcacaatgggatggtttaggcaggctccagggaaagagagagagttcgtcgccgccatctctctgtctcccacactggcctactacgccgactctgtgaaaggccggttcaccatctccagagataatgccaagaacaccgtggtgctgcaaatgaactctctgaaacccgaggatacagccctgtactattgtgccgctgaccggaagtccgtgatgagcatcagacccgattactggggacagggcacacaagtcacagtgtcctctggatccggcggcggaggatctggcggaggcggatctgggggcggaggctctttcgaacaagttcagcttcaacagcctggcgctgagctggtcaaacctggcgcttctgtgaagatgagctgcaaagccagcggctacgccttcagcagctactggatcaactggatgaagcagaaacccggccagggactcgaatggatcggccaaatctatcccggcgacggcgacaccaactacaacggcaagttcaagggcagagccacactgaccgccgatacctctagcagcacagcctacatgcagctgagcagcctgaccagcgaagatagcgccgtgtacttctgtgcccggtccatcacaacagtcgtgggctgcgctatggactattggggccagggaacaagcgtgaccgtgtctagtacgcgtatccagaaccctgatcctgccgtgtaccagctgcgggatagcaagagcagcgacaagagcgtgtgtctgttcaccgacttcgacagccagaccaacgtgtcccagagcaaggactccgacgtgtacatcaccgataagaccgtgctggacatgcggagcatggacttcaagagcaactccgccgtggcctggtccaacaagtccgatttcgcctgcgccaacgccttcaacaacagcattatccccgaggacacattcttcccaagccccgagagcagctgcggtacccaggcacagtctgactgtagctgctccacagttagccctggcgttctggctggcatcgttatgggcgacctcgtcctgactgtcctgatcgctctggcagtgtattttctcggacggctggtcccaagaggaaggggagcagctgaagctgctacccggaagcagcggatcacagagactgagtctccataccaagaactccagggacagagatccgatgtgtactccgacctgaacacacagaggccctattataagcgcgccaagagaagcggatctggcgtgaagcagaccctgaatttcgacctgctgaagctggctggcgacgtggaatccaacccaggcccttctagaggccatatgaccgagtacaagcccacggtgcgcctcgccacccgcgacgacgtccccagggccgtacgcaccctcgccgccgcgttcgccgactaccccgccacgcgccacaccgtcgatccggaccgccacatcgagcgggtcaccgagctgcaagaactcttcctcacgcgcgtcgggctcgacatcggcaaggtgtgggtcgcggacgacggcgccgcggtggcggtctggaccacgccggagagcgtcgaagcgggggcggtgttcgccgagatcggcccgcgcatggccgagttgagcggttcccggctggccgcgcagcaacagatggaaggcctcctggcgccgcaccggcccaaggagcccgcgtggttcctggccaccgtcggcgtctcgcccgaccaccagggcaagggtctgggcagcgccgtcgtgctccccggagtggaggcggccgagcgcgccggggtgcccgccttcctggagacctccgcgccccgcaacctccccttctacgagcggctcggcttcaccgtcaccgccgacgtcgaggtgcccgaaggaccgcgcacctggtgcatgacccgcaagcccggtgcctga

SEQ ID NO: 1949 - DNA, 2835 bp, Artificial Sequence
  Synthetic Polynucleotide
atggccttaccagtgaccgccttgctcctgccgctggccttgctgctccacgccgccaggccggaagtgcagctggttgaatctggcggaggactggttcaggctggcggatctctgagactgtcttgtgccgccagcggcagaacctttagcatgggctggtttagacaggcccctggcaaagagagagagttcgtcgccgccatcacatactctggcggcagcccttactacgccgactctgtgaagggcagattcaccatcagccgggacaacgccaagaacaccgtgtacctccagatgaacagcctgaagcctgaggacaccgccgtgtactactgcgccgccaatccaacatacggcagcgactggaacgccgagaattggggccagggaacccaagtgacagtgtctagcctcgaggacctgaagaacgtgttcccacctgaggtggccgtgttcgagcctagcgaggccgagatcagccacacccagaaagccaccctcgtgtgcctggctaccggcttctaccccgaccatgtggaactgtcttggtgggtcaacggcaaagaggtgcacagcggcgtgtctaccgacccccagccactgaaagaacagcccgccctgaacgacagccggtactgcctgagcagcagactgagagtgtccgccaccttctggcagaacccccggaaccacttcagatgccaggtgcagttctacggcctgagcgagaacgacgagtggacccaggacagagccaagcccgtgacccagatcgtgtctgccgaagcctggggcagagccgattgcggatcccaggctcagagcgattgcagctgtagcacagtgtctccaggcgtgctggccggaattgtgatgggcgatctggtgctgacagtgctgattgccctggccgtgtacttcctgggtagactggtgcctagaggaagaggcgctgccgaagccgccacaagaaagcagagaatcaccgagacagagagcccctaccaagagctgcaaggccagagaagcgacgtgtacagcgacctgaatacccagcggccttactacaaaagggccaagcgatctggatctggagcaacaaacttctcactactcaaacaagcaggtgacgtggaggagaatcccgggcctactagtatggactggatttggcgcatccttttccttgtcggcgctgctaccggcgcgcattccgggcccgaagtgcaactggttgaatccggtggcggcctggtgcaagcaggcggatctctcagacttagctgtgccgcctccggcagaaccttcacaatgggatggtttaggcaggctccagggaaagagagagagttcgtcgccgccatctctctgtctcccacactggcctactacgccgactctgtgaaaggccggttcaccatctccagagataatgccaagaacaccgtggtgctgcaaatgaactctctgaaacccgaggatacagccctgtactattgtgccgctgaccggaagtccgtgatgagcatcagacccgattactggggacagggcacacaagtcacagtgtcctctacgcgtatccagaaccctgatcctgccgtgtaccagctgcgggatagcaagagcagcgacaagagcgtgtgtctgttcaccgacttcgacagccagaccaacgtgtcccagagcaaggactccgacgtgtacatcaccgataagaccgtgctggacatgcggagcatggacttcaagagcaactccgccgtggcctggtccaacaagtccgatttcgcctgcgccaacgccttcaacaacagcattatccccgaggacacattcttcccaagccccgagagcagctgcggtacccaggcacagtctgactgtagctgctccacagttagccctggcgttctggctggcatcgttatgggcgacctcgtcctgactgtcctgatcgctctggcagtgtattttctcggacggctggtcccaagaggaaggggagcagctgaagctgctacccggaagcagcggatcacagagactgagtctccataccaagaactccagggacagagatccgatgtgtactccgacctgaacacacagaggccctattataagcgcgccaagagaagcggatctggcgtgaagcagaccctgaatttcgacctgctgaagctggctggcgacgtggaatccaacccaggcccttctagaggccatatgaccgagtacaagcccacggtgcgcctcgccacccgcgacgacgtccccagggccgtacgcaccctcgccgccgcgttcgccgactaccccgccacgcgccacaccgtcgatccggaccgccacatcgagcgggtcaccgagctgcaagaactcttcctcacgcgcgtcgggctcgacatcggcaaggtgtgggtcgcggacgacggcgccgcggtggcggtctggaccacgccggagagcgtcgaagcgggggcggtgttcgccgagatcggcccgcgcatggccgagttgagcggttcccggctggccgcgcagcaacagatggaaggcctcctggcgccgcaccggcccaaggagcccgcgtggttcctggccaccgtcggcgtctcgcccgaccaccagggcaagggtctgggcagcgccgtcgtgctccccggagtggaggcggccgagcgcgccggggtgcccgccttcctggagacctccgcgccccgcaacctccccttctacgagcggctcggcttcaccgtcaccgccgacgtcgaggtgcccgaaggaccgcgcacctggtgcatgacccgcaagcccggtgcctga

SEQ ID NO: 1950 - DNA, 1446 bp, Artificial Sequence
  Synthetic Polynucleotide
atggccttaccagtgaccgccttgctcctgccgctggccttgctgctccacgccgccaggccggcatgcgaagtgcagctgcttgaaagtggcggcggactgattcagcctggcggatctctgagactgagctgtgccgccagcggcttcaccttttctagccacgccatgacctgggtccgacaggcacctggaaaagggcttgaatgggtgtccgccatcagcggctctggcgattacacacactacgccgacagcgtgaagggcagattcaccatcagcagagacaacagcaagaacaccgtgtacctccagatgaacagcctgagagccgaggacagcgccgtgtattattgcgccaaggatgaggatggcggcagcctgcttggacacagaggacaaggcaccctggtcaccgtttcttccggtaccggcggaggcggatctggcggcggaggtagcggtggcggaggatctgaattcggatctctcgagcaggctcagagcgattgcagctgtagcacagtgtctccaggcgtgctggccggaattgtgatgggcgatctggtgctgacagtgctgattgccctggccgtgtacttcctgggtagactggtgcctagaggaagaggcgctgccgaagccgccacaagaaagcagagaatcaccgagacagagagcccctaccaagagctgcaaggccagagaagcgacgtgtacagcgacctgaatacccagcggccttactacaaaagggccaagcgatctggatctggagcaacaaacttctcactactcaaacaagcaggtgacgtggaggagaatcccgggcctactagaggccatatgaccgagtacaagcccacggtgcgcctcgccacccgcgacgacgtccccagggccgtacgcaccctcgccgccgcgttcgccgactaccccgccacgcgccacaccgtcgatccggaccgccacatcgagcgggtcaccgagctgcaagaactcttcctcacgcgcgtcgggctcgacatcggcaaggtgtgggtcgcggacgacggcgccgcggtggcggtctggaccacgccggagagcgtcgaagcgggggcggtgttcgccgagatcggcccgcgcatggccgagttgagcggttcccggctggccgcgcagcaacagatggaaggcctcctggcgccgcaccggcccaaggagcccgcgtggttcctggccaccgtcggcgtctcgcccgaccaccagggcaagggtctgggcagcgccgtcgtgctccccggagtggaggcggccgagcgcgccggggtgcccgccttcctggagacctccgcgccccgcaacctccccttctacgagcggctcggcttcaccgtcaccgccgacgtcgaggtgcccgaaggaccgcgcacctggtgcatgacccgcaagcccggtgcctga

SEQ ID NO: 1951 - DNA, 2319 bp, Artificial Sequence
  Synthetic Polynucleotide
atggccttaccagtgaccgccttgctcctgccgctggccttgctgctccacgccgccaggccggacatccagatgacacagagccctagcagcctgtctgccagcgtgggagacagagtgaccatcacatgcaaggccagcgaccacatcaacaactggctggcctggtatcagcagaagcctggacaggcccctaagctgctgatctacggcgctaccacactggaaacaggcgtgcccagcagattttctggcagcggctctggcaccgactacaccctgacaatatccagcctccagcctgaggacttcgccacctactactgtcagcagagctggaacaccccttggacattcggccagggcaccaagctggaaatcaagagactcgagatcggctggctgttgctccaggcccctcggtgggtgttcaaggaggaagaccctattcacctgaggtgtcacagctggaagaacactgctctgcataaggtcacatatttacagaatggcaaaggcaggaagtattttcatcataattctgacttctacattccaaaagccacactcaaagacagcggctcctacttctgcagggggcttgttgggagtaaaaatgtgtcttcagagactgtgaacatcaccatcactcaaggtttggcagtgtcaaccatctcatcattctttccacctggctaccaagtgtccttctgcctggtcatggtgctgctgttcgccgtggataccggcctgtacttcagcgtcaagaccaacatccggtccagcaccagagactggaaggaccacaagttcaagtggcggaaggaccctcaggacaagagggccaagcgatctggatctggagcaacaaacttctcactactcaaacaagcaggtgacgtggaggagaatcccgggcctactagtatggactggatttggcgcatccttttccttgtcggcgctgctaccggcgcgcattccttcgaacaagttcagcttcaacagcctggcgctgagctggtcaaacctggcgcttctgtgaagatgagctgcaaagccagcggctacgccttcagcagctactggatcaactggatgaagcagaaacccggccagggactcgaatggatcggccaaatctatcccggcgacggcgacaccaactacaacggcaagttcaagggcagagccacactgaccgccgatacctctagcagcacagcctacatgcagctgagcagcctgaccagcgaagatagcgccgtgtacttctgtgcccggtccatcacaacagtcgtgggctgcgctatggactattggggccagggaacaagcgtgaccgtgtctagtacgcgtcaggcacagtctgactgtagcagctccacagttagccctggcgttctggctggcatcgttatgggcgacctcgtcctgactgtcctgatcgctctggcagtgtattttctcggacggctggtcccaagaggaaggggagcagctgaagctgctacccggaagcagcggatcacagagactgagtctccataccaagaactccagggacagagatccgatgtgtactccgacctgaacacacagaggccctattataagcgcgccaagagaagcggatctggcgtgaagcagaccctgaatttcgacctgctgaagctggctggcgacgtggaatccaacccaggcccttctagaggccatatgaccgagtacaagcccacggtgcgcctcgccacccgcgacgacgtccccagggccgtacgcaccctcgccgccgcgttcgccgactaccccgccacgcgccacaccgtcgatccggaccgccacatcgagcgggtcaccgagctgcaagaactcttcctcacgcgcgtcgggctcgacatcggcaaggtgtgggtcgcggacgacggcgccgcggtggcggtctggaccacgccggagagcgtcgaagcgggggcggtgttcgccgagatcggcccgcgcatggccgagttgagcggttcccggctggccgcgcagcaacagatggaaggcctcctggcgccgcaccggcccaaggagcccgcgtggttcctggccaccgtcggcgtctcgcccgaccaccagggcaagggtctgggcagcgccgtcgtgctccccggagtggaggcggccgagcgcgccggggtgcccgccttcctggagacctccgcgccccgcaacctccccttctacgagcggctcggcttcaccgtcaccgccgacgtcgaggtgcccgaaggaccgcgcacctggtgcatgacccgcaagcccggtgcctga

SEQ ID NO: 1952 - DNA, 2481 bp, Artificial Sequence
  Synthetic Polynucleotide
atggccttaccagtgaccgccttgctcctgccgctggccttgctgctccacgccgccaggccggcatgcgaagtgcagctgcttgaaagtggcggcggactgattcagcctggcggatctctgagactgagctgtgccgccagcggcttcaccttttctagccacgccatgacctgggtccgacaggcacctggaaaagggcttgaatgggtgtccgccatcagcggctctggcgattacacacactacgccgacagcgtgaagggcagattcaccatcagcagagacaacagcaagaacaccgtgtacctccagatgaacagcctgagagccgaggacagcgccgtgtattattgcgccaaggatgaggatggcggcagcctgcttggacacagaggacaaggcaccctggtcaccgtttcttccggtaccggcggaggcggatctggcggcggaggtagcggtggcggaggatctgaattcggatctctcgagatcggctggctgttgctccaggcccctcggtgggtgttcaaggaggaagaccctattcacctgaggtgtcacagctggaagaacactgctctgcataaggtcacatatttacagaatggcaaaggcaggaagtattttcatcataattctgacttctacattccaaaagccacactcaaagacagcggctcctacttctgcagggggcttgttgggagtaaaaatgtgtcttcagagactgtgaacatcaccatcactcaaggtttggcagtgtcaaccatctcatcattctttccacctggctaccaagtgtccttctgcctggtcatggtgctgctgttcgccgtggataccggcctgtacttcagcgtcaagaccaacatccggtccagcaccagagactggaaggaccacaagttcaagtggcggaaggaccctcaggacaagagggccaagcgatctggatctggagcaacaaacttctcactactcaaacaagcaggtgacgtggaggagaatcccgggcctactagtgccaccatggactggatttggcgcatccttttccttgtcggcgctgctaccggcgcccattccgggcccgaagtgcagctggttgaatctggcggaggactggttcaggctggcggatctctgagactgtcttgtgccgccagcggcagaacctttagcatgggctggtttagacaggcccctggcaaagagagagagttcgtcgccgccatcacatactctggcggcagcccttactacgccgactctgtgaagggcagattcaccatcagccgggacaacgccaagaacaccgtgtacctccagatgaacagcctgaagcctgaggacaccgccgtgtactactgcgccgccaatccaacatacggcagcgactggaacgccgagaattggggccagggaacccaagtgacagtgtctagcggatccggcggcggaggatctggcggaggcggatctgggggcggaggctctttcgaaggcagcacgcgtcaggcacagtctgactgtagcagctccacagttagccctggcgttctggctggcatcgttatgggcgacctcgtcctgactgtcctgatcgctctggcagtgtattttctcggacggctggtcccaagaggaaggggagcagctgaagctgctacccggaagcagcggatcacagagactgagtctccataccaagaactccagggacagagatccgatgtgtactccgacctgaacacacagaggccctattataagcgcgccaagagaagcggatctggcgtgaagcagaccctgaatttcgacctgctgaagctggctggcgacgtggaatccaacccaggcccttctagaggccatatgaccgagtacaagcccacggtgcgcctcgccacccgcgacgacgtccccagggccgtacgcaccctcgccgccgcgttcgccgactaccccgccacgcgccacaccgtcgatccggaccgccacatcgagcgggtcaccgagctgcaagaactcttcctcacgcgcgtcgggctcgacatcggcaaggtgtgggtcgcggacgacggcgccgcggtggcggtctggaccacgccggagagcgtcgaagcgggggcggtgttcgccgagatcggcccgcgcatggccgagttgagcggttcccggctggccgcgcagcaacagatggaaggcctcctggcgccgcaccggcccaaggagcccgcgtggttcctggccaccgtcggcgtctcgcccgaccaccagggcaagggtctgggcagcgccgtcgtgctccccggagtggaggcggccgagcgcgccggggtgcccgccttcctggagacctccgcgccccgcaacctccccttctacgagcggctcggcttcaccgtcaccgccgacgtcgaggtgcccgaaggaccgcgcacctggtgcatgacccgcaagcccggtgcctga

SEQ ID NO: 1953 - DNA, 2931 bp, Artificial Sequence
  Synthetic Polynucleotide
atggccttaccagtgaccgccttgctcctgccgctggccttgctgctccacgccgccaggccggacatccagatgacacagagccctagcagcctgtctgccagcgtgggagacagagtgaccatcacatgcaaggccagcgaccacatcaacaactggctggcctggtatcagcagaagcctggacaggcccctaagctgctgatctacggcgctaccacactggaaacaggcgtgcccagcagattttctggcagcggctctggcaccgactacaccctgacaatatccagcctccagcctgaggacttcgccacctactactgtcagcagagctggaacaccccttggacattcggccagggcaccaagctggaaatcaagagactcgagggacagcctaaggccaatcctaccgtgacactgttccctccaagcagcgaagaactccaggccaacaaggccacacttgtgtgcctgatctccgacttctaccctggggctgtgacagtggcttggaaggccgatggatctcctgtgaaagccggcgtggaaaccaccaagccatccaagcagagcaacaacaaatacgccgccagctcctacctgagcctgacacctgagcagtggaagtcccacagatcctacagctgccaagtgacccacgaaggcagcaccgtggaaaagacagtggcccctacagagtgcagcggatccatcggctggctgttgctccaggcccctcggtgggtgttcaaggaggaagaccctattcacctgaggtgtcacagctggaagaacactgctctgcataaggtcacatatttacagaatggcaaaggcaggaagtattttcatcataattctgacttctacattccaaaagccacactcaaagacagcggctcctacttctgcagggggcttgttgggagtaaaaatgtgtcttcagagactgtgaacatcaccatcactcaaggtttggcagtgtcaaccatctcatcattctttccacctggctaccaagtgtccttctgcctggtcatggtgctgctgttcgccgtggataccggcctgtacttcagcgtcaagaccaacatccggtccagcaccagagactggaaggaccacaagttcaagtggcggaaggaccctcaggacaagagggccaagcgatctggatctggagcaacaaacttctcactactcaaacaagcaggtgacgtggaggagaatcccgggcctactagtatggactggatttggcgcatccttttccttgtcggcgctgctaccggcgcgcattccttcgaacaagttcagcttcaacagcctggcgctgagctggtcaaacctggcgcttctgtgaagatgagctgcaaagccagcggctacgccttcagcagctactggatcaactggatgaagcagaaacccggccagggactcgaatggatcggccaaatctatcccggcgacggcgacaccaactacaacggcaagttcaagggcagagccacactgaccgccgatacctctagcagcacagcctacatgcagctgagcagcctgaccagcgaagatagcgccgtgtacttctgtgcccggtccatcacaacagtcgtgggctgcgctatggactattggggccagggaacaagcgtgaccgtgtctagtacgcgtgcctctacaaagggaccctccgtgtttcctctggctcccagcagcaagtctacaagcggaggaacagccgctctgggctgcctggtcaaggattactttcccgagcctgtgaccgtgtcctggaatagcggagcactgacaagcggcgtgcacacctttccagccgtgctgcaaagcagcggcctgtactctctgagcagcgtggtcacagtgcctagctctagcctgggcacccagacctacatctgcaatgtgaaccacaagcctagcaacaccaaggtggacaagagagtggaacccaagagctgtggtacccaggcacagtctgactgtagcagctccacagttagccctggcgttctggctggcatcgttatgggcgacctcgtcctgactgtcctgatcgctctggcagtgtattttctcggacggctggtcccaagaggaaggggagcagctgaagctgctacccggaagcagcggatcacagagactgagtctccataccaagaactccagggacagagatccgatgtgtactccgacctgaacacacagaggccctattataagcgcgccaagagaagcggatctggcgtgaagcagaccctgaatttcgacctgctgaagctggctggcgacgtggaatccaacccaggcccttctagaggcgggatccacaccatggctacctacgaggtgctgtgcgaggtggcaagaaagctgggcaccgacgacagagaagtggtgctgttcctgctgaacgtgttcatccctcagcctacactggcccagctgatcggtgcactgagagccctgaaagaggaaggccggctgacctttcctctgctggccgaatgcctgttcagagccggaagaagggatctgctgcgggacctgctgcatctggaccccagatttctggaaagacacctggccggcaccatgagctacttcagcccttaccagctgaccgtgctgcacgttgacggcgaactgtgcgccagagatattcggagcctgatcttcctgagcaaggacaccatcggcagccggtctacccctcagacatttctgcactgggtgtactgcatggaaaacctggacctgctcggccccacagatgtggatgccctgatgtccatgctgagaagcctgagcagagtggacctccagagacaggtgcagacactgatgggactgcacctgagcggacctagccacagccagcactacagacacacccct

SEQ ID NO: 1954 - DNA, 3090 bp, Artificial Sequence
  Synthetic Polynucleotide
atggccttaccagtgaccgccttgctcctgccgctggccttgctgctccacgccgccaggccggacatccagatgacacagagccctagcagcctgtctgccagcgtgggagacagagtgaccatcacatgcaaggccagcgaccacatcaacaactggctggcctggtatcagcagaagcctggacaggcccctaagctgctgatctacggcgctaccacactggaaacaggcgtgcccagcagattttctggcagcggctctggcaccgactacaccctgacaatatccagcctccagcctgaggacttcgccacctactactgtcagcagagctggaacaccccttggacattcggccagggcaccaagctggaaatcaagagactcgagggacagcctaaggccaatcctaccgtgacactgttccctccaagcagcgaagaactccaggccaacaaggccacacttgtgtgcctgatctccgacttctaccctggggctgtgacagtggcttggaaggccgatggatctcctgtgaaagccggcgtggaaaccaccaagccatccaagcagagcaacaacaaatacgccgccagctcctacctgagcctgacacctgagcagtggaagtcccacagatcctacagctgccaagtgacccacgaaggcagcaccgtggaaaagacagtggcccctacagagtgcagcggatccatcggctggctgttgctccaggcccctcggtgggtgttcaaggaggaagaccctattcacctgaggtgtcacagctggaagaacactgctctgcataaggtcacatatttacagaatggcaaaggcaggaagtattttcatcataattctgacttctacattccaaaagccacactcaaagacagcggctcctacttctgcagggggcttgttgggagtaaaaatgtgtcttcagagactgtgaacatcaccatcactcaaggtttggcagtgtcaaccatctcatcattctttccacctggctaccaagtgtccttctgcctggtcatggtgctgctgttcgccgtggataccggcctgtacttcagcgtcaagaccaacatccggtccagcaccagagactggaaggaccacaagttcaagtggcggaaggaccctcaggacaagagggccaagcgatctggatctggagcaacaaacttctcactactcaaacaagcaggtgacgtggaggagaatcccgggcctactagtatggactggatttggcgcatccttttccttgtcggcgctgctaccggcgcgcattccttcgaacaagttcagcttcaacagcctggcgctgagctggtcaaacctggcgcttctgtgaagatgagctgcaaagccagcggctacgccttcagcagctactggatcaactggatgaagcagaaacccggccagggactcgaatggatcggccaaatctatcccggcgacggcgacaccaactacaacggcaagttcaagggcagagccacactgaccgccgatacctctagcagcacagcctacatgcagctgagcagcctgaccagcgaagatagcgccgtgtacttctgtgcccggtccatcacaacagtcgtgggctgcgctatggactattggggccagggaacaagcgtgaccgtgtctagtacgcgtgcctctacaaagggaccctccgtgtttcctctggctcccagcagcaagtctacaagcggaggaacagccgctctgggctgcctggtcaaggattactttcccgagcctgtgaccgtgtcctggaatagcggagcactgacaagcggcgtgcacacctttccagccgtgctgcaaagcagcggcctgtactctctgagcagcgtggtcacagtgcctagctctagcctgggcacccagacctacatctgcaatgtgaaccacaagcctagcaacaccaaggtggacaagagagtggaacccaagagctgtggtacccaggcacagtctgactgtagcagctccacagttagccctggcgttctggctggcatcgttatgggcgacctcgtcctgactgtcctgatcgctctggcagtgtattttctcggacggctggtcccaagaggaaggggagcagctgaagctgctacccggaagcagcggatcacagagactgagtctccataccaagaactccagggacagagatccgatgtgtactccgacctgaacacacagaggccctattataagcgcgccaagagaagcggatctggcgtgaagcagaccctgaatttcgacctgctgaagctggctggcgacgtggaatccaacccaggcccttctagaggcgggatccacaccatgtccgactccaaggaggtccctagccttccatttttgcgacacttgctcgaagagttggacagccatgaggacagcttgctgctgtttctgtgtcacgacgcggccccgggctgcacgacggtcacgcaagctttgtgctcgcttagccaacagcgcaagctgaccctcgcggctctggtcgagatgctctacgtgctgcagcgtatggatcttctcaagagccgcttcgggctcagcaaggagggggccgagcaattgctgggcacaagctttctcacgcgctaccgcaagctcatggtttgcgtgggtgaggagctcgactcgagcgagctacgcgctctacgcttgttcgcgtgcaacctgaatccgagcctgagcacggcgctttctgagagcagccgctttgtcgagcttgtactcgcgcttgaaaacgtaggactcgtctcgccatcgagtgtttccgtgcttgcggacatgttgcgcactcttcggcgcctcgatttgtgccagcagcttgttgagtacgaacaacaagagcaagccaggtaccgttactgttacgcggcctcgccctcattgccagttcgtacgttacgtcgggggcacggcgcgagtgaacacgagcagctgtgcatgcccgtgcaagaatcctctgacagccccgagctgctgcgcacgcccgtacaagaatcctccagcgacagccccgagcaaacgact

SEQ ID NO: 1955 - DNA, 2958 bp, Artificial Sequence
  Synthetic Polynucleotide
atggccttaccagtgaccgccttgctcctgccgctggccttgctgctccacgccgccaggccggacatccagatgacacagagccctagcagcctgtctgccagcgtgggagacagagtgaccatcacatgcaaggccagcgaccacatcaacaactggctggcctggtatcagcagaagcctggacaggcccctaagctgctgatctacggcgctaccacactggaaacaggcgtgcccagcagattttctggcagcggctctggcaccgactacaccctgacaatatccagcctccagcctgaggacttcgccacctactactgtcagcagagctggaacaccccttggacattcggccagggcaccaagctggaaatcaagagactcgagggacagcctaaggccaatcctaccgtgacactgttccctccaagcagcgaagaactccaggccaacaaggccacacttgtgtgcctgatctccgacttctaccctggggctgtgacagtggcttggaaggccgatggatctcctgtgaaagccggcgtggaaaccaccaagccatccaagcagagcaacaacaaatacgccgccagctcctacctgagcctgacacctgagcagtggaagtcccacagatcctacagctgccaagtgacccacgaaggcagcaccgtggaaaagacagtggcccctacagagtgcagcggatccatcggctggctgttgctccaggcccctcggtgggtgttcaaggaggaagaccctattcacctgaggtgtcacagctggaagaacactgctctgcataaggtcacatatttacagaatggcaaaggcaggaagtattttcatcataattctgacttctacattccaaaagccacactcaaagacagcggctcctacttctgcagggggcttgttgggagtaaaaatgtgtcttcagagactgtgaacatcaccatcactcaaggtttggcagtgtcaaccatctcatcattctttccacctggctaccaagtgtccttctgcctggtcatggtgctgctgttcgccgtggataccggcctgtacttcagcgtcaagaccaacatccggtccagcaccagagactggaaggaccacaagttcaagtggcggaaggaccctcaggacaagagggccaagcgatctggatctggagcaacaaacttctcactactcaaacaagcaggtgacgtggaggagaatcccgggcctactagtatggactggatttggcgcatccttttccttgtcggcgctgctaccggcgcgcattccttcgaacaagttcagcttcaacagcctggcgctgagctggtcaaacctggcgcttctgtgaagatgagctgcaaagccagcggctacgccttcagcagctactggatcaactggatgaagcagaaacccggccagggactcgaatggatcggccaaatctatcccggcgacggcgacaccaactacaacggcaagttcaagggcagagccacactgaccgccgatacctctagcagcacagcctacatgcagctgagcagcctgaccagcgaagatagcgccgtgtacttctgtgcccggtccatcacaacagtcgtgggctgcgctatggactattggggccagggaacaagcgtgaccgtgtctagtacgcgtgcctctacaaagggaccctccgtgtttcctctggctcccagcagcaagtctacaagcggaggaacagccgctctgggctgcctggtcaaggattactttcccgagcctgtgaccgtgtcctggaatagcggagcactgacaagcggcgtgcacacctttccagccgtgctgcaaagcagcggcctgtactctctgagcagcgtggtcacagtgcctagctctagcctgggcacccagacctacatctgcaatgtgaaccacaagcctagcaacaccaaggtggacaagagagtggaacccaagagctgtggtacccaggcacagtctgactgtagcagctccacagttagccctggcgttctggctggcatcgttatgggcgacctcgtcctgactgtcctgatcgctctggcagtgtattttctcggacggctggtcccaagaggaaggggagcagctgaagctgctacccggaagcagcggatcacagagactgagtctccataccaagaactccagggacagagatccgatgtgtactccgacctgaacacacagaggccctattataagcgcgccaagagaagcggatctggcgtgaagcagaccctgaatttcgacctgctgaagctggctggcgacgtggaatccaacccaggcccttctagaggccatatgaccgagtacaagcccacggtgcgcctcgccacccgcgacgacgtccccagggccgtacgcaccctcgccgccgcgttcgccgactaccccgccacgcgccacaccgtcgatccggaccgccacatcgagcgggtcaccgagctgcaagaactcttcctcacgcgcgtcgggctcgacatcggcaaggtgtgggtcgcggacgacggcgccgcggtggcggtctggaccacgccggagagcgtcgaagcgggggcggtgttcgccgagatcggcccgcgcatggccgagttgagcggttcccggctggccgcgcagcaacagatggaaggcctcctggcgccgcaccggcccaaggagcccgcgtggttcctggccaccgtcggcgtctcgcccgaccaccagggcaagggtctgggcagcgccgtcgtgctccccggagtggaggcggccgagcgcgccggggtgcccgccttcctggagacctccgcgccccgcaacctccccttctacgagcggctcggcttcaccgtcaccgccgacgtcgaggtgcccgaaggaccgcgcacctggtgcatgacccgcaagcccggtgcctga

SEQ ID NO: 1956 - DNA, 3369 bp, Artificial Sequence
  Synthetic Polynucleotide
atggccttaccagtgaccgccttgctcctgccgctggccttgctgctccacgccgccaggccggaagtgcagctggttgaatctggcggaggactggttcaggctggcggatctctgagactgtcttgtgccgccagcggcagaacctttagcatgggctggtttagacaggcccctggcaaagagagagagttcgtcgccgccatcacatactctggcggcagcccttactacgccgactctgtgaagggcagattcaccatcagccgggacaacgccaagaacaccgtgtacctccagatgaacagcctgaagcctgaggacaccgccgtgtactactgcgccgccaatccaacatacggcagcgactggaacgccgagaattggggccagggaacccaagtgacagtgtctagcggtaccggcggaggcggatctggcggcggaggtagcggtggcggaggatctgaattcgacatccagatgacacagagccctagcagcctgtctgccagcgtgggagacagagtgaccatcacatgcaaggccagcgaccacatcaacaactggctggcctggtatcagcagaagcctggacaggcccctaagctgctgatctacggcgctaccacactggaaacaggcgtgcccagcagattttctggcagcggctctggcaccgactacaccctgacaatatccagcctccagcctgaggacttcgccacctactactgtcagcagagctggaacaccccttggacattcggccagggcaccaagctggaaatcaagagactcgagggacagcctaaggccaatcctaccgtgacactgttccctccaagcagcgaagaactccaggccaacaaggccacacttgtgtgcctgatctccgacttctaccctggggctgtgacagtggcttggaaggccgatggatctcctgtgaaagccggcgtggaaaccaccaagccatccaagcagagcaacaacaaatacgccgccagctcctacctgagcctgacacctgagcagtggaagtcccacagatcctacagctgccaagtgacccacgaaggcagcaccgtggaaaagacagtggcccctacagagtgcagcggatccatcggctggctgttgctccaggcccctcggtgggtgttcaaggaggaagaccctattcacctgaggtgtcacagctggaagaacactgctctgcataaggtcacatatttacagaatggcaaaggcaggaagtattttcatcataattctgacttctacattccaaaagccacactcaaagacagcggctcctacttctgcagggggcttgttgggagtaaaaatgtgtcttcagagactgtgaacatcaccatcactcaaggtttggcagtgtcaaccatctcatcattctttccacctggctaccaagtgtccttctgcctggtcatggtgctgctgttcgccgtggataccggcctgtacttcagcgtcaagaccaacatccggtccagcaccagagactggaaggaccacaagttcaagtggcggaaggaccctcaggacaagagggccaagcgatctggatctggagcaacaaacttctcactactcaaacaagcaggtgacgtggaggagaatcccgggcctactagtatggactggatttggcgcatccttttccttgtcggcgctgctaccggcgcgcattccttcgaacaagttcagcttcaacagcctggcgctgagctggtcaaacctggcgcttctgtgaagatgagctgcaaagccagcggctacgccttcagcagctactggatcaactggatgaagcagaaacccggccagggactcgaatggatcggccaaatctatcccggcgacggcgacaccaactacaacggcaagttcaagggcagagccacactgaccgccgatacctctagcagcacagcctacatgcagctgagcagcctgaccagcgaagatagcgccgtgtacttctgtgcccggtccatcacaacagtcgtgggctgcgctatggactattggggccagggaacaagcgtgaccgtgtctagtacgcgtgcctctacaaagggaccctccgtgtttcctctggctcccagcagcaagtctacaagcggaggaacagccgctctgggctgcctggtcaaggattactttcccgagcctgtgaccgtgtcctggaatagcggagcactgacaagcggcgtgcacacctttccagccgtgctgcaaagcagcggcctgtactctctgagcagcgtggtcacagtgcctagctctagcctgggcacccagacctacatctgcaatgtgaaccacaagcctagcaacaccaaggtggacaagagagtggaacccaagagctgtggtacccaggcacagtctgactgtagcagctccacagttagccctggcgttctggctggcatcgttatgggcgacctcgtcctgactgtcctgatcgctctggcagtgtattttctcggacggctggtcccaagaggaaggggagcagctgaagctgctacccggaagcagcggatcacagagactgagtctccataccaagaactccagggacagagatccgatgtgtactccgacctgaacacacagaggccctattataagcgcgccaagagaagcggatctggcgtgaagcagaccctgaatttcgacctgctgaagctggctggcgacgtggaatccaacccaggcccttctagaggccatatgaccgagtacaagcccacggtgcgcctcgccacccgcgacgacgtccccagggccgtacgcaccctcgccgccgcgttcgccgactaccccgccacgcgccacaccgtcgatccggaccgccacatcgagcgggtcaccgagctgcaagaactcttcctcacgcgcgtcgggctcgacatcggcaaggtgtgggtcgcggacgacggcgccgcggtggcggtctggaccacgccggagagcgtcgaagcgggggcggtgttcgccgagatcggcccgcgcatggccgagttgagcggttcccggctggccgcgcagcaacagatggaaggcctcctggcgccgcaccggcccaaggagcccgcgtggttcctggccaccgtcggcgtctcgcccgaccaccagggcaagggtctgggcagcgccgtcgtgctccccggagtggaggcggccgagcgcgccggggtgcccgccttcctggagacctccgcgccccgcaacctccccttctacgagcggctcggcttcaccgtcaccgccgacgtcgaggtgcccgaaggaccgcgcacctggtgcatgacccgcaagcccggtgcctga

SEQ ID NO: 1957 - DNA, 3780 bp, Artificial Sequence
  Synthetic Polynucleotide
atggccttaccagtgaccgccttgctcctgccgctggccttgctgctccacgccgccaggccggaagtgcagctggttgaatctggcggaggactggttcaggctggcggatctctgagactgtcttgtgccgccagcggcagaacctttagcatgggctggtttagacaggcccctggcaaagagagagagttcgtcgccgccatcacatactctggcggcagcccttactacgccgactctgtgaagggcagattcaccatcagccgggacaacgccaagaacaccgtgtacctccagatgaacagcctgaagcctgaggacaccgccgtgtactactgcgccgccaatccaacatacggcagcgactggaacgccgagaattggggccagggaacccaagtgacagtgtctagcggtaccggcggaggcggatctggcggcggaggtagcggtggcggaggatctgaattcgacatccagatgacacagagccctagcagcctgtctgccagcgtgggagacagagtgaccatcacatgcaaggccagcgaccacatcaacaactggctggcctggtatcagcagaagcctggacaggcccctaagctgctgatctacggcgctaccacactggaaacaggcgtgcccagcagattttctggcagcggctctggcaccgactacaccctgacaatatccagcctccagcctgaggacttcgccacctactactgtcagcagagctggaacaccccttggacattcggccagggcaccaagctggaaatcaagagactcgagggacagcctaaggccaatcctaccgtgacactgttccctccaagcagcgaagaactccaggccaacaaggccacacttgtgtgcctgatctccgacttctaccctggggctgtgacagtggcttggaaggccgatggatctcctgtgaaagccggcgtggaaaccaccaagccatccaagcagagcaacaacaaatacgccgccagctcctacctgagcctgacacctgagcagtggaagtcccacagatcctacagctgccaagtgacccacgaaggcagcaccgtggaaaagacagtggcccctacagagtgcagcggatccatcggctggctgttgctccaggcccctcggtgggtgttcaaggaggaagaccctattcacctgaggtgtcacagctggaagaacactgctctgcataaggtcacatatttacagaatggcaaaggcaggaagtattttcatcataattctgacttctacattccaaaagccacactcaaagacagcggctcctacttctgcagggggcttgttgggagtaaaaatgtgtcttcagagactgtgaacatcaccatcactcaaggtttggcagtgtcaaccatctcatcattctttccacctggctaccaagtgtccttctgcctggtcatggtgctgctgttcgccgtggataccggcctgtacttcagcgtcaagaccaacatccggtccagcaccagagactggaaggaccacaagttcaagtggcggaaggaccctcaggacaagagggccaagcgatctggatctggagcaacaaacttctcactactcaaacaagcaggtgacgtggaggagaatcccgggcctactagtatggactggatttggcgcatccttttccttgtcggcgctgctaccggcgcgcattccgggcccgaagtgcaactggttgaatccggtggcggcctggtgcaagcaggcggatctctcagacttagctgtgccgcctccggcagaaccttcacaatgggatggtttaggcaggctccagggaaagagagagagttcgtcgccgccatctctctgtctcccacactggcctactacgccgactctgtgaaaggccggttcaccatctccagagataatgccaagaacaccgtggtgctgcaaatgaactctctgaaacccgaggatacagccctgtactattgtgccgctgaccggaagtccgtgatgagcatcagacccgattactggggacagggcacacaagtcacagtgtcctctggatccggcggcggaggatctggcggaggcggatctgggggcggaggctctttcgaacaagttcagcttcaacagcctggcgctgagctggtcaaacctggcgcttctgtgaagatgagctgcaaagccagcggctacgccttcagcagctactggatcaactggatgaagcagaaacccggccagggactcgaatggatcggccaaatctatcccggcgacggcgacaccaactacaacggcaagttcaagggcagagccacactgaccgccgatacctctagcagcacagcctacatgcagctgagcagcctgaccagcgaagatagcgccgtgtacttctgtgcccggtccatcacaacagtcgtgggctgcgctatggactattggggccagggaacaagcgtgaccgtgtctagtacgcgtgcctctacaaagggaccctccgtgtttcctctggctcccagcagcaagtctacaagcggaggaacagccgctctgggctgcctggtcaaggattactttcccgagcctgtgaccgtgtcctggaatagcggagcactgacaagcggcgtgcacacctttccagccgtgctgcaaagcagcggcctgtactctctgagcagcgtggtcacagtgcctagctctagcctgggcacccagacctacatctgcaatgtgaaccacaagcctagcaacaccaaggtggacaagagagtggaacccaagagctgtggtacccaggcacagtctgactgtagcagctccacagttagccctggcgttctggctggcatcgttatgggcgacctcgtcctgactgtcctgatcgctctggcagtgtattttctcggacggctggtcccaagaggaaggggagcagctgaagctgctacccggaagcagcggatcacagagactgagtctccataccaagaactccagggacagagatccgatgtgtactccgacctgaacacacagaggccctattataagcgcgccaagagaagcggatctggcgtgaagcagaccctgaatttcgacctgctgaagctggctggcgacgtggaatccaacccaggcccttctagaggccatatgaccgagtacaagcccacggtgcgcctcgccacccgcgacgacgtccccagggccgtacgcaccctcgccgccgcgttcgccgactaccccgccacgcgccacaccgtcgatccggaccgccacatcgagcgggtcaccgagctgcaagaactcttcctcacgcgcgtcgggctcgacatcggcaaggtgtgggtcgcggacgacggcgccgcggtggcggtctggaccacgccggagagcgtcgaagcgggggcggtgttcgccgagatcggcccgcgcatggccgagttgagcggttcccggctggccgcgcagcaacagatggaaggcctcctggcgccgcaccggcccaaggagcccgcgtggttcctggccaccgtcggcgtctcgcccgaccaccagggcaagggtctgggcagcgccgtcgtgctccccggagtggaggcggccgagcgcgccggggtgcccgccttcctggagacctccgcgccccgcaacctccccttctacgagcggctcggcttcaccgtcaccgccgacgtcgaggtgcccgaaggaccgcgcacctggtgcatgacccgcaagcccggtgcctga

SEQ ID NO: 1958 - DNA, 2979 bp, Artificial Sequence
  Synthetic Polynucleotide
atggccttaccagtgaccgccttgctcctgccgctggccttgctgctccacgccgccaggccggaagtgcagctggttgaatctggcggaggactggttcaggctggcggatctctgagactgtcttgtgccgccagcggcagaacctttagcatgggctggtttagacaggcccctggcaaagagagagagttcgtcgccgccatcacatactctggcggcagcccttactacgccgactctgtgaagggcagattcaccatcagccgggacaacgccaagaacaccgtgtacctccagatgaacagcctgaagcctgaggacaccgccgtgtactactgcgccgccaatccaacatacggcagcgactggaacgccgagaattggggccagggaacccaagtgacagtgtctagcctcgagggacagcctaaggccaatcctaccgtgacactgttccctccaagcagcgaagaactccaggccaacaaggccacacttgtgtgcctgatctccgacttctaccctggggctgtgacagtggcttggaaggccgatggatctcctgtgaaagccggcgtggaaaccaccaagccatccaagcagagcaacaacaaatacgccgccagctcctacctgagcctgacacctgagcagtggaagtcccacagatcctacagctgccaagtgacccacgaaggcagcaccgtggaaaagacagtggcccctacagagtgcagcggatccatcggctggctgttgctccaggcccctcggtgggtgttcaaggaggaagaccctattcacctgaggtgtcacagctggaagaacactgctctgcataaggtcacatatttacagaatggcaaaggcaggaagtattttcatcataattctgacttctacattccaaaagccacactcaaagacagcggctcctacttctgcagggggcttgttgggagtaaaaatgtgtcttcagagactgtgaacatcaccatcactcaaggtttggcagtgtcaaccatctcatcattctttccacctggctaccaagtgtccttctgcctggtcatggtgctgctgttcgccgtggataccggcctgtacttcagcgtcaagaccaacatccggtccagcaccagagactggaaggaccacaagttcaagtggcggaaggaccctcaggacaagagggccaagcgatctggatctggagcaacaaacttctcactactcaaacaagcaggtgacgtggaggagaatcccgggcctactagtatggactggatttggcgcatccttttccttgtcggcgctgctaccggcgcgcattccgggcccgaagtgcaactggttgaatccggtggcggcctggtgcaagcaggcggatctctcagacttagctgtgccgcctccggcagaaccttcacaatgggatggtttaggcaggctccagggaaagagagagagttcgtcgccgccatctctctgtctcccacactggcctactacgccgactctgtgaaaggccggttcaccatctccagagataatgccaagaacaccgtggtgctgcaaatgaactctctgaaacccgaggatacagccctgtactattgtgccgctgaccggaagtccgtgatgagcatcagacccgattactggggacagggcacacaagtcacagtgtcctctacgcgtgcctctacaaagggaccctccgtgtttcctctggctcccagcagcaagtctacaagcggaggaacagccgctctgggctgcctggtcaaggattactttcccgagcctgtgaccgtgtcctggaatagcggagcactgacaagcggcgtgcacacctttccagccgtgctgcaaagcagcggcctgtactctctgagcagcgtggtcacagtgcctagctctagcctgggcacccagacctacatctgcaatgtgaaccacaagcctagcaacaccaaggtggacaagagagtggaacccaagagctgtggtacccaggcacagtctgactgtagcagctccacagttagccctggcgttctggctggcatcgttatgggcgacctcgtcctgactgtcctgatcgctctggcagtgtattttctcggacggctggtcccaagaggaaggggagcagctgaagctgctacccggaagcagcggatcacagagactgagtctccataccaagaactccagggacagagatccgatgtgtactccgacctgaacacacagaggccctattataagcgcgccaagagaagcggatctggcgtgaagcagaccctgaatttcgacctgctgaagctggctggcgacgtggaatccaacccaggcccttctagaggccatatgaccgagtacaagcccacggtgcgcctcgccacccgcgacgacgtccccagggccgtacgcaccctcgccgccgcgttcgccgactaccccgccacgcgccacaccgtcgatccggaccgccacatcgagcgggtcaccgagctgcaagaactcttcctcacgcgcgtcgggctcgacatcggcaaggtgtgggtcgcggacgacggcgccgcggtggcggtctggaccacgccggagagcgtcgaagcgggggcggtgttcgccgagatcggcccgcgcatggccgagttgagcggttcccggctggccgcgcagcaacagatggaaggcctcctggcgccgcaccggcccaaggagcccgcgtggttcctggccaccgtcggcgtctcgcccgaccaccagggcaagggtctgggcagcgccgtcgtgctccccggagtggaggcggccgagcgcgccggggtgcccgccttcctggagacctccgcgccccgcaacctccccttctacgagcggctcggcttcaccgtcaccgccgacgtcgaggtgcccgaaggaccgcgcacctggtgcatgacccgcaagcccggtgcctga

SEQ ID NO: 1959 - DNA, 3003 bp, Artificial Sequence
  Synthetic Polynucleotide
atggccttaccagtgaccgccttgctcctgccgctggccttgctgctccacgccgccaggccggacatccagatgacacagagccctagcagcctgtctgccagcgtgggagacagagtgaccatcacatgcaaggccagcgaccacatcaacaactggctggcctggtatcagcagaagcctggacaggcccctaagctgctgatctacggcgctaccacactggaaacaggcgtgcccagcagattttctggcagcggctctggcaccgactacaccctgacaatatccagcctccagcctgaggacttcgccacctactactgtcagcagagctggaacaccccttggacattcggccagggcaccaagctggaaatcaagagactcgaggacctgaagaacgtgttcccacctgaggtggccgtgttcgagcctagcgaggccgagatcagccacacccagaaagccaccctcgtgtgcctggctaccggcttctaccccgaccatgtggaactgtcttggtgggtcaacggcaaagaggtgcacagcggcgtgtctaccgacccccagccactgaaagaacagcccgccctgaacgacagccggtactgcctgagcagcagactgagagtgtccgccaccttctggcagaacccccggaaccacttcagatgccaggtgcagttctacggcctgagcgagaacgacgagtggacccaggacagagccaagcccgtgacccagatcgtgtctgccgaagcctggggcagagccgattgcggatccatcggctggctgttgctccaggcccctcggtgggtgttcaaggaggaagaccctattcacctgaggtgtcacagctggaagaacactgctctgcataaggtcacatatttacagaatggcaaaggcaggaagtattttcatcataattctgacttctacattccaaaagccacactcaaagacagcggctcctacttctgcagggggcttgttgggagtaaaaatgtgtcttcagagactgtgaacatcaccatcactcaaggtttggcagtgtcaaccatctcatcattctttccacctggctaccaagtgtccttctgcctggtcatggtgctgctgttcgccgtggataccggcctgtacttcagcgtcaagaccaacatccggtccagcaccagagactggaaggaccacaagttcaagtggcggaaggaccctcaggacaagagggccaagcgatctggatctggagcaacaaacttctcactactcaaacaagcaggtgacgtggaggagaatcccgggcctactagtatggactggatttggcgcatccttttccttgtcggcgctgctaccggcgcgcattccttcgaacaagttcagcttcaacagcctggcgctgagctggtcaaacctggcgcttctgtgaagatgagctgcaaagccagcggctacgccttcagcagctactggatcaactggatgaagcagaaacccggccagggactcgaatggatcggccaaatctatcccggcgacggcgacaccaactacaacggcaagttcaagggcagagccacactgaccgccgatacctctagcagcacagcctacatgcagctgagcagcctgaccagcgaagatagcgccgtgtacttctgtgcccggtccatcacaacagtcgtgggctgcgctatggactattggggccagggaacaagcgtgaccgtgtctagtacgcgtatccagaaccctgatcctgccgtgtaccagctgcgggatagcaagagcagcgacaagagcgtgtgtctgttcaccgacttcgacagccagaccaacgtgtcccagagcaaggactccgacgtgtacatcaccgataagaccgtgctggacatgcggagcatggacttcaagagcaactccgccgtggcctggtccaacaagtccgatttcgcctgcgccaacgccttcaacaacagcattatccccgaggacacattcttcccaagccccgagagcagctgcggtacccaggcacagtctgactgtagcagctccacagttagccctggcgttctggctggcatcgttatgggcgacctcgtcctgactgtcctgatcgctctggcagtgtattttctcggacggctggtcccaagaggaaggggagcagctgaagctgctacccggaagcagcggatcacagagactgagtctccataccaagaactccagggacagagatccgatgtgtactccgacctgaacacacagaggccctattataagcgcgccaagagaagcggatctggcgtgaagcagaccctgaatttcgacctgctgaagctggctggcgacgtggaatccaacccaggcccttctagaggccatatgaccgagtacaagcccacggtgcgcctcgccacccgcgacgacgtccccagggccgtacgcaccctcgccgccgcgttcgccgactaccccgccacgcgccacaccgtcgatccggaccgccacatcgagcgggtcaccgagctgcaagaactcttcctcacgcgcgtcgggctcgacatcggcaaggtgtgggtcgcggacgacggcgccgcggtggcggtctggaccacgccggagagcgtcgaagcgggggcggtgttcgccgagatcggcccgcgcatggccgagttgagcggttcccggctggccgcgcagcaacagatggaaggcctcctggcgccgcaccggcccaaggagcccgcgtggttcctggccaccgtcggcgtctcgcccgaccaccagggcaagggtctgggcagcgccgtcgtgctccccggagtggaggcggccgagcgcgccggggtgcccgccttcctggagacctccgcgccccgcaacctccccttctacgagcggctcggcttcaccgtcaccgccgacgtcgaggtgcccgaaggaccgcgcacctggtgcatgacccgcaagcccggtgcctga

SEQ ID NO: 1960 - DNA, 3414 bp, Artificial Sequence
  Synthetic Polynucleotide
atggccttaccagtgaccgccttgctcctgccgctggccttgctgctccacgccgccaggccggaagtgcagctggttgaatctggcggaggactggttcaggctggcggatctctgagactgtcttgtgccgccagcggcagaacctttagcatgggctggtttagacaggcccctggcaaagagagagagttcgtcgccgccatcacatactctggcggcagcccttactacgccgactctgtgaagggcagattcaccatcagccgggacaacgccaagaacaccgtgtacctccagatgaacagcctgaagcctgaggacaccgccgtgtactactgcgccgccaatccaacatacggcagcgactggaacgccgagaattggggccagggaacccaagtgacagtgtctagcggtaccggcggaggcggatctggcggcggaggtagcggtggcggaggatctgaattcgacatccagatgacacagagccctagcagcctgtctgccagcgtgggagacagagtgaccatcacatgcaaggccagcgaccacatcaacaactggctggcctggtatcagcagaagcctggacaggcccctaagctgctgatctacggcgctaccacactggaaacaggcgtgcccagcagattttctggcagcggctctggcaccgactacaccctgacaatatccagcctccagcctgaggacttcgccacctactactgtcagcagagctggaacaccccttggacattcggccagggcaccaagctggaaatcaagagactcgaggacctgaagaacgtgttcccacctgaggtggccgtgttcgagcctagcgaggccgagatcagccacacccagaaagccaccctcgtgtgcctggctaccggcttctaccccgaccatgtggaactgtcttggtgggtcaacggcaaagaggtgcacagcggcgtgtctaccgacccccagccactgaaagaacagcccgccctgaacgacagccggtactgcctgagcagcagactgagagtgtccgccaccttctggcagaacccccggaaccacttcagatgccaggtgcagttctacggcctgagcgagaacgacgagtggacccaggacagagccaagcccgtgacccagatcgtgtctgccgaagcctggggcagagccgattgcggatccatcggctggctgttgctccaggcccctcggtgggtgttcaaggaggaagaccctattcacctgaggtgtcacagctggaagaacactgctctgcataaggtcacatatttacagaatggcaaaggcaggaagtattttcatcataattctgacttctacattccaaaagccacactcaaagacagcggctcctacttctgcagggggcttgttgggagtaaaaatgtgtcttcagagactgtgaacatcaccatcactcaaggtttggcagtgtcaaccatctcatcattctttccacctggctaccaagtgtccttctgcctggtcatggtgctgctgttcgccgtggataccggcctgtacttcagcgtcaagaccaacatccggtccagcaccagagactggaaggaccacaagttcaagtggcggaaggaccctcaggacaagagggccaagcgatctggatctggagcaacaaacttctcactactcaaacaagcaggtgacgtggaggagaatcccgggcctactagtatggactggatttggcgcatccttttccttgtcggcgctgctaccggcgcgcattccttcgaacaagttcagcttcaacagcctggcgctgagctggtcaaacctggcgcttctgtgaagatgagctgcaaagccagcggctacgccttcagcagctactggatcaactggatgaagcagaaacccggccagggactcgaatggatcggccaaatctatcccggcgacggcgacaccaactacaacggcaagttcaagggcagagccacactgaccgccgatacctctagcagcacagcctacatgcagctgagcagcctgaccagcgaagatagcgccgtgtacttctgtgcccggtccatcacaacagtcgtgggctgcgctatggactattggggccagggaacaagcgtgaccgtgtctagtacgcgtatccagaaccctgatcctgccgtgtaccagctgcgggatagcaagagcagcgacaagagcgtgtgtctgttcaccgacttcgacagccagaccaacgtgtcccagagcaaggactccgacgtgtacatcaccgataagaccgtgctggacatgcggagcatggacttcaagagcaactccgccgtggcctggtccaacaagtccgatttcgcctgcgccaacgccttcaacaacagcattatccccgaggacacattcttcccaagccccgagagcagctgcggtacccaggcacagtctgactgtagcagctccacagttagccctggcgttctggctggcatcgttatgggcgacctcgtcctgactgtcctgatcgctctggcagtgtattttctcggacggctggtcccaagaggaaggggagcagctgaagctgctacccggaagcagcggatcacagagactgagtctccataccaagaactccagggacagagatccgatgtgtactccgacctgaacacacagaggccctattataagcgcgccaagagaagcggatctggcgtgaagcagaccctgaatttcgacctgctgaagctggctggcgacgtggaatccaacccaggcccttctagaggccatatgaccgagtacaagcccacggtgcgcctcgccacccgcgacgacgtccccagggccgtacgcaccctcgccgccgcgttcgccgactaccccgccacgcgccacaccgtcgatccggaccgccacatcgagcgggtcaccgagctgcaagaactcttcctcacgcgcgtcgggctcgacatcggcaaggtgtgggtcgcggacgacggcgccgcggtggcggtctggaccacgccggagagcgtcgaagcgggggcggtgttcgccgagatcggcccgcgcatggccgagttgagcggttcccggctggccgcgcagcaacagatggaaggcctcctggcgccgcaccggcccaaggagcccgcgtggttcctggccaccgtcggcgtctcgcccgaccaccagggcaagggtctgggcagcgccgtcgtgctccccggagtggaggcggccgagcgcgccggggtgcccgccttcctggagacctccgcgccccgcaacctccccttctacgagcggctcggcttcaccgtcaccgccgacgtcgaggtgcccgaaggaccgcgcacctggtgcatgacccgcaagcccggtgcctga

SEQ ID NO: 1961 - DNA, 3825 bp, Artificial Sequence
  Synthetic Polynucleotide
atggccttaccagtgaccgccttgctcctgccgctggccttgctgctccacgccgccaggccggaagtgcagctggttgaatctggcggaggactggttcaggctggcggatctctgagactgtcttgtgccgccagcggcagaacctttagcatgggctggtttagacaggcccctggcaaagagagagagttcgtcgccgccatcacatactctggcggcagcccttactacgccgactctgtgaagggcagattcaccatcagccgggacaacgccaagaacaccgtgtacctccagatgaacagcctgaagcctgaggacaccgccgtgtactactgcgccgccaatccaacatacggcagcgactggaacgccgagaattggggccagggaacccaagtgacagtgtctagcggtaccggcggaggcggatctggcggcggaggtagcggtggcggaggatctgaattcgacatccagatgacacagagccctagcagcctgtctgccagcgtgggagacagagtgaccatcacatgcaaggccagcgaccacatcaacaactggctggcctggtatcagcagaagcctggacaggcccctaagctgctgatctacggcgctaccacactggaaacaggcgtgcccagcagattttctggcagcggctctggcaccgactacaccctgacaatatccagcctccagcctgaggacttcgccacctactactgtcagcagagctggaacaccccttggacattcggccagggcaccaagctggaaatcaagagactcgaggacctgaagaacgtgttcccacctgaggtggccgtgttcgagcctagcgaggccgagatcagccacacccagaaagccaccctcgtgtgcctggctaccggcttctaccccgaccatgtggaactgtcttggtgggtcaacggcaaagaggtgcacagcggcgtgtctaccgacccccagccactgaaagaacagcccgccctgaacgacagccggtactgcctgagcagcagactgagagtgtccgccaccttctggcagaacccccggaaccacttcagatgccaggtgcagttctacggcctgagcgagaacgacgagtggacccaggacagagccaagcccgtgacccagatcgtgtctgccgaagcctggggcagagccgattgcggatccatcggctggctgttgctccaggcccctcggtgggtgttcaaggaggaagaccctattcacctgaggtgtcacagctggaagaacactgctctgcataaggtcacatatttacagaatggcaaaggcaggaagtattttcatcataattctgacttctacattccaaaagccacactcaaagacagcggctcctacttctgcagggggcttgttgggagtaaaaatgtgtcttcagagactgtgaacatcaccatcactcaaggtttggcagtgtcaaccatctcatcattctttccacctggctaccaagtgtccttctgcctggtcatggtgctgctgttcgccgtggataccggcctgtacttcagcgtcaagaccaacatccggtccagcaccagagactggaaggaccacaagttcaagtggcggaaggaccctcaggacaagagggccaagcgatctggatctggagcaacaaacttctcactactcaaacaagcaggtgacgtggaggagaatcccgggcctactagtatggactggatttggcgcatccttttccttgtcggcgctgctaccggcgcgcattccgggcccgaagtgcaactggttgaatccggtggcggcctggtgcaagcaggcggatctctcagacttagctgtgccgcctccggcagaaccttcacaatgggatggtttaggcaggctccagggaaagagagagagttcgtcgccgccatctctctgtctcccacactggcctactacgccgactctgtgaaaggccggttcaccatctccagagataatgccaagaacaccgtggtgctgcaaatgaactctctgaaacccgaggatacagccctgtactattgtgccgctgaccggaagtccgtgatgagcatcagacccgattactggggacagggcacacaagtcacagtgtcctctggatccggcggcggaggatctggcggaggcggatctgggggcggaggctctttcgaacaagttcagcttcaacagcctggcgctgagctggtcaaacctggcgcttctgtgaagatgagctgcaaagccagcggctacgccttcagcagctactggatcaactggatgaagcagaaacccggccagggactcgaatggatcggccaaatctatcccggcgacggcgacaccaactacaacggcaagttcaagggcagagccacactgaccgccgatacctctagcagcacagcctacatgcagctgagcagcctgaccagcgaagatagcgccgtgtacttctgtgcccggtccatcacaacagtcgtgggctgcgctatggactattggggccagggaacaagcgtgaccgtgtctagtacgcgtatccagaaccctgatcctgccgtgtaccagctgcgggatagcaagagcagcgacaagagcgtgtgtctgttcaccgacttcgacagccagaccaacgtgtcccagagcaaggactccgacgtgtacatcaccgataagaccgtgctggacatgcggagcatggacttcaagagcaactccgccgtggcctggtccaacaagtccgatttcgcctgcgccaacgccttcaacaacagcattatccccgaggacacattcttcccaagccccgagagcagctgcggtacccaggcacagtctgactgtagcagctccacagttagccctggcgttctggctggcatcgttatgggcgacctcgtcctgactgtcctgatcgctctggcagtgtattttctcggacggctggtcccaagaggaaggggagcagctgaagctgctacccggaagcagcggatcacagagactgagtctccataccaagaactccagggacagagatccgatgtgtactccgacctgaacacacagaggccctattataagcgcgccaagagaagcggatctggcgtgaagcagaccctgaatttcgacctgctgaagctggctggcgacgtggaatccaacccaggcccttctagaggccatatgaccgagtacaagcccacggtgcgcctcgccacccgcgacgacgtccccagggccgtacgcaccctcgccgccgcgttcgccgactaccccgccacgcgccacaccgtcgatccggaccgccacatcgagcgggtcaccgagctgcaagaactcttcctcacgcgcgtcgggctcgacatcggcaaggtgtgggtcgcggacgacggcgccgcggtggcggtctggaccacgccggagagcgtcgaagcgggggcggtgttcgccgagatcggcccgcgcatggccgagttgagcggttcccggctggccgcgcagcaacagatggaaggcctcctggcgccgcaccggcccaaggagcccgcgtggttcctggccaccgtcggcgtctcgcccgaccaccagggcaagggtctgggcagcgccgtcgtgctccccggagtggaggcggccgagcgcgccggggtgcccgccttcctggagacctccgcgccccgcaacctccccttctacgagcggctcggcttcaccgtcaccgccgacgtcgaggtgcccgaaggaccgcgcacctggtgcatgacccgcaagcccggtgcctga

SEQ ID NO: 1962 - DNA, 3024 bp, Artificial Sequence
  Synthetic Polynucleotide
atggccttaccagtgaccgccttgctcctgccgctggccttgctgctccacgccgccaggccggaagtgcagctggttgaatctggcggaggactggttcaggctggcggatctctgagactgtcttgtgccgccagcggcagaacctttagcatgggctggtttagacaggcccctggcaaagagagagagttcgtcgccgccatcacatactctggcggcagcccttactacgccgactctgtgaagggcagattcaccatcagccgggacaacgccaagaacaccgtgtacctccagatgaacagcctgaagcctgaggacaccgccgtgtactactgcgccgccaatccaacatacggcagcgactggaacgccgagaattggggccagggaacccaagtgacagtgtctagcctcgaggacctgaagaacgtgttcccacctgaggtggccgtgttcgagcctagcgaggccgagatcagccacacccagaaagccaccctcgtgtgcctggctaccggcttctaccccgaccatgtggaactgtcttggtgggtcaacggcaaagaggtgcacagcggcgtgtctaccgacccccagccactgaaagaacagcccgccctgaacgacagccggtactgcctgagcagcagactgagagtgtccgccaccttctggcagaacccccggaaccacttcagatgccaggtgcagttctacggcctgagcgagaacgacgagtggacccaggacagagccaagcccgtgacccagatcgtgtctgccgaagcctggggcagagccgattgcggatccatcggctggctgttgctccaggcccctcggtgggtgttcaaggaggaagaccctattcacctgaggtgtcacagctggaagaacactgctctgcataaggtcacatatttacagaatggcaaaggcaggaagtattttcatcataattctgacttctacattccaaaagccacactcaaagacagcggctcctacttctgcagggggcttgttgggagtaaaaatgtgtcttcagagactgtgaacatcaccatcactcaaggtttggcagtgtcaaccatctcatcattctttccacctggctaccaagtgtccttctgcctggtcatggtgctgctgttcgccgtggataccggcctgtacttcagcgtcaagaccaacatccggtccagcaccagagactggaaggaccacaagttcaagtggcggaaggaccctcaggacaagagggccaagcgatctggatctggagcaacaaacttctcactactcaaacaagcaggtgacgtggaggagaatcccgggcctactagtatggactggatttggcgcatccttttccttgtcggcgctgctaccggcgcgcattccgggcccgaagtgcaactggttgaatccggtggcggcctggtgcaagcaggcggatctctcagacttagctgtgccgcctccggcagaaccttcacaatgggatggtttaggcaggctccagggaaagagagagagttcgtcgccgccatctctctgtctcccacactggcctactacgccgactctgtgaaaggccggttcaccatctccagagataatgccaagaacaccgtggtgctgcaaatgaactctctgaaacccgaggatacagccctgtactattgtgccgctgaccggaagtccgtgatgagcatcagacccgattactggggacagggcacacaagtcacagtgtcctctacgcgtatccagaaccctgatcctgccgtgtaccagctgcgggatagcaagagcagcgacaagagcgtgtgtctgttcaccgacttcgacagccagaccaacgtgtcccagagcaaggactccgacgtgtacatcaccgataagaccgtgctggacatgcggagcatggacttcaagagcaactccgccgtggcctggtccaacaagtccgatttcgcctgcgccaacgccttcaacaacagcattatccccgaggacacattcttcccaagccccgagagcagctgcggtacccaggcacagtctgactgtagcagctccacagttagccctggcgttctggctggcatcgttatgggcgacctcgtcctgactgtcctgatcgctctggcagtgtattttctcggacggctggtcccaagaggaaggggagcagctgaagctgctacccggaagcagcggatcacagagactgagtctccataccaagaactccagggacagagatccgatgtgtactccgacctgaacacacagaggccctattataagcgcgccaagagaagcggatctggcgtgaagcagaccctgaatttcgacctgctgaagctggctggcgacgtggaatccaacccaggcccttctagaggccatatgaccgagtacaagcccacggtgcgcctcgccacccgcgacgacgtccccagggccgtacgcaccctcgccgccgcgttcgccgactaccccgccacgcgccacaccgtcgatccggaccgccacatcgagcgggtcaccgagctgcaagaactcttcctcacgcgcgtcgggctcgacatcggcaaggtgtgggtcgcggacgacggcgccgcggtggcggtctggaccacgccggagagcgtcgaagcgggggcggtgttcgccgagatcggcccgcgcatggccgagttgagcggttcccggctggccgcgcagcaacagatggaaggcctcctggcgccgcaccggcccaaggagcccgcgtggttcctggccaccgtcggcgtctcgcccgaccaccagggcaagggtctgggcagcgccgtcgtgctccccggagtggaggcggccgagcgcgccggggtgcccgccttcctggagacctccgcgccccgcaacctccccttctacgagcggctcggcttcaccgtcaccgccgacgtcgaggtgcccgaaggaccgcgcacctggtgcatgacccgcaagcccggtgcctga

SEQ ID NO: 1963 - DNA, 1635 bp, Artificial Sequence; identical to SEQ ID NO: 1664
  Synthetic Polynucleotide

SEQ ID NO: 1964 - DNA, 2130 bp, Artificial Sequence
  Synthetic Polynucleotide
atggccttaccagtgaccgccttgctcctgccgctggccttgctgctccacgccgccaggccggacatccagatgacacagagccctagcagcctgtctgccagcgtgggagacagagtgaccatcacatgcaaggccagcgaccacatcaacaactggctggcctggtatcagcagaagcctggacaggcccctaagctgctgatctacggcgctaccacactggaaacaggcgtgcccagcagattttctggcagcggctctggcaccgactacaccctgacaatatccagcctccagcctgaggacttcgccacctactactgtcagcagagctggaacaccccttggacattcggccagggcaccaagctggaaatcaagagactcgagcaggctcagagcgattgcagctctagcacagtgtctccaggcgtgctggccggaattgtgatgggcgatctggtgctgacagtgctgattgccctggccgtgtacttcctgggtagactggtgcctagaggaagaggcgctgccgaagccgccacaagaaagcagagaatcaccgagacagagagcccctaccaagagctgcaaggccagagaagcgacgtgtacagcgacctgaatacccagcggccttactacaaaagggccaagcgatctggatctggagcaacaaacttctcactactcaaacaagcaggtgacgtggaggagaatcccgggcctactagtatggactggatttggcgcatccttttccttgtcggcgctgctaccggcgcgcattccttcgaacaagttcagcttcaacagcctggcgctgagctggtcaaacctggcgcttctgtgaagatgagctgcaaagccagcggctacgccttcagcagctactggatcaactggatgaagcagaaacccggccagggactcgaatggatcggccaaatctatcccggcgacggcgacaccaactacaacggcaagttcaagggcagagccacactgaccgccgatacctctagcagcacagcctacatgcagctgagcagcctgaccagcgaagatagcgccgtgtacttctgtgcccggtccatcacaacagtcgtgggctgcgctatggactattggggccagggaacaagcgtgaccgtgtctagtacgcgtcaggcacagtctgactgtagcagctccacagttagccctggcgttctggctggcatcgttatgggcgacctcgtcctgactgtcctgatcgctctggcagtgtattttctcggacggctggtcccaagaggaaggggagcagctgaagctgctacccggaagcagcggatcacagagactgagtctccataccaagaactccagggacagagatccgatgtgtactccgacctgaacacacagaggccctattataagcgcgccaagagaagcggatctggcgtgaagcagaccctgaatttcgacctgctgaagctggctggcgacgtggaatccaacccaggcccttctagaggccatatgaccgagtacaagcccacggtgcgcctcgccacccgcgacgacgtccccagggccgtacgcaccctcgccgccgcgttcgccgactaccccgccacgcgccacaccgtcgatccggaccgccacatcgagcgggtcaccgagctgcaagaactcttcctcacgcgcgtcgggctcgacatcggcaaggtgtgggtcgcggacgacggcgccgcggtggcggtctggaccacgccggagagcgtcgaagcgggggcggtgttcgccgagatcggcccgcgcatggccgagttgagcggttcccggctggccgcgcagcaacagatggaaggcctcctggcgccgcaccggcccaaggagcccgcgtggttcctggccaccgtcggcgtctcgcccgaccaccagggcaagggtctgggcagcgccgtcgtgctccccggagtggaggcggccgagcgcgccggggtgcccgccttcctggagacctccgcgccccgcaacctccccttctacgagcggctcggcttcaccgtcaccgccgacgtcgaggtgcccgaaggaccgcgcacctggtgcatgacccgcaagcccggtgcctga

SEQ ID NO: 1965 - DNA, 2292 bp, Artificial Sequence
  Synthetic Polynucleotide
atggccttaccagtgaccgccttgctcctgccgctggccttgctgctccacgccgccaggccggcatgcgaagtgcagctgcttgaaagtggcggcggactgattcagcctggcggatctctgagactgagctgtgccgccagcggcttcaccttttctagccacgccatgacctgggtccgacaggcacctggaaaagggcttgaatgggtgtccgccatcagcggctctggcgattacacacactacgccgacagcgtgaagggcagattcaccatcagcagagacaacagcaagaacaccgtgtacctccagatgaacagcctgagagccgaggacagcgccgtgtattattgcgccaaggatgaggatggcggcagcctgcttggacacagaggacaaggcaccctggtcaccgtttcttccggtaccggcggaggcggatctggcggcggaggtagcggtggcggaggatctgaattcggatctctcgagcaggctcagagcgattgcagctctagcacagtgtctccaggcgtgctggccggaattgtgatgggcgatctggtgctgacagtgctgattgccctggccgtgtacttcctgggtagactggtgcctagaggaagaggcgctgccgaagccgccacaagaaagcagagaatcaccgagacagagagcccctaccaagagctgcaaggccagagaagcgacgtgtacagcgacctgaatacccagcggccttactacaaaagggccaagcgatctggatctggagcaacaaacttctcactactcaaacaagcaggtgacgtggaggagaatcccgggcctactagtgccaccatggactggatttggcgcatccttttccttgtcggcgctgctaccggcgcccattccgggcccgaagtgcagctggttgaatctggcggaggactggttcaggctggcggatctctgagactgtcttgtgccgccagcggcagaacctttagcatgggctggtttagacaggcccctggcaaagagagagagttcgtcgccgccatcacatactctggcggcagcccttactacgccgactctgtgaagggcagattcaccatcagccgggacaacgccaagaacaccgtgtacctccagatgaacagcctgaagcctgaggacaccgccgtgtactactgcgccgccaatccaacatacggcagcgactggaacgccgagaattggggccagggaacccaagtgacagtgtctagcggatccggcggcggaggatctggcggaggcggatctgggggcggaggctctttcgaaggcagcacgcgtcaggcacagtctgactgtagcagctccacagttagccctggcgttctggctggcatcgttatgggcgacctcgtcctgactgtcctgatcgctctggcagtgtattttctcggacggctggtcccaagaggaaggggagcagctgaagctgctacccggaagcagcggatcacagagactgagtctccataccaagaactccagggacagagatccgatgtgtactccgacctgaacacacagaggccctattataagcgcgccaagagaagcggatctggcgtgaagcagaccctgaatttcgacctgctgaagctggctggcgacgtggaatccaacccaggcccttctagaggccatatgaccgagtacaagcccacggtgcgcctcgccacccgcgacgacgtccccagggccgtacgcaccctcgccgccgcgttcgccgactaccccgccacgcgccacaccgtcgatccggaccgccacatcgagcgggtcaccgagctgcaagaactcttcctcacgcgcgtcgggctcgacatcggcaaggtgtgggtcgcggacgacggcgccgcggtggcggtctggaccacgccggagagcgtcgaagcgggggcggtgttcgccgagatcggcccgcgcatggccgagttgagcggttcccggctggccgcgcagcaacagatggaaggcctcctggcgccgcaccggcccaaggagcccgcgtggttcctggccaccgtcggcgtctcgcccgaccaccagggcaagggtctgggcagcgccgtcgtgctccccggagtggaggcggccgagcgcgccggggtgcccgccttcctggagacctccgcgccccgcaacctccccttctacgagcggctcggcttcaccgtcaccgccgacgtcgaggtgcccgaaggaccgcgcacctggtgcatgacccgcaagcccggtgcctga

SEQ ID NO: 1966 - DNA, 2742 bp, Artificial Sequence
  Synthetic Polynucleotide
atggccttaccagtgaccgccttgctcctgccgctggccttgctgctccacgccgccaggccggacatccagatgacacagagccctagcagcctgtctgccagcgtgggagacagagtgaccatcacatgcaaggccagcgaccacatcaacaactggctggcctggtatcagcagaagcctggacaggcccctaagctgctgatctacggcgctaccacactggaaacaggcgtgcccagcagattttctggcagcggctctggcaccgactacaccctgacaatatccagcctccagcctgaggacttcgccacctactactgtcagcagagctggaacaccccttggacattcggccagggcaccaagctggaaatcaagagactcgagggacagcctaaggccaatcctaccgtgacactgttccctccaagcagcgaagaactccaggccaacaaggccacacttgtgtgcctgatctccgacttctaccctggggctgtgacagtggcttggaaggccgatggatctcctgtgaaagccggcgtggaaaccaccaagccatccaagcagagcaacaacaaatacgccgccagctcctacctgagcctgacacctgagcagtggaagtcccacagatcctacagctgccaagtgacccacgaaggcagcaccgtggaaaagacagtggcccctacagagtgcagcggatcccaggctcagagcgattgcagctctagcacagtgtctccaggcgtgctggccggaattgtgatgggcgatctggtgctgacagtgctgattgccctggccgtgtacttcctgggtagactggtgcctagaggaagaggcgctgccgaagccgccacaagaaagcagagaatcaccgagacagagagcccctaccaagagctgcaaggccagagaagcgacgtgtacagcgacctgaatacccagcggccttactacaaaagggccaagcgatctggatctggagcaacaaacttctcactactcaaacaagcaggtgacgtggaggagaatcccgggcctactagtatggactggatttggcgcatccttttccttgtcggcgctgctaccggcgcgcattccttcgaacaagttcagcttcaacagcctggcgctgagctggtcaaacctggcgcttctgtgaagatgagctgcaaagccagcggctacgccttcagcagctactggatcaactggatgaagcagaaacccggccagggactcgaatggatcggccaaatctatcccggcgacggcgacaccaactacaacggcaagttcaagggcagagccacactgaccgccgatacctctagcagcacagcctacatgcagctgagcagcctgaccagcgaagatagcgccgtgtacttctgtgcccggtccatcacaacagtcgtgggctgcgctatggactattggggccagggaacaagcgtgaccgtgtctagtacgcgtgcctctacaaagggaccctccgtgtttcctctggctcccagcagcaagtctacaagcggaggaacagccgctctgggctgcctggtcaaggattactttcccgagcctgtgaccgtgtcctggaatagcggagcactgacaagcggcgtgcacacctttccagccgtgctgcaaagcagcggcctgtactctctgagcagcgtggtcacagtgcctagctctagcctgggcacccagacctacatctgcaatgtgaaccacaagcctagcaacaccaaggtggacaagagagtggaacccaagagctgtggtacccaggcacagtctgactgtagcagctccacagttagccctggcgttctggctggcatcgttatgggcgacctcgtcctgactgtcctgatcgctctggcagtgtattttctcggacggctggtcccaagaggaaggggagcagctgaagctgctacccggaagcagcggatcacagagactgagtctccataccaagaactccagggacagagatccgatgtgtactccgacctgaacacacagaggccctattataagcgcgccaagagaagcggatctggcgtgaagcagaccctgaatttcgacctgctgaagctggctggcgacgtggaatccaacccaggcccttctagaggcgggatccacaccatggctacctacgaggtgctgtgcgaggtggcaagaaagctgggcaccgacgacagagaagtggtgctgttcctgctgaacgtgttcatccctcagcctacactggcccagctgatcggtgcactgagagccctgaaagaggaaggccggctgacctttcctctgctggccgaatgcctgttcagagccggaagaagggatctgctgcgggacctgctgcatctggaccccagatttctggaaagacacctggccggcaccatgagctacttcagcccttaccagctgaccgtgctgcacgttgacggcgaactgtgcgccagagatattcggagcctgatcttcctgagcaaggacaccatcggcagccggtctacccctcagacatttctgcactgggtgtactgcatggaaaacctggacctgctcggccccacagatgtggatgccctgatgtccatgctgagaagcctgagcagagtggacctccagagacaggtgcagacactgatgggactgcacctgagcggacctagccacagccagcactacagacacacccct

SEQ ID NO: 1967 - DNA, 2901 bp, Artificial Sequence
  Synthetic Polynucleotide
atggccttaccagtgaccgccttgctcctgccgctggccttgctgctccacgccgccaggccggacatccagatgacacagagccctagcagcctgtctgccagcgtgggagacagagtgaccatcacatgcaaggccagcgaccacatcaacaactggctggcctggtatcagcagaagcctggacaggcccctaagctgctgatctacggcgctaccacactggaaacaggcgtgcccagcagattttctggcagcggctctggcaccgactacaccctgacaatatccagcctccagcctgaggacttcgccacctactactgtcagcagagctggaacaccccttggacattcggccagggcaccaagctggaaatcaagagactcgagggacagcctaaggccaatcctaccgtgacactgttccctccaagcagcgaagaactccaggccaacaaggccacacttgtgtgcctgatctccgacttctaccctggggctgtgacagtggcttggaaggccgatggatctcctgtgaaagccggcgtggaaaccaccaagccatccaagcagagcaacaacaaatacgccgccagctcctacctgagcctgacacctgagcagtggaagtcccacagatcctacagctgccaagtgacccacgaaggcagcaccgtggaaaagacagtggcccctacagagtgcagcggatcccaggctcagagcgattgcagctctagcacagtgtctccaggcgtgctggccggaattgtgatgggcgatctggtgctgacagtgctgattgccctggccgtgtacttcctgggtagactggtgcctagaggaagaggcgctgccgaagccgccacaagaaagcagagaatcaccgagacagagagcccctaccaagagctgcaaggccagagaagcgacgtgtacagcgacctgaatacccagcggccttactacaaaagggccaagcgatctggatctggagcaacaaacttctcactactcaaacaagcaggtgacgtggaggagaatcccgggcctactagtatggactggatttggcgcatccttttccttgtcggcgctgctaccggcgcgcattccttcgaacaagttcagcttcaacagcctggcgctgagctggtcaaacctggcgcttctgtgaagatgagctgcaaagccagcggctacgccttcagcagctactggatcaactggatgaagcagaaacccggccagggactcgaatggatcggccaaatctatcccggcgacggcgacaccaactacaacggcaagttcaagggcagagccacactgaccgccgatacctctagcagcacagcctacatgcagctgagcagcctgaccagcgaagatagcgccgtgtacttctgtgcccggtccatcacaacagtcgtgggctgcgctatggactattggggccagggaacaagcgtgaccgtgtctagtacgcgtgcctctacaaagggaccctccgtgtttcctctggctcccagcagcaagtctacaagcggaggaacagccgctctgggctgcctggtcaaggattactttcccgagcctgtgaccgtgtcctggaatagcggagcactgacaagcggcgtgcacacctttccagccgtgctgcaaagcagcggcctgtactctctgagcagcgtggtcacagtgcctagctctagcctgggcacccagacctacatctgcaatgtgaaccacaagcctagcaacaccaaggtggacaagagagtggaacccaagagctgtggtacccaggcacagtctgactgtagcagctccacagttagccctggcgttctggctggcatcgttatgggcgacctcgtcctgactgtcctgatcgctctggcagtgtattttctcggacggctggtcccaagaggaaggggagcagctgaagctgctacccggaagcagcggatcacagagactgagtctccataccaagaactccagggacagagatccgatgtgtactccgacctgaacacacagaggccctattataagcgcgccaagagaagcggatctggcgtgaagcagaccctgaatttcgacctgctgaagctggctggcgacgtggaatccaacccaggcccttctagaggcgggatccacaccatgtccgactccaaggaggtccctagccttccatttttgcgacacttgctcgaagagttggacagccatgaggacagcttgctgctgtttctgtgtcacgacgcggccccgggctgcacgacggtcacgcaagctttgtgctcgcttagccaacagcgcaagctgaccctcgcggctctggtcgagatgctctacgtgctgcagcgtatggatcttctcaagagccgcttcgggctcagcaaggagggggccgagcaattgctgggcacaagctttctcacgcgctaccgcaagctcatggtttgcgtgggtgaggagctcgactcgagcgagctacgcgctctacgcttgttcgcgtgcaacctgaatccgagcctgagcacggcgctttctgagagcagccgctttgtcgagcttgtactcgcgcttgaaaacgtaggactcgtctcgccatcgagtgtttccgtgcttgcggacatgttgcgcactcttcggcgcctcgatttgtgccagcagcttgttgagtacgaacaacaagagcaagccaggtaccgttactgttacgcggcctcgccctcattgccagttcgtacgttacgtcgggggcacggcgcgagtgaacacgagcagctgtgcatgcccgtgcaagaatcctctgacagccccgagctgctgcgcacgcccgtacaagaatcctccagcgacagccccgagcaaacgact

SEQ ID NO: 1968 - DNA, 2769 bp, Artificial Sequence
  Synthetic Polynucleotide
atggccttaccagtgaccgccttgctcctgccgctggccttgctgctccacgccgccaggccggacatccagatgacacagagccctagcagcctgtctgccagcgtgggagacagagtgaccatcacatgcaaggccagcgaccacatcaacaactggctggcctggtatcagcagaagcctggacaggcccctaagctgctgatctacggcgctaccacactggaaacaggcgtgcccagcagattttctggcagcggctctggcaccgactacaccctgacaatatccagcctccagcctgaggacttcgccacctactactgtcagcagagctggaacaccccttggacattcggccagggcaccaagctggaaatcaagagactcgagggacagcctaaggccaatcctaccgtgacactgttccctccaagcagcgaagaactccaggccaacaaggccacacttgtgtgcctgatctccgacttctaccctggggctgtgacagtggcttggaaggccgatggatctcctgtgaaagccggcgtggaaaccaccaagccatccaagcagagcaacaacaaatacgccgccagctcctacctgagcctgacacctgagcagtggaagtcccacagatcctacagctgccaagtgacccacgaaggcagcaccgtggaaaagacagtggcccctacagagtgcagcggatcccaggctcagagcgattgcagctctagcacagtgtctccaggcgtgctggccggaattgtgatgggcgatctggtgctgacagtgctgattgccctggccgtgtacttcctgggtagactggtgcctagaggaagaggcgctgccgaagccgccacaagaaagcagagaatcaccgagacagagagcccctaccaagagctgcaaggccagagaagcgacgtgtacagcgacctgaatacccagcggccttactacaaaagggccaagcgatctggatctggagcaacaaacttctcactactcaaacaagcaggtgacgtggaggagaatcccgggcctactagtatggactggatttggcgcatccttttccttgtcggcgctgctaccggcgcgcattccttcgaacaagttcagcttcaacagcctggcgctgagctggtcaaacctggcgcttctgtgaagatgagctgcaaagccagcggctacgccttcagcagctactggatcaactggatgaagcagaaacccggccagggactcgaatggatcggccaaatctatcccggcgacggcgacaccaactacaacggcaagttcaagggcagagccacactgaccgccgatacctctagcagcacagcctacatgcagctgagcagcctgaccagcgaagatagcgccgtgtacttctgtgcccggtccatcacaacagtcgtgggctgcgctatggactattggggccagggaacaagcgtgaccgtgtctagtacgcgtgcctctacaaagggaccctccgtgtttcctctggctcccagcagcaagtctacaagcggaggaacagccgctctgggctgcctggtcaaggattactttcccgagcctgtgaccgtgtcctggaatagcggagcactgacaagcggcgtgcacacctttccagccgtgctgcaaagcagcggcctgtactctctgagcagcgtggtcacagtgcctagctctagcctgggcacccagacctacatctgcaatgtgaaccacaagcctagcaacaccaaggtggacaagagagtggaacccaagagctgtggtacccaggcacagtctgactgtagcagctccacagttagccctggcgttctggctggcatcgttatgggcgacctcgtcctgactgtcctgatcgctctggcagtgtattttctcggacggctggtcccaagaggaaggggagcagctgaagctgctacccggaagcagcggatcacagagactgagtctccataccaagaactccagggacagagatccgatgtgtactccgacctgaacacacagaggccctattataagcgcgccaagagaagcggatctggcgtgaagcagaccctgaatttcgacctgctgaagctggctggcgacgtggaatccaacccaggcccttctagaggccatatgaccgagtacaagcccacggtgcgcctcgccacccgcgacgacgtccccagggccgtacgcaccctcgccgccgcgttcgccgactaccccgccacgcgccacaccgtcgatccggaccgccacatcgagcgggtcaccgagctgcaagaactcttcctcacgcgcgtcgggctcgacatcggcaaggtgtgggtcgcggacgacggcgccgcggtggcggtctggaccacgccggagagcgtcgaagcgggggcggtgttcgccgagatcggcccgcgcatggccgagttgagcggttcccggctggccgcgcagcaacagatggaaggcctcctggcgccgcaccggcccaaggagcccgcgtggttcctggccaccgtcggcgtctcgcccgaccaccagggcaagggtctgggcagcgccgtcgtgctccccggagtggaggcggccgagcgcgccggggtgcccgccttcctggagacctccgcgccccgcaacctccccttctacgagcggctcggcttcaccgtcaccgccgacgtcgaggtgcccgaaggaccgcgcacctggtgcatgacccgcaagcccggtgcctga

SEQ ID NO: 1969 - DNA, 3180 bp, Artificial Sequence
  Synthetic Polynucleotide
atggccttaccagtgaccgccttgctcctgccgctggccttgctgctccacgccgccaggccggaagtgcagctggttgaatctggcggaggactggttcaggctggcggatctctgagactgtcttgtgccgccagcggcagaacctttagcatgggctggtttagacaggcccctggcaaagagagagagttcgtcgccgccatcacatactctggcggcagcccttactacgccgactctgtgaagggcagattcaccatcagccgggacaacgccaagaacaccgtgtacctccagatgaacagcctgaagcctgaggacaccgccgtgtactactgcgccgccaatccaacatacggcagcgactggaacgccgagaattggggccagggaacccaagtgacagtgtctagcggtaccggcggaggcggatctggcggcggaggtagcggtggcggaggatctgaattcgacatccagatgacacagagccctagcagcctgtctgccagcgtgggagacagagtgaccatcacatgcaaggccagcgaccacatcaacaactggctggcctggtatcagcagaagcctggacaggcccctaagctgctgatctacggcgctaccacactggaaacaggcgtgcccagcagattttctggcagcggctctggcaccgactacaccctgacaatatccagcctccagcctgaggacttcgccacctactactgtcagcagagctggaacaccccttggacattcggccagggcaccaagctggaaatcaagagactcgagggacagcctaaggccaatcctaccgtgacactgttccctccaagcagcgaagaactccaggccaacaaggccacacttgtgtgcctgatctccgacttctaccctggggctgtgacagtggcttggaaggccgatggatctcctgtgaaagccggcgtggaaaccaccaagccatccaagcagagcaacaacaaatacgccgccagctcctacctgagcctgacacctgagcagtggaagtcccacagatcctacagctgccaagtgacccacgaaggcagcaccgtggaaaagacagtggcccctacagagtgcagcggatcccaggctcagagcgattgcagctctagcacagtgtctccaggcgtgctggccggaattgtgatgggcgatctggtgctgacagtgctgattgccctggccgtgtacttcctgggtagactggtgcctagaggaagaggcgctgccgaagccgccacaagaaagcagagaatcaccgagacagagagcccctaccaagagctgcaaggccagagaagcgacgtgtacagcgacctgaatacccagcggccttactacaaaagggccaagcgatctggatctggagcaacaaacttctcactactcaaacaagcaggtgacgtggaggagaatcccgggcctactagtatggactggatttggcgcatccttttccttgtcggcgctgctaccggcgcgcattccttcgaacaagttcagcttcaacagcctggcgctgagctggtcaaacctggcgcttctgtgaagatgagctgcaaagccagcggctacgccttcagcagctactggatcaactggatgaagcagaaacccggccagggactcgaatggatcggccaaatctatcccggcgacggcgacaccaactacaacggcaagttcaagggcagagccacactgaccgccgatacctctagcagcacagcctacatgcagctgagcagcctgaccagcgaagatagcgccgtgtacttctgtgcccggtccatcacaacagtcgtgggctgcgctatggactattggggccagggaacaagcgtgaccgtgtctagtacgcgtgcctctacaaagggaccctccgtgtttcctctggctcccagcagcaagtctacaagcggaggaacagccgctctgggctgcctggtcaaggattactttcccgagcctgtgaccgtgtcctggaatagcggagcactgacaagcggcgtgcacacctttccagccgtgctgcaaagcagcggcctgtactctctgagcagcgtggtcacagtgcctagctctagcctgggcacccagacctacatctgcaatgtgaaccacaagcctagcaacaccaaggtggacaagagagtggaacccaagagctgtggtacccaggcacagtctgactgtagcagctccacagttagccctggcgttctggctggcatcgttatgggcgacctcgtcctgactgtcctgatcgctctggcagtgtattttctcggacggctggtcccaagaggaaggggagcagctgaagctgctacccggaagcagcggatcacagagactgagtctccataccaagaactccagggacagagatccgatgtgtactccgacctgaacacacagaggccctattataagcgcgccaagagaagcggatctggcgtgaagcagaccctgaatttcgacctgctgaagctggctggcgacgtggaatccaacccaggcccttctagaggccatatgaccgagtacaagcccacggtgcgcctcgccacccgcgacgacgtccccagggccgtacgcaccctcgccgccgcgttcgccgactaccccgccacgcgccacaccgtcgatccggaccgccacatcgagcgggtcaccgagctgcaagaactcttcctcacgcgcgtcgggctcgacatcggcaaggtgtgggtcgcggacgacggcgccgcggtggcggtctggaccacgccggagagcgtcgaagcgggggcggtgttcgccgagatcggcccgcgcatggccgagttgagcggttcccggctggccgcgcagcaacagatggaaggcctcctggcgccgcaccggcccaaggagcccgcgtggttcctggccaccgtcggcgtctcgcccgaccaccagggcaagggtctgggcagcgccgtcgtgctccccggagtggaggcggccgagcgcgccggggtgcccgccttcctggagacctccgcgccccgcaacctccccttctacgagcggctcggcttcaccgtcaccgccgacgtcgaggtgcccgaaggaccgcgcacctggtgcatgacccgcaagcccggtgcctga

SEQ ID NO: 1970 - DNA, 3591 bp, Artificial Sequence
  Synthetic Polynucleotide
atggccttaccagtgaccgccttgctcctgccgctggccttgctgctccacgccgccaggccggaagtgcagctggttgaatctggcggaggactggttcaggctggcggatctctgagactgtcttgtgccgccagcggcagaacctttagcatgggctggtttagacaggcccctggcaaagagagagagttcgtcgccgccatcacatactctggcggcagcccttactacgccgactctgtgaagggcagattcaccatcagccgggacaacgccaagaacaccgtgtacctccagatgaacagcctgaagcctgaggacaccgccgtgtactactgcgccgccaatccaacatacggcagcgactggaacgccgagaattggggccagggaacccaagtgacagtgtctagcggtaccggcggaggcggatctggcggcggaggtagcggtggcggaggatctgaattcgacatccagatgacacagagccctagcagcctgtctgccagcgtgggagacagagtgaccatcacatgcaaggccagcgaccacatcaacaactggctggcctggtatcagcagaagcctggacaggcccctaagctgctgatctacggcgctaccacactggaaacaggcgtgcccagcagattttctggcagcggctctggcaccgactacaccctgacaatatccagcctccagcctgaggacttcgccacctactactgtcagcagagctggaacaccccttggacattcggccagggcaccaagctggaaatcaagagactcgagggacagcctaaggccaatcctaccgtgacactgttccctccaagcagcgaagaactccaggccaacaaggccacacttgtgtgcctgatctccgacttctaccctggggctgtgacagtggcttggaaggccgatggatctcctgtgaaagccggcgtggaaaccaccaagccatccaagcagagcaacaacaaatacgccgccagctcctacctgagcctgacacctgagcagtggaagtcccacagatcctacagctgccaagtgacccacgaaggcagcaccgtggaaaagacagtggcccctacagagtgcagcggatcccaggctcagagcgattgcagctctagcacagtgtctccaggcgtgctggccggaattgtgatgggcgatctggtgctgacagtgctgattgccctggccgtgtacttcctgggtagactggtgcctagaggaagaggcgctgccgaagccgccacaagaaagcagagaatcaccgagacagagagcccctaccaagagctgcaaggccagagaagcgacgtgtacagcgacctgaatacccagcggccttactacaaaagggccaagcgatctggatctggagcaacaaacttctcactactcaaacaagcaggtgacgtggaggagaatcccgggcctactagtatggactggatttggcgcatccttttccttgtcggcgctgctaccggcgcgcattccgggcccgaagtgcaactggttgaatccggtggcggcctggtgcaagcaggcggatctctcagacttagctgtgccgcctccggcagaaccttcacaatgggatggtttaggcaggctccagggaaagagagagagttcgtcgccgccatctctctgtctcccacactggcctactacgccgactctgtgaaaggccggttcaccatctccagagataatgccaagaacaccgtggtgctgcaaatgaactctctgaaacccgaggatacagccctgtactattgtgccgctgaccggaagtccgtgatgagcatcagacccgattactggggacagggcacacaagtcacagtgtcctctggatccggcggcggaggatctggcggaggcggatctgggggcggaggctctttcgaacaagttcagcttcaacagcctggcgctgagctggtcaaacctggcgcttctgtgaagatgagctgcaaagccagcggctacgccttcagcagctactggatcaactggatgaagcagaaacccggccagggactcgaatggatcggccaaatctatcccggcgacggcgacaccaactacaacggcaagttcaagggcagagccacactgaccgccgatacctctagcagcacagcctacatgcagctgagcagcctgaccagcgaagatagcgccgtgtacttctgtgcccggtccatcacaacagtcgtgggctgcgctatggactattggggccagggaacaagcgtgaccgtgtctagtacgcgtgcctctacaaagggaccctccgtgtttcctctggctcccagcagcaagtctacaagcggaggaacagccgctctgggctgcctggtcaaggattactttcccgagcctgtgaccgtgtcctggaatagcggagcactgacaagcggcgtgcacacctttccagccgtgctgcaaagcagcggcctgtactctctgagcagcgtggtcacagtgcctagctctagcctgggcacccagacctacatctgcaatgtgaaccacaagcctagcaacaccaaggtggacaagagagtggaacccaagagctgtggtacccaggcacagtctgactgtagcagctccacagttagccctggcgttctggctggcatcgttatgggcgacctcgtcctgactgtcctgatcgctctggcagtgtattttctcggacggctggtcccaagaggaaggggagcagctgaagctgctacccggaagcagcggatcacagagactgagtctccataccaagaactccagggacagagatccgatgtgtactccgacctgaacacacagaggccctattataagcgcgccaagagaagcggatctggcgtgaagcagaccctgaatttcgacctgctgaagctggctggcgacgtggaatccaacccaggcccttctagaggccatatgaccgagtacaagcccacggtgcgcctcgccacccgcgacgacgtccccagggccgtacgcaccctcgccgccgcgttcgccgactaccccgccacgcgccacaccgtcgatccggaccgccacatcgagcgggtcaccgagctgcaagaactcttcctcacgcgcgtcgggctcgacatcggcaaggtgtgggtcgcggacgacggcgccgcggtggcggtctggaccacgccggagagcgtcgaagcgggggcggtgttcgccgagatcggcccgcgcatggccgagttgagcggttcccggctggccgcgcagcaacagatggaaggcctcctggcgccgcaccggcccaaggagcccgcgtggttcctggccaccgtcggcgtctcgcccgaccaccagggcaagggtctgggcagcgccgtcgtgctccccggagtggaggcggccgagcgcgccggggtgcccgccttcctggagacctccgcgccccgcaacctccccttctacgagcggctcggcttcaccgtcaccgccgacgtcgaggtgcccgaaggaccgcgcacctggtgcatgacccgcaagcccggtgcctga

SEQ ID NO: 1971 - DNA, 2790 bp, Artificial Sequence
  Synthetic Polynucleotide
atggccttaccagtgaccgccttgctcctgccgctggccttgctgctccacgccgccaggccggaagtgcagctggttgaatctggcggaggactggttcaggctggcggatctctgagactgtcttgtgccgccagcggcagaacctttagcatgggctggtttagacaggcccctggcaaagagagagagttcgtcgccgccatcacatactctggcggcagcccttactacgccgactctgtgaagggcagattcaccatcagccgggacaacgccaagaacaccgtgtacctccagatgaacagcctgaagcctgaggacaccgccgtgtactactgcgccgccaatccaacatacggcagcgactggaacgccgagaattggggccagggaacccaagtgacagtgtctagcctcgagggacagcctaaggccaatcctaccgtgacactgttccctccaagcagcgaagaactccaggccaacaaggccacacttgtgtgcctgatctccgacttctaccctggggctgtgacagtggcttggaaggccgatggatctcctgtgaaagccggcgtggaaaccaccaagccatccaagcagagcaacaacaaatacgccgccagctcctacctgagcctgacacctgagcagtggaagtcccacagatcctacagctgccaagtgacccacgaaggcagcaccgtggaaaagacagtggcccctacagagtgcagcggatcccaggctcagagcgattgcagctctagcacagtgtctccaggcgtgctggccggaattgtgatgggcgatctggtgctgacagtgctgattgccctggccgtgtacttcctgggtagactggtgcctagaggaagaggcgctgccgaagccgccacaagaaagcagagaatcaccgagacagagagcccctaccaagagctgcaaggccagagaagcgacgtgtacagcgacctgaatacccagcggccttactacaaaagggccaagcgatctggatctggagcaacaaacttctcactactcaaacaagcaggtgacgtggaggagaatcccgggcctactagtatggactggatttggcgcatccttttccttgtcggcgctgctaccggcgcgcattccgggcccgaagtgcaactggttgaatccggtggcggcctggtgcaagcaggcggatctctcagacttagctgtgccgcctccggcagaaccttcacaatgggatggtttaggcaggctccagggaaagagagagagttcgtcgccgccatctctctgtctcccacactggcctactacgccgactctgtgaaaggccggttcaccatctccagagataatgccaagaacaccgtggtgctgcaaatgaactctctgaaacccgaggatacagccctgtactattgtgccgctgaccggaagtccgtgatgagcatcagacccgattactggggacagggcacacaagtcacagtgtcctctacgcgtgcctctacaaagggaccctccgtgtttcctctggctcccagcagcaagtctacaagcggaggaacagccgctctgggctgcctggtcaaggattactttcccgagcctgtgaccgtgtcctggaatagcggagcactgacaagcggcgtgcacacctttccagccgtgctgcaaagcagcggcctgtactctctgagcagcgtggtcacagtgcctagctctagcctgggcacccagacctacatctgcaatgtgaaccacaagcctagcaacaccaaggtggacaagagagtggaacccaagagctgtggtacccaggcacagtctgactgtagcagctccacagttagccctggcgttctggctggcatcgttatgggcgacctcgtcctgactgtcctgatcgctctggcagtgtattttctcggacggctggtcccaagaggaaggggagcagctgaagctgctacccggaagcagcggatcacagagactgagtctccataccaagaactccagggacagagatccgatgtgtactccgacctgaacacacagaggccctattataagcgcgccaagagaagcggatctggcgtgaagcagaccctgaatttcgacctgctgaagctggctggcgacgtggaatccaacccaggcccttctagaggccatatgaccgagtacaagcccacggtgcgcctcgccacccgcgacgacgtccccagggccgtacgcaccctcgccgccgcgttcgccgactaccccgccacgcgccacaccgtcgatccggaccgccacatcgagcgggtcaccgagctgcaagaactcttcctcacgcgcgtcgggctcgacatcggcaaggtgtgggtcgcggacgacggcgccgcggtggcggtctggaccacgccggagagcgtcgaagcgggggcggtgttcgccgagatcggcccgcgcatggccgagttgagcggttcccggctggccgcgcagcaacagatggaaggcctcctggcgccgcaccggcccaaggagcccgcgtggttcctggccaccgtcggcgtctcgcccgaccaccagggcaagggtctgggcagcgccgtcgtgctccccggagtggaggcggccgagcgcgccggggtgcccgccttcctggagacctccgcgccccgcaacctccccttctacgagcggctcggcttcaccgtcaccgccgacgtcgaggtgcccgaaggaccgcgcacctggtgcatgacccgcaagcccggtgcctga

SEQ ID NO: 1972 - DNA, 2814 bp, Artificial Sequence
  Synthetic Polynucleotide
atggccttaccagtgaccgccttgctcctgccgctggccttgctgctccacgccgccaggccggacatccagatgacacagagccctagcagcctgtctgccagcgtgggagacagagtgaccatcacatgcaaggccagcgaccacatcaacaactggctggcctggtatcagcagaagcctggacaggcccctaagctgctgatctacggcgctaccacactggaaacaggcgtgcccagcagattttctggcagcggctctggcaccgactacaccctgacaatatccagcctccagcctgaggacttcgccacctactactgtcagcagagctggaacaccccttggacattcggccagggcaccaagctggaaatcaagagactcgaggacctgaagaacgtgttcccacctgaggtggccgtgttcgagcctagcgaggccgagatcagccacacccagaaagccaccctcgtgtgcctggctaccggcttctaccccgaccatgtggaactgtcttggtgggtcaacggcaaagaggtgcacagcggcgtgtctaccgacccccagccactgaaagaacagcccgccctgaacgacagccggtactgcctgagcagcagactgagagtgtccgccaccttctggcagaacccccggaaccacttcagatgccaggtgcagttctacggcctgagcgagaacgacgagtggacccaggacagagccaagcccgtgacccagatcgtgtctgccgaagcctggggcagagccgattgcggatcccaggctcagagcgattgcagctctagcacagtgtctccaggcgtgctggccggaattgtgatgggcgatctggtgctgacagtgctgattgccctggccgtgtacttcctgggtagactggtgcctagaggaagaggcgctgccgaagccgccacaagaaagcagagaatcaccgagacagagagcccctaccaagagctgcaaggccagagaagcgacgtgtacagcgacctgaatacccagcggccttactacaaaagggccaagcgatctggatctggagcaacaaacttctcactactcaaacaagcaggtgacgtggaggagaatcccgggcctactagtatggactggatttggcgcatccttttccttgtcggcgctgctaccggcgcgcattccttcgaacaagttcagcttcaacagcctggcgctgagctggtcaaacctggcgcttctgtgaagatgagctgcaaagccagcggctacgccttcagcagctactggatcaactggatgaagcagaaacccggccagggactcgaatggatcggccaaatctatcccggcgacggcgacaccaactacaacggcaagttcaagggcagagccacactgaccgccgatacctctagcagcacagcctacatgcagctgagcagcctgaccagcgaagatagcgccgtgtacttctgtgcccggtccatcacaacagtcgtgggctgcgctatggactattggggccagggaacaagcgtgaccgtgtctagtacgcgtatccagaaccctgatcctgccgtgtaccagctgcgggatagcaagagcagcgacaagagcgtgtgtctgttcaccgacttcgacagccagaccaacgtgtcccagagcaaggactccgacgtgtacatcaccgataagaccgtgctggacatgcggagcatggacttcaagagcaactccgccgtggcctggtccaacaagtccgatttcgcctgcgccaacgccttcaacaacagcattatccccgaggacacattcttcccaagccccgagagcagctgcggtacccaggcacagtctgactgtagcagctccacagttagccctggcgttctggctggcatcgttatgggcgacctcgtcctgactgtcctgatcgctctggcagtgtattttctcggacggctggtcccaagaggaaggggagcagctgaagctgctacccggaagcagcggatcacagagactgagtctccataccaagaactccagggacagagatccgatgtgtactccgacctgaacacacagaggccctattataagcgcgccaagagaagcggatctggcgtgaagcagaccctgaatttcgacctgctgaagctggctggcgacgtggaatccaacccaggcccttctagaggccatatgaccgagtacaagcccacggtgcgcctcgccacccgcgacgacgtccccagggccgtacgcaccctcgccgccgcgttcgccgactaccccgccacgcgccacaccgtcgatccggaccgccacatcgagcgggtcaccgagctgcaagaactcttcctcacgcgcgtcgggctcgacatcggcaaggtgtgggtcgcggacgacggcgccgcggtggcggtctggaccacgccggagagcgtcgaagcgggggcggtgttcgccgagatcggcccgcgcatggccgagttgagcggttcccggctggccgcgcagcaacagatggaaggcctcctggcgccgcaccggcccaaggagcccgcgtggttcctggccaccgtcggcgtctcgcccgaccaccagggcaagggtctgggcagcgccgtcgtgctccccggagtggaggcggccgagcgcgccggggtgcccgccttcctggagacctccgcgccccgcaacctccccttctacgagcggctcggcttcaccgtcaccgccgacgtcgaggtgcccgaaggaccgcgcacctggtgcatgacccgcaagcccggtgcctga

SEQ ID NO: 1973 - DNA, 3225 bp, Artificial Sequence
  Synthetic Polynucleotide
atggccttaccagtgaccgccttgctcctgccgctggccttgctgctccacgccgccaggccggaagtgcagctggttgaatctggcggaggactggttcaggctggcggatctctgagactgtcttgtgccgccagcggcagaacctttagcatgggctggtttagacaggcccctggcaaagagagagagttcgtcgccgccatcacatactctggcggcagcccttactacgccgactctgtgaagggcagattcaccatcagccgggacaacgccaagaacaccgtgtacctccagatgaacagcctgaagcctgaggacaccgccgtgtactactgcgccgccaatccaacatacggcagcgactggaacgccgagaattggggccagggaacccaagtgacagtgtctagcggtaccggcggaggcggatctggcggcggaggtagcggtggcggaggatctgaattcgacatccagatgacacagagccctagcagcctgtctgccagcgtgggagacagagtgaccatcacatgcaaggccagcgaccacatcaacaactggctggcctggtatcagcagaagcctggacaggcccctaagctgctgatctacggcgctaccacactggaaacaggcgtgcccagcagattttctggcagcggctctggcaccgactacaccctgacaatatccagcctccagcctgaggacttcgccacctactactgtcagcagagctggaacaccccttggacattcggccagggcaccaagctggaaatcaagagactcgaggacctgaagaacgtgttcccacctgaggtggccgtgttcgagcctagcgaggccgagatcagccacacccagaaagccaccctcgtgtgcctggctaccggcttctaccccgaccatgtggaactgtcttggtgggtcaacggcaaagaggtgcacagcggcgtgtctaccgacccccagccactgaaagaacagcccgccctgaacgacagccggtactgcctgagcagcagactgagagtgtccgccaccttctggcagaacccccggaaccacttcagatgccaggtgcagttctacggcctgagcgagaacgacgagtggacccaggacagagccaagcccgtgacccagatcgtgtctgccgaagcctggggcagagccgattgcggatcccaggctcagagcgattgcagctctagcacagtgtctccaggcgtgctggccggaattgtgatgggcgatctggtgctgacagtgctgattgccctggccgtgtacttcctgggtagactggtgcctagaggaagaggcgctgccgaagccgccacaagaaagcagagaatcaccgagacagagagcccctaccaagagctgcaaggccagagaagcgacgtgtacagcgacctgaatacccagcggccttactacaaaagggccaagcgatctggatctggagcaacaaacttctcactactcaaacaagcaggtgacgtggaggagaatcccgggcctactagtatggactggatttggcgcatccttttccttgtcggcgctgctaccggcgcgcattccttcgaacaagttcagcttcaacagcctggcgctgagctggtcaaacctggcgcttctgtgaagatgagctgcaaagccagcggctacgccttcagcagctactggatcaactggatgaagcagaaacccggccagggactcgaatggatcggccaaatctatcccggcgacggcgacaccaactacaacggcaagttcaagggcagagccacactgaccgccgatacctctagcagcacagcctacatgcagctgagcagcctgaccagcgaagatagcgccgtgtacttctgtgcccggtccatcacaacagtcgtgggctgcgctatggactattggggccagggaacaagcgtgaccgtgtctagtacgcgtatccagaaccctgatcctgccgtgtaccagctgcgggatagcaagagcagcgacaagagcgtgtgtctgttcaccgacttcgacagccagaccaacgtgtcccagagcaaggactccgacgtgtacatcaccgataagaccgtgctggacatgcggagcatggacttcaagagcaactccgccgtggcctggtccaacaagtccgatttcgcctgcgccaacgccttcaacaacagcattatccccgaggacacattcttcccaagccccgagagcagctgcggtacccaggcacagtctgactgtagcagctccacagttagccctggcgttctggctggcatcgttatgggcgacctcgtcctgactgtcctgatcgctctggcagtgtattttctcggacggctggtcccaagaggaaggggagcagctgaagctgctacccggaagcagcggatcacagagactgagtctccataccaagaactccagggacagagatccgatgtgtactccgacctgaacacacagaggccctattataagcgcgccaagagaagcggatctggcgtgaagcagaccctgaatttcgacctgctgaagctggctggcgacgtggaatccaacccaggcccttctagaggccatatgaccgagtacaagcccacggtgcgcctcgccacccgcgacgacgtccccagggccgtacgcaccctcgccgccgcgttcgccgactaccccgccacgcgccacaccgtcgatccggaccgccacatcgagcgggtcaccgagctgcaagaactcttcctcacgcgcgtcgggctcgacatcggcaaggtgtgggtcgcggacgacggcgccgcggtggcggtctggaccacgccggagagcgtcgaagcgggggcggtgttcgccgagatcggcccgcgcatggccgagttgagcggttcccggctggccgcgcagcaacagatggaaggcctcctggcgccgcaccggcccaaggagcccgcgtggttcctggccaccgtcggcgtctcgcccgaccaccagggcaagggtctgggcagcgccgtcgtgctccccggagtggaggcggccgagcgcgccggggtgcccgccttcctggagacctccgcgccccgcaacctccccttctacgagcggctcggcttcaccgtcaccgccgacgtcgaggtgcccgaaggaccgcgcacctggtgcatgacccgcaagcccggtgcctga

SEQ ID NO: 1974 - DNA, 3636 bp, Artificial Sequence
  Synthetic Polynucleotide
atggccttaccagtgaccgccttgctcctgccgctggccttgctgctccacgccgccaggccggaagtgcagctggttgaatctggcggaggactggttcaggctggcggatctctgagactgtcttgtgccgccagcggcagaacctttagcatgggctggtttagacaggcccctggcaaagagagagagttcgtcgccgccatcacatactctggcggcagcccttactacgccgactctgtgaagggcagattcaccatcagccgggacaacgccaagaacaccgtgtacctccagatgaacagcctgaagcctgaggacaccgccgtgtactactgcgccgccaatccaacatacggcagcgactggaacgccgagaattggggccagggaacccaagtgacagtgtctagcggtaccggcggaggcggatctggcggcggaggtagcggtggcggaggatctgaattcgacatccagatgacacagagccctagcagcctgtctgccagcgtgggagacagagtgaccatcacatgcaaggccagcgaccacatcaacaactggctggcctggtatcagcagaagcctggacaggcccctaagctgctgatctacggcgctaccacactggaaacaggcgtgcccagcagattttctggcagcggctctggcaccgactacaccctgacaatatccagcctccagcctgaggacttcgccacctactactgtcagcagagctggaacaccccttggacattcggccagggcaccaagctggaaatcaagagactcgaggacctgaagaacgtgttcccacctgaggtggccgtgttcgagcctagcgaggccgagatcagccacacccagaaagccaccctcgtgtgcctggctaccggcttctaccccgaccatgtggaactgtcttggtgggtcaacggcaaagaggtgcacagcggcgtgtctaccgacccccagccactgaaagaacagcccgccctgaacgacagccggtactgcctgagcagcagactgagagtgtccgccaccttctggcagaacccccggaaccacttcagatgccaggtgcagttctacggcctgagcgagaacgacgagtggacccaggacagagccaagcccgtgacccagatcgtgtctgccgaagcctggggcagagccgattgcggatcccaggctcagagcgattgcagctctagcacagtgtctccaggcgtgctggccggaattgtgatgggcgatctggtgctgacagtgctgattgccctggccgtgtacttcctgggtagactggtgcctagaggaagaggcgctgccgaagccgccacaagaaagcagagaatcaccgagacagagagcccctaccaagagctgcaaggccagagaagcgacgtgtacagcgacctgaatacccagcggccttactacaaaagggccaagcgatctggatctggagcaacaaacttctcactactcaaacaagcaggtgacgtggaggagaatcccgggcctactagtatggactggatttggcgcatccttttccttgtcggcgctgctaccggcgcgcattccgggcccgaagtgcaactggttgaatccggtggcggcctggtgcaagcaggcggatctctcagacttagctgtgccgcctccggcagaaccttcacaatgggatggtttaggcaggctccagggaaagagagagagttcgtcgccgccatctctctgtctcccacactggcctactacgccgactctgtgaaaggccggttcaccatctccagagataatgccaagaacaccgtggtgctgcaaatgaactctctgaaacccgaggatacagccctgtactattgtgccgctgaccggaagtccgtgatgagcatcagacccgattactggggacagggcacacaagtcacagtgtcctctggatccggcggcggaggatctggcggaggcggatctgggggcggaggctctttcgaacaagttcagcttcaacagcctggcgctgagctggtcaaacctggcgcttctgtgaagatgagctgcaaagccagcggctacgccttcagcagctactggatcaactggatgaagcagaaacccggccagggactcgaatggatcggccaaatctatcccggcgacggcgacaccaactacaacggcaagttcaagggcagagccacactgaccgccgatacctctagcagcacagcctacatgcagctgagcagcctgaccagcgaagatagcgccgtgtacttctgtgcccggtccatcacaacagtcgtgggctgcgctatggactattggggccagggaacaagcgtgaccgtgtctagtacgcgtatccagaaccctgatcctgccgtgtaccagctgcgggatagcaagagcagcgacaagagcgtgtgtctgttcaccgacttcgacagccagaccaacgtgtcccagagcaaggactccgacgtgtacatcaccgataagaccgtgctggacatgcggagcatggacttcaagagcaactccgccgtggcctggtccaacaagtccgatttcgcctgcgccaacgccttcaacaacagcattatccccgaggacacattcttcccaagccccgagagcagctgcggtacccaggcacagtctgactgtagcagctccacagttagccctggcgttctggctggcatcgttatgggcgacctcgtcctgactgtcctgatcgctctggcagtgtattttctcggacggctggtcccaagaggaaggggagcagctgaagctgctacccggaagcagcggatcacagagactgagtctccataccaagaactccagggacagagatccgatgtgtactccgacctgaacacacagaggccctattataagcgcgccaagagaagcggatctggcgtgaagcagaccctgaatttcgacctgctgaagctggctggcgacgtggaatccaacccaggcccttctagaggccatatgaccgagtacaagcccacggtgcgcctcgccacccgcgacgacgtccccagggccgtacgcaccctcgccgccgcgttcgccgactaccccgccacgcgccacaccgtcgatccggaccgccacatcgagcgggtcaccgagctgcaagaactcttcctcacgcgcgtcgggctcgacatcggcaaggtgtgggtcgcggacgacggcgccgcggtggcggtctggaccacgccggagagcgtcgaagcgggggcggtgttcgccgagatcggcccgcgcatggccgagttgagcggttcccggctggccgcgcagcaacagatggaaggcctcctggcgccgcaccggcccaaggagcccgcgtggttcctggccaccgtcggcgtctcgcccgaccaccagggcaagggtctgggcagcgccgtcgtgctccccggagtggaggcggccgagcgcgccggggtgcccgccttcctggagacctccgcgccccgcaacctccccttctacgagcggctcggcttcaccgtcaccgccgacgtcgaggtgcccgaaggaccgcgcacctggtgcatgacccgcaagcccggtgcctga

SEQ ID NO: 1975 - DNA, 2835 bp, Artificial Sequence
  Synthetic Polynucleotide
atggccttaccagtgaccgccttgctcctgccgctggccttgctgctccacgccgccaggccggaagtgcagctggttgaatctggcggaggactggttcaggctggcggatctctgagactgtcttgtgccgccagcggcagaacctttagcatgggctggtttagacaggcccctggcaaagagagagagttcgtcgccgccatcacatactctggcggcagcccttactacgccgactctgtgaagggcagattcaccatcagccgggacaacgccaagaacaccgtgtacctccagatgaacagcctgaagcctgaggacaccgccgtgtactactgcgccgccaatccaacatacggcagcgactggaacgccgagaattggggccagggaacccaagtgacagtgtctagcctcgaggacctgaagaacgtgttcccacctgaggtggccgtgttcgagcctagcgaggccgagatcagccacacccagaaagccaccctcgtgtgcctggctaccggcttctaccccgaccatgtggaactgtcttggtgggtcaacggcaaagaggtgcacagcggcgtgtctaccgacccccagccactgaaagaacagcccgccctgaacgacagccggtactgcctgagcagcagactgagagtgtccgccaccttctggcagaacccccggaaccacttcagatgccaggtgcagttctacggcctgagcgagaacgacgagtggacccaggacagagccaagcccgtgacccagatcgtgtctgccgaagcctggggcagagccgattgcggatcccaggctcagagcgattgcagctctagcacagtgtctccaggcgtgctggccggaattgtgatgggcgatctggtgctgacagtgctgattgccctggccgtgtacttcctgggtagactggtgcctagaggaagaggcgctgccgaagccgccacaagaaagcagagaatcaccgagacagagagcccctaccaagagctgcaaggccagagaagcgacgtgtacagcgacctgaatacccagcggccttactacaaaagggccaagcgatctggatctggagcaacaaacttctcactactcaaacaagcaggtgacgtggaggagaatcccgggcctactagtatggactggatttggcgcatccttttccttgtcggcgctgctaccggcgcgcattccgggcccgaagtgcaactggttgaatccggtggcggcctggtgcaagcaggcggatctctcagacttagctgtgccgcctccggcagaaccttcacaatgggatggtttaggcaggctccagggaaagagagagagttcgtcgccgccatctctctgtctcccacactggcctactacgccgactctgtgaaaggccggttcaccatctccagagataatgccaagaacaccgtggtgctgcaaatgaactctctgaaacccgaggatacagccctgtactattgtgccgctgaccggaagtccgtgatgagcatcagacccgattactggggacagggcacacaagtcacagtgtcctctacgcgtatccagaaccctgatcctgccgtgtaccagctgcgggatagcaagagcagcgacaagagcgtgtgtctgttcaccgacttcgacagccagaccaacgtgtcccagagcaaggactccgacgtgtacatcaccgataagaccgtgctggacatgcggagcatggacttcaagagcaactccgccgtggcctggtccaacaagtccgatttcgcctgcgccaacgccttcaacaacagcattatccccgaggacacattcttcccaagccccgagagcagctgcggtacccaggcacagtctgactgtagcagctccacagttagccctggcgttctggctggcatcgttatgggcgacctcgtcctgactgtcctgatcgctctggcagtgtattttctcggacggctggtcccaagaggaaggggagcagctgaagctgctacccggaagcagcggatcacagagactgagtctccataccaagaactccagggacagagatccgatgtgtactccgacctgaacacacagaggccctattataagcgcgccaagagaagcggatctggcgtgaagcagaccctgaatttcgacctgctgaagctggctggcgacgtggaatccaacccaggcccttctagaggccatatgaccgagtacaagcccacggtgcgcctcgccacccgcgacgacgtccccagggccgtacgcaccctcgccgccgcgttcgccgactaccccgccacgcgccacaccgtcgatccggaccgccacatcgagcgggtcaccgagctgcaagaactcttcctcacgcgcgtcgggctcgacatcggcaaggtgtgggtcgcggacgacggcgccgcggtggcggtctggaccacgccggagagcgtcgaagcgggggcggtgttcgccgagatcggcccgcgcatggccgagttgagcggttcccggctggccgcgcagcaacagatggaaggcctcctggcgccgcaccggcccaaggagcccgcgtggttcctggccaccgtcggcgtctcgcccgaccaccagggcaagggtctgggcagcgccgtcgtgctccccggagtggaggcggccgagcgcgccggggtgcccgccttcctggagacctccgcgccccgcaacctccccttctacgagcggctcggcttcaccgtcaccgccgacgtcgaggtgcccgaaggaccgcgcacctggtgcatgacccgcaagcccggtgcctga

SEQ ID NO: 1976 - DNA, 1446 bp, Artificial Sequence
  Synthetic Polynucleotide
atggccttaccagtgaccgccttgctcctgccgctggccttgctgctccacgccgccaggccggcatgcgaagtgcagctgcttgaaagtggcggcggactgattcagcctggcggatctctgagactgagctgtgccgccagcggcttcaccttttctagccacgccatgacctgggtccgacaggcacctggaaaagggcttgaatgggtgtccgccatcagcggctctggcgattacacacactacgccgacagcgtgaagggcagattcaccatcagcagagacaacagcaagaacaccgtgtacctccagatgaacagcctgagagccgaggacagcgccgtgtattattgcgccaaggatgaggatggcggcagcctgcttggacacagaggacaaggcaccctggtcaccgtttcttccggtaccggcggaggcggatctggcggcggaggtagcggtggcggaggatctgaattcggatctctcgagcaggctcagagcgattgcagctctagcacagtgtctccaggcgtgctggccggaattgtgatgggcgatctggtgctgacagtgctgattgccctggccgtgtacttcctgggtagactggtgcctagaggaagaggcgctgccgaagccgccacaagaaagcagagaatcaccgagacagagagcccctaccaagagctgcaaggccagagaagcgacgtgtacagcgacctgaatacccagcggccttactacaaaagggccaagcgatctggatctggagcaacaaacttctcactactcaaacaagcaggtgacgtggaggagaatcccgggcctactagaggccatatgaccgagtacaagcccacggtgcgcctcgccacccgcgacgacgtccccagggccgtacgcaccctcgccgccgcgttcgccgactaccccgccacgcgccacaccgtcgatccggaccgccacatcgagcgggtcaccgagctgcaagaactcttcctcacgcgcgtcgggctcgacatcggcaaggtgtgggtcgcggacgacggcgccgcggtggcggtctggaccacgccggagagcgtcgaagcgggggcggtgttcgccgagatcggcccgcgcatggccgagttgagcggttcccggctggccgcgcagcaacagatggaaggcctcctggcgccgcaccggcccaaggagcccgcgtggttcctggccaccgtcggcgtctcgcccgaccaccagggcaagggtctgggcagcgccgtcgtgctccccggagtggaggcggccgagcgcgccggggtgcccgccttcctggagacctccgcgccccgcaacctccccttctacgagcggctcggcttcaccgtcaccgccgacgtcgaggtgcccgaaggaccgcgcacctggtgcatgacccgcaagcccggtgcctga

SEQ ID NO: 1977 - DNA, 2283 bp, Artificial Sequence
  Synthetic Polynucleotide
atggccttaccagtgaccgccttgctcctgccgctggccttgctgctccacgccgccaggccggacatccagatgacacagagccctagcagcctgtctgccagcgtgggagacagagtgaccatcacatgcaaggccagcgaccacatcaacaactggctggcctggtatcagcagaagcctggacaggcccctaagctgctgatctacggcgctaccacactggaaacaggcgtgcccagcagattttctggcagcggctctggcaccgactacaccctgacaatatccagcctccagcctgaggacttcgccacctactactgtcagcagagctggaacaccccttggacattcggccagggcaccaagctggaaatcaagagactcgagatcggctggctgttgctccaggcccctcggtgggtgttcaaggaggaagaccctattcacctgaggtgtcacagctggaagaacactgctctgcataaggtcacatatttacagaatggcaaaggcaggaagtattttcatcataattctgacttctacattccaaaagccacactcaaagacagcggctcctacttctgcagggggcttgttgggagtaaaaatgtgtcttcagagactgtgaacatcaccatcactcaaggtttggcagtgtcaaccatctcatcattctttccacctggctaccaagtgtccttctgcctggtcatggtgctgctgttcgccgtggataccggcctgtacttcagcgtcaagaccaacatccggtccagcaccagagactggaaggaccacaagttcaagtggcggaaggaccctcaggacaagagggccaagcgatctggatctggagcaacaaacttctcactactcaaacaagcaggtgacgtggaggagaatcccgggcctactagtatggactggatttggcgcatccttttccttgtcggcgctgctaccggcgcgcattccttcgaacaagttcagcttcaacagcctggcgctgagctggtcaaacctggcgcttctgtgaagatgagctgcaaagccagcggctacgccttcagcagctactggatcaactggatgaagcagaaacccggccagggactcgaatggatcggccaaatctatcccggcgacggcgacaccaactacaacggcaagttcaagggcagagccacactgaccgccgatacctctagcagcacagcctacatgcagctgagcagcctgaccagcgaagatagcgccgtgtacttctgtgcccggtccatcacaacagtcgtgggctgcgctatggactattggggccagggaacaagcgtgaccgtgtctagtacgcgtacaacgccgggcgaaaggagttccttgccggccttttaccccggcacaagcggaagctgtagtgggtgtggaagcctcagcctcccacttcttgcgggcctcgtcgcggcagatgcagtagcttcacttcttattgtaggcgcggtatttctctgtgctcgaccaaggaggtcacccgctcaggaggatggtaaggtgtatataaatatgccaggacgcggacgcgccaagagaagcggatctggcgtgaagcagaccctgaatttcgacctgctgaagctggctggcgacgtggaatccaacccaggcccttctagaggccatatgaccgagtacaagcccacggtgcgcctcgccacccgcgacgacgtccccagggccgtacgcaccctcgccgccgcgttcgccgactaccccgccacgcgccacaccgtcgatccggaccgccacatcgagcgggtcaccgagctgcaagaactcttcctcacgcgcgtcgggctcgacatcggcaaggtgtgggtcgcggacgacggcgccgcggtggcggtctggaccacgccggagagcgtcgaagcgggggcggtgttcgccgagatcggcccgcgcatggccgagttgagcggttcccggctggccgcgcagcaacagatggaaggcctcctggcgccgcaccggcccaaggagcccgcgtggttcctggccaccgtcggcgtctcgcccgaccaccagggcaagggtctgggcagcgccgtcgtgctccccggagtggaggcggccgagcgcgccggggtgcccgccttcctggagacctccgcgccccgcaacctccccttctacgagcggctcggcttcaccgtcaccgccgacgtcgaggtgcccgaaggaccgcgcacctggtgcatgacccgcaagcccggtgcctga

SEQ ID NO: 1978 - DNA, 2445 bp, Artificial Sequence
  Synthetic Polynucleotide
atggccttaccagtgaccgccttgctcctgccgctggccttgctgctccacgccgccaggccggcatgcgaagtgcagctgcttgaaagtggcggcggactgattcagcctggcggatctctgagactgagctgtgccgccagcggcttcaccttttctagccacgccatgacctgggtccgacaggcacctggaaaagggcttgaatgggtgtccgccatcagcggctctggcgattacacacactacgccgacagcgtgaagggcagattcaccatcagcagagacaacagcaagaacaccgtgtacctccagatgaacagcctgagagccgaggacagcgccgtgtattattgcgccaaggatgaggatggcggcagcctgcttggacacagaggacaaggcaccctggtcaccgtttcttccggtaccggcggaggcggatctggcggcggaggtagcggtggcggaggatctgaattcggatctctcgagatcggctggctgttgctccaggcccctcggtgggtgttcaaggaggaagaccctattcacctgaggtgtcacagctggaagaacactgctctgcataaggtcacatatttacagaatggcaaaggcaggaagtattttcatcataattctgacttctacattccaaaagccacactcaaagacagcggctcctacttctgcagggggcttgttgggagtaaaaatgtgtcttcagagactgtgaacatcaccatcactcaaggtttggcagtgtcaaccatctcatcattctttccacctggctaccaagtgtccttctgcctggtcatggtgctgctgttcgccgtggataccggcctgtacttcagcgtcaagaccaacatccggtccagcaccagagactggaaggaccacaagttcaagtggcggaaggaccctcaggacaagagggccaagcgatctggatctggagcaacaaacttctcactactcaaacaagcaggtgacgtggaggagaatcccgggcctactagtgccaccatggactggatttggcgcatccttttccttgtcggcgctgctaccggcgcccattccgggcccgaagtgcagctggttgaatctggcggaggactggttcaggctggcggatctctgagactgtcttgtgccgccagcggcagaacctttagcatgggctggtttagacaggcccctggcaaagagagagagttcgtcgccgccatcacatactctggcggcagcccttactacgccgactctgtgaagggcagattcaccatcagccgggacaacgccaagaacaccgtgtacctccagatgaacagcctgaagcctgaggacaccgccgtgtactactgcgccgccaatccaacatacggcagcgactggaacgccgagaattggggccagggaacccaagtgacagtgtctagcggatccggcggcggaggatctggcggaggcggatctgggggcggaggctctttcgaaggcagcacgcgtacaacgccgggcgaaaggagttccttgccggccttttaccccggcacaagcggaagctgtagtgggtgtggaagcctcagcctcccacttcttgcgggcctcgtcgcggcagatgcagtagcttcacttcttattgtaggcgcggtatttctctgtgctcgaccaaggaggtcacccgctcaggaggatggtaaggtgtatataaatatgccaggacgcggacgcgccaagagaagcggatctggcgtgaagcagaccctgaatttcgacctgctgaagctggctggcgacgtggaatccaacccaggcccttctagaggccatatgaccgagtacaagcccacggtgcgcctcgccacccgcgacgacgtccccagggccgtacgcaccctcgccgccgcgttcgccgactaccccgccacgcgccacaccgtcgatccggaccgccacatcgagcgggtcaccgagctgcaagaactcttcctcacgcgcgtcgggctcgacatcggcaaggtgtgggtcgcggacgacggcgccgcggtggcggtctggaccacgccggagagcgtcgaagcgggggcggtgttcgccgagatcggcccgcgcatggccgagttgagcggttcccggctggccgcgcagcaacagatggaaggcctcctggcgccgcaccggcccaaggagcccgcgtggttcctggccaccgtcggcgtctcgcccgaccaccagggcaagggtctgggcagcgccgtcgtgctccccggagtggaggcggccgagcgcgccggggtgcccgccttcctggagacctccgcgccccgcaacctccccttctacgagcggctcggcttcaccgtcaccgccgacgtcgaggtgcccgaaggaccgcgcacctggtgcatgacccgcaagcccggtgcctga

SEQ ID NO: 1979 - DNA, 2895 bp, Artificial Sequence
  Synthetic Polynucleotide
atggccttaccagtgaccgccttgctcctgccgctggccttgctgctccacgccgccaggccggacatccagatgacacagagccctagcagcctgtctgccagcgtgggagacagagtgaccatcacatgcaaggccagcgaccacatcaacaactggctggcctggtatcagcagaagcctggacaggcccctaagctgctgatctacggcgctaccacactggaaacaggcgtgcccagcagattttctggcagcggctctggcaccgactacaccctgacaatatccagcctccagcctgaggacttcgccacctactactgtcagcagagctggaacaccccttggacattcggccagggcaccaagctggaaatcaagagactcgagggacagcctaaggccaatcctaccgtgacactgttccctccaagcagcgaagaactccaggccaacaaggccacacttgtgtgcctgatctccgacttctaccctggggctgtgacagtggcttggaaggccgatggatctcctgtgaaagccggcgtggaaaccaccaagccatccaagcagagcaacaacaaatacgccgccagctcctacctgagcctgacacctgagcagtggaagtcccacagatcctacagctgccaagtgacccacgaaggcagcaccgtggaaaagacagtggcccctacagagtgcagcggatccatcggctggctgttgctccaggcccctcggtgggtgttcaaggaggaagaccctattcacctgaggtgtcacagctggaagaacactgctctgcataaggtcacatatttacagaatggcaaaggcaggaagtattttcatcataattctgacttctacattccaaaagccacactcaaagacagcggctcctacttctgcagggggcttgttgggagtaaaaatgtgtcttcagagactgtgaacatcaccatcactcaaggtttggcagtgtcaaccatctcatcattctttccacctggctaccaagtgtccttctgcctggtcatggtgctgctgttcgccgtggataccggcctgtacttcagcgtcaagaccaacatccggtccagcaccagagactggaaggaccacaagttcaagtggcggaaggaccctcaggacaagagggccaagcgatctggatctggagcaacaaacttctcactactcaaacaagcaggtgacgtggaggagaatcccgggcctactagtatggactggatttggcgcatccttttccttgtcggcgctgctaccggcgcgcattccttcgaacaagttcagcttcaacagcctggcgctgagctggtcaaacctggcgcttctgtgaagatgagctgcaaagccagcggctacgccttcagcagctactggatcaactggatgaagcagaaacccggccagggactcgaatggatcggccaaatctatcccggcgacggcgacaccaactacaacggcaagttcaagggcagagccacactgaccgccgatacctctagcagcacagcctacatgcagctgagcagcctgaccagcgaagatagcgccgtgtacttctgtgcccggtccatcacaacagtcgtgggctgcgctatggactattggggccagggaacaagcgtgaccgtgtctagtacgcgtgcctctacaaagggaccctccgtgtttcctctggctcccagcagcaagtctacaagcggaggaacagccgctctgggctgcctggtcaaggattactttcccgagcctgtgaccgtgtcctggaatagcggagcactgacaagcggcgtgcacacctttccagccgtgctgcaaagcagcggcctgtactctctgagcagcgtggtcacagtgcctagctctagcctgggcacccagacctacatctgcaatgtgaaccacaagcctagcaacaccaaggtggacaagagagtggaacccaagagctgtggtaccacaacgccgggcgaaaggagttccttgccggccttttaccccggcacaagcggaagctgtagtgggtgtggaagcctcagcctcccacttcttgcgggcctcgtcgcggcagatgcagtagcttcacttcttattgtaggcgcggtatttctctgtgctcgaccaaggaggtcacccgctcaggaggatggtaaggtgtatataaatatgccaggacgcggacgcgccaagagaagcggatctggcgtgaagcagaccctgaatttcgacctgctgaagctggctggcgacgtggaatccaacccaggcccttctagaggcgggatccacaccatggctacctacgaggtgctgtgcgaggtggcaagaaagctgggcaccgacgacagagaagtggtgctgttcctgctgaacgtgttcatccctcagcctacactggcccagctgatcggtgcactgagagccctgaaagaggaaggccggctgacctttcctctgctggccgaatgcctgttcagagccggaagaagggatctgctgcgggacctgctgcatctggaccccagatttctggaaagacacctggccggcaccatgagctacttcagcccttaccagctgaccgtgctgcacgttgacggcgaactgtgcgccagagatattcggagcctgatcttcctgagcaaggacaccatcggcagccggtctacccctcagacatttctgcactgggtgtactgcatggaaaacctggacctgctcggccccacagatgtggatgccctgatgtccatgctgagaagcctgagcagagtggacctccagagacaggtgcagacactgatgggactgcacctgagcggacctagccacagccagcactacagacacacccct

SEQ ID NO: 1980 - DNA, 3054 bp, Artificial Sequence
  Synthetic Polynucleotide
atggccttaccagtgaccgccttgctcctgccgctggccttgctgctccacgccgccaggccggacatccagatgacacagagccctagcagcctgtctgccagcgtgggagacagagtgaccatcacatgcaaggccagcgaccacatcaacaactggctggcctggtatcagcagaagcctggacaggcccctaagctgctgatctacggcgctaccacactggaaacaggcgtgcccagcagattttctggcagcggctctggcaccgactacaccctgacaatatccagcctccagcctgaggacttcgccacctactactgtcagcagagctggaacaccccttggacattcggccagggcaccaagctggaaatcaagagactcgagggacagcctaaggccaatcctaccgtgacactgttccctccaagcagcgaagaactccaggccaacaaggccacacttgtgtgcctgatctccgacttctaccctggggctgtgacagtggcttggaaggccgatggatctcctgtgaaagccggcgtggaaaccaccaagccatccaagcagagcaacaacaaatacgccgccagctcctacctgagcctgacacctgagcagtggaagtcccacagatcctacagctgccaagtgacccacgaaggcagcaccgtggaaaagacagtggcccctacagagtgcagcggatccatcggctggctgttgctccaggcccctcggtgggtgttcaaggaggaagaccctattcacctgaggtgtcacagctggaagaacactgctctgcataaggtcacatatttacagaatggcaaaggcaggaagtattttcatcataattctgacttctacattccaaaagccacactcaaagacagcggctcctacttctgcagggggcttgttgggagtaaaaatgtgtcttcagagactgtgaacatcaccatcactcaaggtttggcagtgtcaaccatctcatcattctttccacctggctaccaagtgtccttctgcctggtcatggtgctgctgttcgccgtggataccggcctgtacttcagcgtcaagaccaacatccggtccagcaccagagactggaaggaccacaagttcaagtggcggaaggaccctcaggacaagagggccaagcgatctggatctggagcaacaaacttctcactactcaaacaagcaggtgacgtggaggagaatcccgggcctactagtatggactggatttggcgcatccttttccttgtcggcgctgctaccggcgcgcattccttcgaacaagttcagcttcaacagcctggcgctgagctggtcaaacctggcgcttctgtgaagatgagctgcaaagccagcggctacgccttcagcagctactggatcaactggatgaagcagaaacccggccagggactcgaatggatcggccaaatctatcccggcgacggcgacaccaactacaacggcaagttcaagggcagagccacactgaccgccgatacctctagcagcacagcctacatgcagctgagcagcctgaccagcgaagatagcgccgtgtacttctgtgcccggtccatcacaacagtcgtgggctgcgctatggactattggggccagggaacaagcgtgaccgtgtctagtacgcgtgcctctacaaagggaccctccgtgtttcctctggctcccagcagcaagtctacaagcggaggaacagccgctctgggctgcctggtcaaggattactttcccgagcctgtgaccgtgtcctggaatagcggagcactgacaagcggcgtgcacacctttccagccgtgctgcaaagcagcggcctgtactctctgagcagcgtggtcacagtgcctagctctagcctgggcacccagacctacatctgcaatgtgaaccacaagcctagcaacaccaaggtggacaagagagtggaacccaagagctgtggtaccacaacgccgggcgaaaggagttccttgccggccttttaccccggcacaagcggaagctgtagtgggtgtggaagcctcagcctcccacttcttgcgggcctcgtcgcggcagatgcagtagcttcacttcttattgtaggcgcggtatttctctgtgctcgaccaaggaggtcacccgctcaggaggatggtaaggtgtatataaatatgccaggacgcggacgcgccaagagaagcggatctggcgtgaagcagaccctgaatttcgacctgctgaagctggctggcgacgtggaatccaacccaggcccttctagaggcgggatccacaccatgtccgactccaaggaggtccctagccttccatttttgcgacacttgctcgaagagttggacagccatgaggacagcttgctgctgtttctgtgtcacgacgcggccccgggctgcacgacggtcacgcaagctttgtgctcgcttagccaacagcgcaagctgaccctcgcggctctggtcgagatgctctacgtgctgcagcgtatggatcttctcaagagccgcttcgggctcagcaaggagggggccgagcaattgctgggcacaagctttctcacgcgctaccgcaagctcatggtttgcgtgggtgaggagctcgactcgagcgagctacgcgctctacgcttgttcgcgtgcaacctgaatccgagcctgagcacggcgctttctgagagcagccgctttgtcgagcttgtactcgcgcttgaaaacgtaggactcgtctcgccatcgagtgtttccgtgcttgcggacatgttgcgcactcttcggcgcctcgatttgtgccagcagcttgttgagtacgaacaacaagagcaagccaggtaccgttactgttacgcggcctcgccctcattgccagttcgtacgttacgtcgggggcacggcgcgagtgaacacgagcagctgtgcatgcccgtgcaagaatcctctgacagccccgagctgctgcgcacgcccgtacaagaatcctccagcgacagccccgagcaaacgact

SEQ ID NO: 1981 - DNA, 2922 bp, Artificial Sequence
  Synthetic Polynucleotide
atggccttaccagtgaccgccttgctcctgccgctggccttgctgctccacgccgccaggccggacatccagatgacacagagccctagcagcctgtctgccagcgtgggagacagagtgaccatcacatgcaaggccagcgaccacatcaacaactggctggcctggtatcagcagaagcctggacaggcccctaagctgctgatctacggcgctaccacactggaaacaggcgtgcccagcagattttctggcagcggctctggcaccgactacaccctgacaatatccagcctccagcctgaggacttcgccacctactactgtcagcagagctggaacaccccttggacattcggccagggcaccaagctggaaatcaagagactcgagggacagcctaaggccaatcctaccgtgacactgttccctccaagcagcgaagaactccaggccaacaaggccacacttgtgtgcctgatctccgacttctaccctggggctgtgacagtggcttggaaggccgatggatctcctgtgaaagccggcgtggaaaccaccaagccatccaagcagagcaacaacaaatacgccgccagctcctacctgagcctgacacctgagcagtggaagtcccacagatcctacagctgccaagtgacccacgaaggcagcaccgtggaaaagacagtggcccctacagagtgcagcggatccatcggctggctgttgctccaggcccctcggtgggtgttcaaggaggaagaccctattcacctgaggtgtcacagctggaagaacactgctctgcataaggtcacatatttacagaatggcaaaggcaggaagtattttcatcataattctgacttctacattccaaaagccacactcaaagacagcggctcctacttctgcagggggcttgttgggagtaaaaatgtgtcttcagagactgtgaacatcaccatcactcaaggtttggcagtgtcaaccatctcatcattctttccacctggctaccaagtgtccttctgcctggtcatggtgctgctgttcgccgtggataccggcctgtacttcagcgtcaagaccaacatccggtccagcaccagagactggaaggaccacaagttcaagtggcggaaggaccctcaggacaagagggccaagcgatctggatctggagcaacaaacttctcactactcaaacaagcaggtgacgtggaggagaatcccgggcctactagtatggactggatttggcgcatccttttccttgtcggcgctgctaccggcgcgcattccttcgaacaagttcagcttcaacagcctggcgctgagctggtcaaacctggcgcttctgtgaagatgagctgcaaagccagcggctacgccttcagcagctactggatcaactggatgaagcagaaacccggccagggactcgaatggatcggccaaatctatcccggcgacggcgacaccaactacaacggcaagttcaagggcagagccacactgaccgccgatacctctagcagcacagcctacatgcagctgagcagcctgaccagcgaagatagcgccgtgtacttctgtgcccggtccatcacaacagtcgtgggctgcgctatggactattggggccagggaacaagcgtgaccgtgtctagtacgcgtgcctctacaaagggaccctccgtgtttcctctggctcccagcagcaagtctacaagcggaggaacagccgctctgggctgcctggtcaaggattactttcccgagcctgtgaccgtgtcctggaatagcggagcactgacaagcggcgtgcacacctttccagccgtgctgcaaagcagcggcctgtactctctgagcagcgtggtcacagtgcctagctctagcctgggcacccagacctacatctgcaatgtgaaccacaagcctagcaacaccaaggtggacaagagagtggaacccaagagctgtggtaccacaacgccgggcgaaaggagttccttgccggccttttaccccggcacaagcggaagctgtagtgggtgtggaagcctcagcctcccacttcttgcgggcctcgtcgcggcagatgcagtagcttcacttcttattgtaggcgcggtatttctctgtgctcgaccaaggaggtcacccgctcaggaggatggtaaggtgtatataaatatgccaggacgcggacgcgccaagagaagcggatctggcgtgaagcagaccctgaatttcgacctgctgaagctggctggcgacgtggaatccaacccaggcccttctagaggccatatgaccgagtacaagcccacggtgcgcctcgccacccgcgacgacgtccccagggccgtacgcaccctcgccgccgcgttcgccgactaccccgccacgcgccacaccgtcgatccggaccgccacatcgagcgggtcaccgagctgcaagaactcttcctcacgcgcgtcgggctcgacatcggcaaggtgtgggtcgcggacgacggcgccgcggtggcggtctggaccacgccggagagcgtcgaagcgggggcggtgttcgccgagatcggcccgcgcatggccgagttgagcggttcccggctggccgcgcagcaacagatggaaggcctcctggcgccgcaccggcccaaggagcccgcgtggttcctggccaccgtcggcgtctcgcccgaccaccagggcaagggtctgggcagcgccgtcgtgctccccggagtggaggcggccgagcgcgccggggtgcccgccttcctggagacctccgcgccccgcaacctccccttctacgagcggctcggcttcaccgtcaccgccgacgtcgaggtgcccgaaggaccgcgcacctggtgcatgacccgcaagcccggtgcctga

SEQ ID NO: 1982 - DNA, 3333 bp, Artificial Sequence
  Synthetic Polynucleotide
atggccttaccagtgaccgccttgctcctgccgctggccttgctgctccacgccgccaggccggaagtgcagctggttgaatctggcggaggactggttcaggctggcggatctctgagactgtcttgtgccgccagcggcagaacctttagcatgggctggtttagacaggcccctggcaaagagagagagttcgtcgccgccatcacatactctggcggcagcccttactacgccgactctgtgaagggcagattcaccatcagccgggacaacgccaagaacaccgtgtacctccagatgaacagcctgaagcctgaggacaccgccgtgtactactgcgccgccaatccaacatacggcagcgactggaacgccgagaattggggccagggaacccaagtgacagtgtctagcggtaccggcggaggcggatctggcggcggaggtagcggtggcggaggatctgaattcgacatccagatgacacagagccctagcagcctgtctgccagcgtgggagacagagtgaccatcacatgcaaggccagcgaccacatcaacaactggctggcctggtatcagcagaagcctggacaggcccctaagctgctgatctacggcgctaccacactggaaacaggcgtgcccagcagattttctggcagcggctctggcaccgactacaccctgacaatatccagcctccagcctgaggacttcgccacctactactgtcagcagagctggaacaccccttggacattcggccagggcaccaagctggaaatcaagagactcgagggacagcctaaggccaatcctaccgtgacactgttccctccaagcagcgaagaactccaggccaacaaggccacacttgtgtgcctgatctccgacttctaccctggggctgtgacagtggcttggaaggccgatggatctcctgtgaaagccggcgtggaaaccaccaagccatccaagcagagcaacaacaaatacgccgccagctcctacctgagcctgacacctgagcagtggaagtcccacagatcctacagctgccaagtgacccacgaaggcagcaccgtggaaaagacagtggcccctacagagtgcagcggatccatcggctggctgttgctccaggcccctcggtgggtgttcaaggaggaagaccctattcacctgaggtgtcacagctggaagaacactgctctgcataaggtcacatatttacagaatggcaaaggcaggaagtattttcatcataattctgacttctacattccaaaagccacactcaaagacagcggctcctacttctgcagggggcttgttgggagtaaaaatgtgtcttcagagactgtgaacatcaccatcactcaaggtttggcagtgtcaaccatctcatcattctttccacctggctaccaagtgtccttctgcctggtcatggtgctgctgttcgccgtggataccggcctgtacttcagcgtcaagaccaacatccggtccagcaccagagactggaaggaccacaagttcaagtggcggaaggaccctcaggacaagagggccaagcgatctggatctggagcaacaaacttctcactactcaaacaagcaggtgacgtggaggagaatcccgggcctactagtatggactggatttggcgcatccttttccttgtcggcgctgctaccggcgcgcattccttcgaacaagttcagcttcaacagcctggcgctgagctggtcaaacctggcgcttctgtgaagatgagctgcaaagccagcggctacgccttcagcagctactggatcaactggatgaagcagaaacccggccagggactcgaatggatcggccaaatctatcccggcgacggcgacaccaactacaacggcaagttcaagggcagagccacactgaccgccgatacctctagcagcacagcctacatgcagctgagcagcctgaccagcgaagatagcgccgtgtacttctgtgcccggtccatcacaacagtcgtgggctgcgctatggactattggggccagggaacaagcgtgaccgtgtctagtacgcgtgcctctacaaagggaccctccgtgtttcctctggctcccagcagcaagtctacaagcggaggaacagccgctctgggctgcctggtcaaggattactttcccgagcctgtgaccgtgtcctggaatagcggagcactgacaagcggcgtgcacacctttccagccgtgctgcaaagcagcggcctgtactctctgagcagcgtggtcacagtgcctagctctagcctgggcacccagacctacatctgcaatgtgaaccacaagcctagcaacaccaaggtggacaagagagtggaacccaagagctgtggtaccacaacgccgggcgaaaggagttccttgccggccttttaccccggcacaagcggaagctgtagtgggtgtggaagcctcagcctcccacttcttgcgggcctcgtcgcggcagatgcagtagcttcacttcttattgtaggcgcggtatttctctgtgctcgaccaaggaggtcacccgctcaggaggatggtaaggtgtatataaatatgccaggacgcggacgcgccaagagaagcggatctggcgtgaagcagaccctgaatttcgacctgctgaagctggctggcgacgtggaatccaacccaggcccttctagaggccatatgaccgagtacaagcccacggtgcgcctcgccacccgcgacgacgtccccagggccgtacgcaccctcgccgccgcgttcgccgactaccccgccacgcgccacaccgtcgatccggaccgccacatcgagcgggtcaccgagctgcaagaactcttcctcacgcgcgtcgggctcgacatcggcaaggtgtgggtcgcggacgacggcgccgcggtggcggtctggaccacgccggagagcgtcgaagcgggggcggtgttcgccgagatcggcccgcgcatggccgagttgagcggttcccggctggccgcgcagcaacagatggaaggcctcctggcgccgcaccggcccaaggagcccgcgtggttcctggccaccgtcggcgtctcgcccgaccaccagggcaagggtctgggcagcgccgtcgtgctccccggagtggaggcggccgagcgcgccggggtgcccgccttcctggagacctccgcgccccgcaacctccccttctacgagcggctcggcttcaccgtcaccgccgacgtcgaggtgcccgaaggaccgcgcacctggtgcatgacccgcaagcccggtgcctga

SEQ ID NO: 1983 - DNA, 3744 bp, Artificial Sequence
  Synthetic Polynucleotide
atggccttaccagtgaccgccttgctcctgccgctggccttgctgctccacgccgccaggccggaagtgcagctggttgaatctggcggaggactggttcaggctggcggatctctgagactgtcttgtgccgccagcggcagaacctttagcatgggctggtttagacaggcccctggcaaagagagagagttcgtcgccgccatcacatactctggcggcagcccttactacgccgactctgtgaagggcagattcaccatcagccgggacaacgccaagaacaccgtgtacctccagatgaacagcctgaagcctgaggacaccgccgtgtactactgcgccgccaatccaacatacggcagcgactggaacgccgagaattggggccagggaacccaagtgacagtgtctagcggtaccggcggaggcggatctggcggcggaggtagcggtggcggaggatctgaattcgacatccagatgacacagagccctagcagcctgtctgccagcgtgggagacagagtgaccatcacatgcaaggccagcgaccacatcaacaactggctggcctggtatcagcagaagcctggacaggcccctaagctgctgatctacggcgctaccacactggaaacaggcgtgcccagcagattttctggcagcggctctggcaccgactacaccctgacaatatccagcctccagcctgaggacttcgccacctactactgtcagcagagctggaacaccccttggacattcggccagggcaccaagctggaaatcaagagactcgagggacagcctaaggccaatcctaccgtgacactgttccctccaagcagcgaagaactccaggccaacaaggccacacttgtgtgcctgatctccgacttctaccctggggctgtgacagtggcttggaaggccgatggatctcctgtgaaagccggcgtggaaaccaccaagccatccaagcagagcaacaacaaatacgccgccagctcctacctgagcctgacacctgagcagtggaagtcccacagatcctacagctgccaagtgacccacgaaggcagcaccgtggaaaagacagtggcccctacagagtgcagcggatccatcggctggctgttgctccaggcccctcggtgggtgttcaaggaggaagaccctattcacctgaggtgtcacagctggaagaacactgctctgcataaggtcacatatttacagaatggcaaaggcaggaagtattttcatcataattctgacttctacattccaaaagccacactcaaagacagcggctcctacttctgcagggggcttgttgggagtaaaaatgtgtcttcagagactgtgaacatcaccatcactcaaggtttggcagtgtcaaccatctcatcattctttccacctggctaccaagtgtccttctgcctggtcatggtgctgctgttcgccgtggataccggcctgtacttcagcgtcaagaccaacatccggtccagcaccagagactggaaggaccacaagttcaagtggcggaaggaccctcaggacaagagggccaagcgatctggatctggagcaacaaacttctcactactcaaacaagcaggtgacgtggaggagaatcccgggcctactagtatggactggatttggcgcatccttttccttgtcggcgctgctaccggcgcgcattccgggcccgaagtgcaactggttgaatccggtggcggcctggtgcaagcaggcggatctctcagacttagctgtgccgcctccggcagaaccttcacaatgggatggtttaggcaggctccagggaaagagagagagttcgtcgccgccatctctctgtctcccacactggcctactacgccgactctgtgaaaggccggttcaccatctccagagataatgccaagaacaccgtggtgctgcaaatgaactctctgaaacccgaggatacagccctgtactattgtgccgctgaccggaagtccgtgatgagcatcagacccgattactggggacagggcacacaagtcacagtgtcctctggatccggcggcggaggatctggcggaggcggatctgggggcggaggctctttcgaacaagttcagcttcaacagcctggcgctgagctggtcaaacctggcgcttctgtgaagatgagctgcaaagccagcggctacgccttcagcagctactggatcaactggatgaagcagaaacccggccagggactcgaatggatcggccaaatctatcccggcgacggcgacaccaactacaacggcaagttcaagggcagagccacactgaccgccgatacctctagcagcacagcctacatgcagctgagcagcctgaccagcgaagatagcgccgtgtacttctgtgcccggtccatcacaacagtcgtgggctgcgctatggactattggggccagggaacaagcgtgaccgtgtctagtacgcgtgcctctacaaagggaccctccgtgtttcctctggctcccagcagcaagtctacaagcggaggaacagccgctctgggctgcctggtcaaggattactttcccgagcctgtgaccgtgtcctggaatagcggagcactgacaagcggcgtgcacacctttccagccgtgctgcaaagcagcggcctgtactctctgagcagcgtggtcacagtgcctagctctagcctgggcacccagacctacatctgcaatgtgaaccacaagcctagcaacaccaaggtggacaagagagtggaacccaagagctgtggtaccacaacgccgggcgaaaggagttccttgccggccttttaccccggcacaagcggaagctgtagtgggtgtggaagcctcagcctcccacttcttgcgggcctcgtcgcggcagatgcagtagcttcacttcttattgtaggcgcggtatttctctgtgctcgaccaaggaggtcacccgctcaggaggatggtaaggtgtatataaatatgccaggacgcggacgcgccaagagaagcggatctggcgtgaagcagaccctgaatttcgacctgctgaagctggctggcgacgtggaatccaacccaggcccttctagaggccatatgaccgagtacaagcccacggtgcgcctcgccacccgcgacgacgtccccagggccgtacgcaccctcgccgccgcgttcgccgactaccccgccacgcgccacaccgtcgatccggaccgccacatcgagcgggtcaccgagctgcaagaactcttcctcacgcgcgtcgggctcgacatcggcaaggtgtgggtcgcggacgacggcgccgcggtggcggtctggaccacgccggagagcgtcgaagcgggggcggtgttcgccgagatcggcccgcgcatggccgagttgagcggttcccggctggccgcgcagcaacagatggaaggcctcctggcgccgcaccggcccaaggagcccgcgtggttcctggccaccgtcggcgtctcgcccgaccaccagggcaagggtctgggcagcgccgtcgtgctccccggagtggaggcggccgagcgcgccggggtgcccgccttcctggagacctccgcgccccgcaacctccccttctacgagcggctcggcttcaccgtcaccgccgacgtcgaggtgcccgaaggaccgcgcacctggtgcatgacccgcaagcccggtgcctga

SEQ ID NO: 1984 - DNA, 2943 bp, Artificial Sequence
  Synthetic Polynucleotide
atggccttaccagtgaccgccttgctcctgccgctggccttgctgctccacgccgccaggccggaagtgcagctggttgaatctggcggaggactggttcaggctggcggatctctgagactgtcttgtgccgccagcggcagaacctttagcatgggctggtttagacaggcccctggcaaagagagagagttcgtcgccgccatcacatactctggcggcagcccttactacgccgactctgtgaagggcagattcaccatcagccgggacaacgccaagaacaccgtgtacctccagatgaacagcctgaagcctgaggacaccgccgtgtactactgcgccgccaatccaacatacggcagcgactggaacgccgagaattggggccagggaacccaagtgacagtgtctagcctcgagggacagcctaaggccaatcctaccgtgacactgttccctccaagcagcgaagaactccaggccaacaaggccacacttgtgtgcctgatctccgacttctaccctggggctgtgacagtggcttggaaggccgatggatctcctgtgaaagccggcgtggaaaccaccaagccatccaagcagagcaacaacaaatacgccgccagctcctacctgagcctgacacctgagcagtggaagtcccacagatcctacagctgccaagtgacccacgaaggcagcaccgtggaaaagacagtggcccctacagagtgcagcggatccatcggctggctgttgctccaggcccctcggtgggtgttcaaggaggaagaccctattcacctgaggtgtcacagctggaagaacactgctctgcataaggtcacatatttacagaatggcaaaggcaggaagtattttcatcataattctgacttctacattccaaaagccacactcaaagacagcggctcctacttctgcagggggcttgttgggagtaaaaatgtgtcttcagagactgtgaacatcaccatcactcaaggtttggcagtgtcaaccatctcatcattctttccacctggctaccaagtgtccttctgcctggtcatggtgctgctgttcgccgtggataccggcctgtacttcagcgtcaagaccaacatccggtccagcaccagagactggaaggaccacaagttcaagtggcggaaggaccctcaggacaagagggccaagcgatctggatctggagcaacaaacttctcactactcaaacaagcaggtgacgtggaggagaatcccgggcctactagtatggactggatttggcgcatccttttccttgtcggcgctgctaccggcgcgcattccgggcccgaagtgcaactggttgaatccggtggcggcctggtgcaagcaggcggatctctcagacttagctgtgccgcctccggcagaaccttcacaatgggatggtttaggcaggctccagggaaagagagagagttcgtcgccgccatctctctgtctcccacactggcctactacgccgactctgtgaaaggccggttcaccatctccagagataatgccaagaacaccgtggtgctgcaaatgaactctctgaaacccgaggatacagccctgtactattgtgccgctgaccggaagtccgtgatgagcatcagacccgattactggggacagggcacacaagtcacagtgtcctctacgcgtgcctctacaaagggaccctccgtgtttcctctggctcccagcagcaagtctacaagcggaggaacagccgctctgggctgcctggtcaaggattactttcccgagcctgtgaccgtgtcctggaatagcggagcactgacaagcggcgtgcacacctttccagccgtgctgcaaagcagcggcctgtactctctgagcagcgtggtcacagtgcctagctctagcctgggcacccagacctacatctgcaatgtgaaccacaagcctagcaacaccaaggtggacaagagagtggaacccaagagctgtggtaccacaacgccgggcgaaaggagttccttgccggccttttaccccggcacaagcggaagctgtagtgggtgtggaagcctcagcctcccacttcttgcgggcctcgtcgcggcagatgcagtagcttcacttcttattgtaggcgcggtatttctctgtgctcgaccaaggaggtcacccgctcaggaggatggtaaggtgtatataaatatgccaggacgcggacgcgccaagagaagcggatctggcgtgaagcagaccctgaatttcgacctgctgaagctggctggcgacgtggaatccaacccaggcccttctagaggccatatgaccgagtacaagcccacggtgcgcctcgccacccgcgacgacgtccccagggccgtacgcaccctcgccgccgcgttcgccgactaccccgccacgcgccacaccgtcgatccggaccgccacatcgagcgggtcaccgagctgcaagaactcttcctcacgcgcgtcgggctcgacatcggcaaggtgtgggtcgcggacgacggcgccgcggtggcggtctggaccacgccggagagcgtcgaagcgggggcggtgttcgccgagatcggcccgcgcatggccgagttgagcggttcccggctggccgcgcagcaacagatggaaggcctcctggcgccgcaccggcccaaggagcccgcgtggttcctggccaccgtcggcgtctcgcccgaccaccagggcaagggtctgggcagcgccgtcgtgctccccggagtggaggcggccgagcgcgccggggtgcccgccttcctggagacctccgcgccccgcaacctccccttctacgagcggctcggcttcaccgtcaccgccgacgtcgaggtgcccgaaggaccgcgcacctggtgcatgacccgcaagcccggtgcctga

SEQ ID NO: 1985 - DNA, 2967 bp, Artificial Sequence
  Synthetic Polynucleotide
atggccttaccagtgaccgccttgctcctgccgctggccttgctgctccacgccgccaggccggacatccagatgacacagagccctagcagcctgtctgccagcgtgggagacagagtgaccatcacatgcaaggccagcgaccacatcaacaactggctggcctggtatcagcagaagcctggacaggcccctaagctgctgatctacggcgctaccacactggaaacaggcgtgcccagcagattttctggcagcggctctggcaccgactacaccctgacaatatccagcctccagcctgaggacttcgccacctactactgtcagcagagctggaacaccccttggacattcggccagggcaccaagctggaaatcaagagactcgaggacctgaagaacgtgttcccacctgaggtggccgtgttcgagcctagcgaggccgagatcagccacacccagaaagccaccctcgtgtgcctggctaccggcttctaccccgaccatgtggaactgtcttggtgggtcaacggcaaagaggtgcacagcggcgtgtctaccgacccccagccactgaaagaacagcccgccctgaacgacagccggtactgcctgagcagcagactgagagtgtccgccaccttctggcagaacccccggaaccacttcagatgccaggtgcagttctacggcctgagcgagaacgacgagtggacccaggacagagccaagcccgtgacccagatcgtgtctgccgaagcctggggcagagccgattgcggatccatcggctggctgttgctccaggcccctcggtgggtgttcaaggaggaagaccctattcacctgaggtgtcacagctggaagaacactgctctgcataaggtcacatatttacagaatggcaaaggcaggaagtattttcatcataattctgacttctacattccaaaagccacactcaaagacagcggctcctacttctgcagggggcttgttgggagtaaaaatgtgtcttcagagactgtgaacatcaccatcactcaaggtttggcagtgtcaaccatctcatcattctttccacctggctaccaagtgtccttctgcctggtcatggtgctgctgttcgccgtggataccggcctgtacttcagcgtcaagaccaacatccggtccagcaccagagactggaaggaccacaagttcaagtggcggaaggaccctcaggacaagagggccaagcgatctggatctggagcaacaaacttctcactactcaaacaagcaggtgacgtggaggagaatcccgggcctactagtatggactggatttggcgcatccttttccttgtcggcgctgctaccggcgcgcattccttcgaacaagttcagcttcaacagcctggcgctgagctggtcaaacctggcgcttctgtgaagatgagctgcaaagccagcggctacgccttcagcagctactggatcaactggatgaagcagaaacccggccagggactcgaatggatcggccaaatctatcccggcgacggcgacaccaactacaacggcaagttcaagggcagagccacactgaccgccgatacctctagcagcacagcctacatgcagctgagcagcctgaccagcgaagatagcgccgtgtacttctgtgcccggtccatcacaacagtcgtgggctgcgctatggactattggggccagggaacaagcgtgaccgtgtctagtacgcgtatccagaaccctgatcctgccgtgtaccagctgcgggatagcaagagcagcgacaagagcgtgtgtctgttcaccgacttcgacagccagaccaacgtgtcccagagcaaggactccgacgtgtacatcaccgataagaccgtgctggacatgcggagcatggacttcaagagcaactccgccgtggcctggtccaacaagtccgatttcgcctgcgccaacgccttcaacaacagcattatccccgaggacacattcttcccaagccccgagagcagctgcggtaccacaacgccgggcgaaaggagttccttgccggccttttaccccggcacaagcggaagctgtagtgggtgtggaagcctcagcctcccacttcttgcgggcctcgtcgcggcagatgcagtagcttcacttcttattgtaggcgcggtatttctctgtgctcgaccaaggaggtcacccgctcaggaggatggtaaggtgtatataaatatgccaggacgcggacgcgccaagagaagcggatctggcgtgaagcagaccctgaatttcgacctgctgaagctggctggcgacgtggaatccaacccaggcccttctagaggccatatgaccgagtacaagcccacggtgcgcctcgccacccgcgacgacgtccccagggccgtacgcaccctcgccgccgcgttcgccgactaccccgccacgcgccacaccgtcgatccggaccgccacatcgagcgggtcaccgagctgcaagaactcttcctcacgcgcgtcgggctcgacatcggcaaggtgtgggtcgcggacgacggcgccgcggtggcggtctggaccacgccggagagcgtcgaagcgggggcggtgttcgccgagatcggcccgcgcatggccgagttgagcggttcccggctggccgcgcagcaacagatggaaggcctcctggcgccgcaccggcccaaggagcccgcgtggttcctggccaccgtcggcgtctcgcccgaccaccagggcaagggtctgggcagcgccgtcgtgctccccggagtggaggcggccgagcgcgccggggtgcccgccttcctggagacctccgcgccccgcaacctccccttctacgagcggctcggcttcaccgtcaccgccgacgtcgaggtgcccgaaggaccgcgcacctggtgcatgacccgcaagcccggtgcctga

SEQ ID NO: 1986 - DNA, 3378 bp, Artificial Sequence
  Synthetic Polynucleotide
atggccttaccagtgaccgccttgctcctgccgctggccttgctgctccacgccgccaggccggaagtgcagctggttgaatctggcggaggactggttcaggctggcggatctctgagactgtcttgtgccgccagcggcagaacctttagcatgggctggtttagacaggcccctggcaaagagagagagttcgtcgccgccatcacatactctggcggcagcccttactacgccgactctgtgaagggcagattcaccatcagccgggacaacgccaagaacaccgtgtacctccagatgaacagcctgaagcctgaggacaccgccgtgtactactgcgccgccaatccaacatacggcagcgactggaacgccgagaattggggccagggaacccaagtgacagtgtctagcggtaccggcggaggcggatctggcggcggaggtagcggtggcggaggatctgaattcgacatccagatgacacagagccctagcagcctgtctgccagcgtgggagacagagtgaccatcacatgcaaggccagcgaccacatcaacaactggctggcctggtatcagcagaagcctggacaggcccctaagctgctgatctacggcgctaccacactggaaacaggcgtgcccagcagattttctggcagcggctctggcaccgactacaccctgacaatatccagcctccagcctgaggacttcgccacctactactgtcagcagagctggaacaccccttggacattcggccagggcaccaagctggaaatcaagagactcgaggacctgaagaacgtgttcccacctgaggtggccgtgttcgagcctagcgaggccgagatcagccacacccagaaagccaccctcgtgtgcctggctaccggcttctaccccgaccatgtggaactgtcttggtgggtcaacggcaaagaggtgcacagcggcgtgtctaccgacccccagccactgaaagaacagcccgccctgaacgacagccggtactgcctgagcagcagactgagagtgtccgccaccttctggcagaacccccggaaccacttcagatgccaggtgcagttctacggcctgagcgagaacgacgagtggacccaggacagagccaagcccgtgacccagatcgtgtctgccgaagcctggggcagagccgattgcggatccatcggctggctgttgctccaggcccctcggtgggtgttcaaggaggaagaccctattcacctgaggtgtcacagctggaagaacactgctctgcataaggtcacatatttacagaatggcaaaggcaggaagtattttcatcataattctgacttctacattccaaaagccacactcaaagacagcggctcctacttctgcagggggcttgttgggagtaaaaatgtgtcttcagagactgtgaacatcaccatcactcaaggtttggcagtgtcaaccatctcatcattctttccacctggctaccaagtgtccttctgcctggtcatggtgctgctgttcgccgtggataccggcctgtacttcagcgtcaagaccaacatccggtccagcaccagagactggaaggaccacaagttcaagtggcggaaggaccctcaggacaagagggccaagcgatctggatctggagcaacaaacttctcactactcaaacaagcaggtgacgtggaggagaatcccgggcctactagtatggactggatttggcgcatccttttccttgtcggcgctgctaccggcgcgcattccttcgaacaagttcagcttcaacagcctggcgctgagctggtcaaacctggcgcttctgtgaagatgagctgcaaagccagcggctacgccttcagcagctactggatcaactggatgaagcagaaacccggccagggactcgaatggatcggccaaatctatcccggcgacggcgacaccaactacaacggcaagttcaagggcagagccacactgaccgccgatacctctagcagcacagcctacatgcagctgagcagcctgaccagcgaagatagcgccgtgtacttctgtgcccggtccatcacaacagtcgtgggctgcgctatggactattggggccagggaacaagcgtgaccgtgtctagtacgcgtatccagaaccctgatcctgccgtgtaccagctgcgggatagcaagagcagcgacaagagcgtgtgtctgttcaccgacttcgacagccagaccaacgtgtcccagagcaaggactccgacgtgtacatcaccgataagaccgtgctggacatgcggagcatggacttcaagagcaactccgccgtggcctggtccaacaagtccgatttcgcctgcgccaacgccttcaacaacagcattatccccgaggacacattcttcccaagccccgagagcagctgcggtaccacaacgccgggcgaaaggagttccttgccggccttttaccccggcacaagcggaagctgtagtgggtgtggaagcctcagcctcccacttcttgcgggcctcgtcgcggcagatgcagtagcttcacttcttattgtaggcgcggtatttctctgtgctcgaccaaggaggtcacccgctcaggaggatggtaaggtgtatataaatatgccaggacgcggacgcgccaagagaagcggatctggcgtgaagcagaccctgaatttcgacctgctgaagctggctggcgacgtggaatccaacccaggcccttctagaggccatatgaccgagtacaagcccacggtgcgcctcgccacccgcgacgacgtccccagggccgtacgcaccctcgccgccgcgttcgccgactaccccgccacgcgccacaccgtcgatccggaccgccacatcgagcgggtcaccgagctgcaagaactcttcctcacgcgcgtcgggctcgacatcggcaaggtgtgggtcgcggacgacggcgccgcggtggcggtctggaccacgccggagagcgtcgaagcgggggcggtgttcgccgagatcggcccgcgcatggccgagttgagcggttcccggctggccgcgcagcaacagatggaaggcctcctggcgccgcaccggcccaaggagcccgcgtggttcctggccaccgtcggcgtctcgcccgaccaccagggcaagggtctgggcagcgccgtcgtgctccccggagtggaggcggccgagcgcgccggggtgcccgccttcctggagacctccgcgccccgcaacctccccttctacgagcggctcggcttcaccgtcaccgccgacgtcgaggtgcccgaaggaccgcgcacctggtgcatgacccgcaagcccggtgcctga

SEQ ID NO: 1987 - DNA, 3789 bp, Artificial Sequence
  Synthetic Polynucleotide
atggccttaccagtgaccgccttgctcctgccgctggccttgctgctccacgccgccaggccggaagtgcagctggttgaatctggcggaggactggttcaggctggcggatctctgagactgtcttgtgccgccagcggcagaacctttagcatgggctggtttagacaggcccctggcaaagagagagagttcgtcgccgccatcacatactctggcggcagcccttactacgccgactctgtgaagggcagattcaccatcagccgggacaacgccaagaacaccgtgtacctccagatgaacagcctgaagcctgaggacaccgccgtgtactactgcgccgccaatccaacatacggcagcgactggaacgccgagaattggggccagggaacccaagtgacagtgtctagcggtaccggcggaggcggatctggcggcggaggtagcggtggcggaggatctgaattcgacatccagatgacacagagccctagcagcctgtctgccagcgtgggagacagagtgaccatcacatgcaaggccagcgaccacatcaacaactggctggcctggtatcagcagaagcctggacaggcccctaagctgctgatctacggcgctaccacactggaaacaggcgtgcccagcagattttctggcagcggctctggcaccgactacaccctgacaatatccagcctccagcctgaggacttcgccacctactactgtcagcagagctggaacaccccttggacattcggccagggcaccaagctggaaatcaagagactcgaggacctgaagaacgtgttcccacctgaggtggccgtgttcgagcctagcgaggccgagatcagccacacccagaaagccaccctcgtgtgcctggctaccggcttctaccccgaccatgtggaactgtcttggtgggtcaacggcaaagaggtgcacagcggcgtgtctaccgacccccagccactgaaagaacagcccgccctgaacgacagccggtactgcctgagcagcagactgagagtgtccgccaccttctggcagaacccccggaaccacttcagatgccaggtgcagttctacggcctgagcgagaacgacgagtggacccaggacagagccaagcccgtgacccagatcgtgtctgccgaagcctggggcagagccgattgcggatccatcggctggctgttgctccaggcccctcggtgggtgttcaaggaggaagaccctattcacctgaggtgtcacagctggaagaacactgctctgcataaggtcacatatttacagaatggcaaaggcaggaagtattttcatcataattctgacttctacattccaaaagccacactcaaagacagcggctcctacttctgcagggggcttgttgggagtaaaaatgtgtcttcagagactgtgaacatcaccatcactcaaggtttggcagtgtcaaccatctcatcattctttccacctggctaccaagtgtccttctgcctggtcatggtgctgctgttcgccgtggataccggcctgtacttcagcgtcaagaccaacatccggtccagcaccagagactggaaggaccacaagttcaagtggcggaaggaccctcaggacaagagggccaagcgatctggatctggagcaacaaacttctcactactcaaacaagcaggtgacgtggaggagaatcccgggcctactagtatggactggatttggcgcatccttttccttgtcggcgctgctaccggcgcgcattccgggcccgaagtgcaactggttgaatccggtggcggcctggtgcaagcaggcggatctctcagacttagctgtgccgcctccggcagaaccttcacaatgggatggtttaggcaggctccagggaaagagagagagttcgtcgccgccatctctctgtctcccacactggcctactacgccgactctgtgaaaggccggttcaccatctccagagataatgccaagaacaccgtggtgctgcaaatgaactctctgaaacccgaggatacagccctgtactattgtgccgctgaccggaagtccgtgatgagcatcagacccgattactggggacagggcacacaagtcacagtgtcctctggatccggcggcggaggatctggcggaggcggatctgggggcggaggctctttcgaacaagttcagcttcaacagcctggcgctgagctggtcaaacctggcgcttctgtgaagatgagctgcaaagccagcggctacgccttcagcagctactggatcaactggatgaagcagaaacccggccagggactcgaatggatcggccaaatctatcccggcgacggcgacaccaactacaacggcaagttcaagggcagagccacactgaccgccgatacctctagcagcacagcctacatgcagctgagcagcctgaccagcgaagatagcgccgtgtacttctgtgcccggtccatcacaacagtcgtgggctgcgctatggactattggggccagggaacaagcgtgaccgtgtctagtacgcgtatccagaaccctgatcctgccgtgtaccagctgcgggatagcaagagcagcgacaagagcgtgtgtctgttcaccgacttcgacagccagaccaacgtgtcccagagcaaggactccgacgtgtacatcaccgataagaccgtgctggacatgcggagcatggacttcaagagcaactccgccgtggcctggtccaacaagtccgatttcgcctgcgccaacgccttcaacaacagcattatccccgaggacacattcttcccaagccccgagagcagctgcggtaccacaacgccgggcgaaaggagttccttgccggccttttaccccggcacaagcggaagctgtagtgggtgtggaagcctcagcctcccacttcttgcgggcctcgtcgcggcagatgcagtagcttcacttcttattgtaggcgcggtatttctctgtgctcgaccaaggaggtcacccgctcaggaggatggtaaggtgtatataaatatgccaggacgcggacgcgccaagagaagcggatctggcgtgaagcagaccctgaatttcgacctgctgaagctggctggcgacgtggaatccaacccaggcccttctagaggccatatgaccgagtacaagcccacggtgcgcctcgccacccgcgacgacgtccccagggccgtacgcaccctcgccgccgcgttcgccgactaccccgccacgcgccacaccgtcgatccggaccgccacatcgagcgggtcaccgagctgcaagaactcttcctcacgcgcgtcgggctcgacatcggcaaggtgtgggtcgcggacgacggcgccgcggtggcggtctggaccacgccggagagcgtcgaagcgggggcggtgttcgccgagatcggcccgcgcatggccgagttgagcggttcccggctggccgcgcagcaacagatggaaggcctcctggcgccgcaccggcccaaggagcccgcgtggttcctggccaccgtcggcgtctcgcccgaccaccagggcaagggtctgggcagcgccgtcgtgctccccggagtggaggcggccgagcgcgccggggtgcccgccttcctggagacctccgcgccccgcaacctccccttctacgagcggctcggcttcaccgtcaccgccgacgtcgaggtgcccgaaggaccgcgcacctggtgcatgacccgcaagcccggtgcctga

SEQ ID NO: 1988 - DNA, 2988 bp, Artificial Sequence
  Synthetic Polynucleotide
atggccttaccagtgaccgccttgctcctgccgctggccttgctgctccacgccgccaggccggaagtgcagctggttgaatctggcggaggactggttcaggctggcggatctctgagactgtcttgtgccgccagcggcagaacctttagcatgggctggtttagacaggcccctggcaaagagagagagttcgtcgccgccatcacatactctggcggcagcccttactacgccgactctgtgaagggcagattcaccatcagccgggacaacgccaagaacaccgtgtacctccagatgaacagcctgaagcctgaggacaccgccgtgtactactgcgccgccaatccaacatacggcagcgactggaacgccgagaattggggccagggaacccaagtgacagtgtctagcctcgaggacctgaagaacgtgttcccacctgaggtggccgtgttcgagcctagcgaggccgagatcagccacacccagaaagccaccctcgtgtgcctggctaccggcttctaccccgaccatgtggaactgtcttggtgggtcaacggcaaagaggtgcacagcggcgtgtctaccgacccccagccactgaaagaacagcccgccctgaacgacagccggtactgcctgagcagcagactgagagtgtccgccaccttctggcagaacccccggaaccacttcagatgccaggtgcagttctacggcctgagcgagaacgacgagtggacccaggacagagccaagcccgtgacccagatcgtgtctgccgaagcctggggcagagccgattgcggatccatcggctggctgttgctccaggcccctcggtgggtgttcaaggaggaagaccctattcacctgaggtgtcacagctggaagaacactgctctgcataaggtcacatatttacagaatggcaaaggcaggaagtattttcatcataattctgacttctacattccaaaagccacactcaaagacagcggctcctacttctgcagggggcttgttgggagtaaaaatgtgtcttcagagactgtgaacatcaccatcactcaaggtttggcagtgtcaaccatctcatcattctttccacctggctaccaagtgtccttctgcctggtcatggtgctgctgttcgccgtggataccggcctgtacttcagcgtcaagaccaacatccggtccagcaccagagactggaaggaccacaagttcaagtggcggaaggaccctcaggacaagagggccaagcgatctggatctggagcaacaaacttctcactactcaaacaagcaggtgacgtggaggagaatcccgggcctactagtatggactggatttggcgcatccttttccttgtcggcgctgctaccggcgcgcattccgggcccgaagtgcaactggttgaatccggtggcggcctggtgcaagcaggcggatctctcagacttagctgtgccgcctccggcagaaccttcacaatgggatggtttaggcaggctccagggaaagagagagagttcgtcgccgccatctctctgtctcccacactggcctactacgccgactctgtgaaaggccggttcaccatctccagagataatgccaagaacaccgtggtgctgcaaatgaactctctgaaacccgaggatacagccctgtactattgtgccgctgaccggaagtccgtgatgagcatcagacccgattactggggacagggcacacaagtcacagtgtcctctacgcgtatccagaaccctgatcctgccgtgtaccagctgcgggatagcaagagcagcgacaagagcgtgtgtctgttcaccgacttcgacagccagaccaacgtgtcccagagcaaggactccgacgtgtacatcaccgataagaccgtgctggacatgcggagcatggacttcaagagcaactccgccgtggcctggtccaacaagtccgatttcgcctgcgccaacgccttcaacaacagcattatccccgaggacacattcttcccaagccccgagagcagctgcggtaccacaacgccgggcgaaaggagttccttgccggccttttaccccggcacaagcggaagctgtagtgggtgtggaagcctcagcctcccacttcttgcgggcctcgtcgcggcagatgcagtagcttcacttcttattgtaggcgcggtatttctctgtgctcgaccaaggaggtcacccgctcaggaggatggtaaggtgtatataaatatgccaggacgcggacgcgccaagagaagcggatctggcgtgaagcagaccctgaatttcgacctgctgaagctggctggcgacgtggaatccaacccaggcccttctagaggccatatgaccgagtacaagcccacggtgcgcctcgccacccgcgacgacgtccccagggccgtacgcaccctcgccgccgcgttcgccgactaccccgccacgcgccacaccgtcgatccggaccgccacatcgagcgggtcaccgagctgcaagaactcttcctcacgcgcgtcgggctcgacatcggcaaggtgtgggtcgcggacgacggcgccgcggtggcggtctggaccacgccggagagcgtcgaagcgggggcggtgttcgccgagatcggcccgcgcatggccgagttgagcggttcccggctggccgcgcagcaacagatggaaggcctcctggcgccgcaccggcccaaggagcccgcgtggttcctggccaccgtcggcgtctcgcccgaccaccagggcaagggtctgggcagcgccgtcgtgctccccggagtggaggcggccgagcgcgccggggtgcccgccttcctggagacctccgcgccccgcaacctccccttctacgagcggctcggcttcaccgtcaccgccgacgtcgaggtgcccgaaggaccgcgcacctggtgcatgacccgcaagcccggtgcctga

SEQ ID NO: 1989 - DNA, 1635 bp, Artificial Sequence; identical to SEQ ID NO: 1664
  Synthetic Polynucleotide

SEQ ID NO: 1990 - DNA, 2058 bp, Artificial Sequence
  Synthetic Polynucleotide
atggccttaccagtgaccgccttgctcctgccgctggccttgctgctccacgccgccaggccggacatccagatgacacagagccctagcagcctgtctgccagcgtgggagacagagtgaccatcacatgcaaggccagcgaccacatcaacaactggctggcctggtatcagcagaagcctggacaggcccctaagctgctgatctacggcgctaccacactggaaacaggcgtgcccagcagattttctggcagcggctctggcaccgactacaccctgacaatatccagcctccagcctgaggacttcgccacctactactgtcagcagagctggaacaccccttggacattcggccagggcaccaagctggaaatcaagagactcgagacaacacctggcgagagaagtagcctgcctgccttctatcctggcaccagcggctcttgttctggctgtggatctctgagcctgcctctgctggctggactggttgctgctgatgctgtggcctctctgctgattgtgggagccgtgttcctgtgcgccagacctagaagaagccccgctcaagaggacggcaaggtgtacatcaacatgcccggcagaggaagggccaagcgatctggatctggagcaacaaacttctcactactcaaacaagcaggtgacgtggaggagaatcccgggcctactagtatggactggatttggcgcatccttttccttgtcggcgctgctaccggcgcgcattccttcgaacaagttcagcttcaacagcctggcgctgagctggtcaaacctggcgcttctgtgaagatgagctgcaaagccagcggctacgccttcagcagctactggatcaactggatgaagcagaaacccggccagggactcgaatggatcggccaaatctatcccggcgacggcgacaccaactacaacggcaagttcaagggcagagccacactgaccgccgatacctctagcagcacagcctacatgcagctgagcagcctgaccagcgaagatagcgccgtgtacttctgtgcccggtccatcacaacagtcgtgggctgcgctatggactattggggccagggaacaagcgtgaccgtgtctagtacgcgtacaacgccgggcgaaaggagttccttgccggccttttaccccggcacaagcggaagctgtagtgggtgtggaagcctcagcctcccacttcttgcgggcctcgtcgcggcagatgcagtagcttcacttcttattgtaggcgcggtatttctctgtgctcgaccaaggaggtcacccgctcaggaggatggtaaggtgtatataaatatgccaggacgcggacgcgccaagagaagcggatctggcgtgaagcagaccctgaatttcgacctgctgaagctggctggcgacgtggaatccaacccaggcccttctagaggccatatgaccgagtacaagcccacggtgcgcctcgccacccgcgacgacgtccccagggccgtacgcaccctcgccgccgcgttcgccgactaccccgccacgcgccacaccgtcgatccggaccgccacatcgagcgggtcaccgagctgcaagaactcttcctcacgcgcgtcgggctcgacatcggcaaggtgtgggtcgcggacgacggcgccgcggtggcggtctggaccacgccggagagcgtcgaagcgggggcggtgttcgccgagatcggcccgcgcatggccgagttgagcggttcccggctggccgcgcagcaacagatggaaggcctcctggcgccgcaccggcccaaggagcccgcgtggttcctggccaccgtcggcgtctcgcccgaccaccagggcaagggtctgggcagcgccgtcgtgctccccggagtggaggcggccgagcgcgccggggtgcccgccttcctggagacctccgcgccccgcaacctccccttctacgagcggctcggcttcaccgtcaccgccgacgtcgaggtgcccgaaggaccgcgcacctggtgcatgacccgcaagcccggtgcctga

SEQ ID NO: 1991 - DNA, 2220 bp, Artificial Sequence
  Synthetic Polynucleotide
atggccttaccagtgaccgccttgctcctgccgctggccttgctgctccacgccgccaggccggcatgcgaagtgcagctgcttgaaagtggcggcggactgattcagcctggcggatctctgagactgagctgtgccgccagcggcttcaccttttctagccacgccatgacctgggtccgacaggcacctggaaaagggcttgaatgggtgtccgccatcagcggctctggcgattacacacactacgccgacagcgtgaagggcagattcaccatcagcagagacaacagcaagaacaccgtgtacctccagatgaacagcctgagagccgaggacagcgccgtgtattattgcgccaaggatgaggatggcggcagcctgcttggacacagaggacaaggcaccctggtcaccgtttcttccggtaccggcggaggcggatctggcggcggaggtagcggtggcggaggatctgaattcggatctctcgagacaacacctggcgagagaagtagcctgcctgccttctatcctggcaccagcggctcttgttctggctgtggatctctgagcctgcctctgctggctggactggttgctgctgatgctgtggcctctctgctgattgtgggagccgtgttcctgtgcgccagacctagaagaagccccgctcaagaggacggcaaggtgtacatcaacatgcccggcagaggaagggccaagcgatctggatctggagcaacaaacttctcactactcaaacaagcaggtgacgtggaggagaatcccgggcctactagtgccaccatggactggatttggcgcatccttttccttgtcggcgctgctaccggcgcccattccgggcccgaagtgcagctggttgaatctggcggaggactggttcaggctggcggatctctgagactgtcttgtgccgccagcggcagaacctttagcatgggctggtttagacaggcccctggcaaagagagagagttcgtcgccgccatcacatactctggcggcagcccttactacgccgactctgtgaagggcagattcaccatcagccgggacaacgccaagaacaccgtgtacctccagatgaacagcctgaagcctgaggacaccgccgtgtactactgcgccgccaatccaacatacggcagcgactggaacgccgagaattggggccagggaacccaagtgacagtgtctagcggatccggcggcggaggatctggcggaggcggatctgggggcggaggctctttcgaaggcagcacgcgtacaacgccgggcgaaaggagttccttgccggccttttaccccggcacaagcggaagctgtagtgggtgtggaagcctcagcctcccacttcttgcgggcctcgtcgcggcagatgcagtagcttcacttcttattgtaggcgcggtatttctctgtgctcgaccaaggaggtcacccgctcaggaggatggtaaggtgtatataaatatgccaggacgcggacgcgccaagagaagcggatctggcgtgaagcagaccctgaatttcgacctgctgaagctggctggcgacgtggaatccaacccaggcccttctagaggccatatgaccgagtacaagcccacggtgcgcctcgccacccgcgacgacgtccccagggccgtacgcaccctcgccgccgcgttcgccgactaccccgccacgcgccacaccgtcgatccggaccgccacatcgagcgggtcaccgagctgcaagaactcttcctcacgcgcgtcgggctcgacatcggcaaggtgtgggtcgcggacgacggcgccgcggtggcggtctggaccacgccggagagcgtcgaagcgggggcggtgttcgccgagatcggcccgcgcatggccgagttgagcggttcccggctggccgcgcagcaacagatggaaggcctcctggcgccgcaccggcccaaggagcccgcgtggttcctggccaccgtcggcgtctcgcccgaccaccagggcaagggtctgggcagcgccgtcgtgctccccggagtggaggcggccgagcgcgccggggtgcccgccttcctggagacctccgcgccccgcaacctccccttctacgagcggctcggcttcaccgtcaccgccgacgtcgaggtgcccgaaggaccgcgcacctggtgcatgacccgcaagcccggtgcctga

SEQ ID NO: 1992 - DNA, 2670 bp, Artificial Sequence
  Synthetic Polynucleotide
atggccttaccagtgaccgccttgctcctgccgctggccttgctgctccacgccgccaggccggacatccagatgacacagagccctagcagcctgtctgccagcgtgggagacagagtgaccatcacatgcaaggccagcgaccacatcaacaactggctggcctggtatcagcagaagcctggacaggcccctaagctgctgatctacggcgctaccacactggaaacaggcgtgcccagcagattttctggcagcggctctggcaccgactacaccctgacaatatccagcctccagcctgaggacttcgccacctactactgtcagcagagctggaacaccccttggacattcggccagggcaccaagctggaaatcaagagactcgagggacagcctaaggccaatcctaccgtgacactgttccctccaagcagcgaagaactccaggccaacaaggccacacttgtgtgcctgatctccgacttctaccctggggctgtgacagtggcttggaaggccgatggatctcctgtgaaagccggcgtggaaaccaccaagccatccaagcagagcaacaacaaatacgccgccagctcctacctgagcctgacacctgagcagtggaagtcccacagatcctacagctgccaagtgacccacgaaggcagcaccgtggaaaagacagtggcccctacagagtgcagcggatccacaacacctggcgagagaagtagcctgcctgccttctatcctggcaccagcggctcttgttctggctgtggatctctgagcctgcctctgctggctggactggttgctgctgatgctgtggcctctctgctgattgtgggagccgtgttcctgtgcgccagacctagaagaagccccgctcaagaggacggcaaggtgtacatcaacatgcccggcagaggaagggccaagcgatctggatctggagcaacaaacttctcactactcaaacaagcaggtgacgtggaggagaatcccgggcctactagtatggactggatttggcgcatccttttccttgtcggcgctgctaccggcgcgcattccttcgaacaagttcagcttcaacagcctggcgctgagctggtcaaacctggcgcttctgtgaagatgagctgcaaagccagcggctacgccttcagcagctactggatcaactggatgaagcagaaacccggccagggactcgaatggatcggccaaatctatcccggcgacggcgacaccaactacaacggcaagttcaagggcagagccacactgaccgccgatacctctagcagcacagcctacatgcagctgagcagcctgaccagcgaagatagcgccgtgtacttctgtgcccggtccatcacaacagtcgtgggctgcgctatggactattggggccagggaacaagcgtgaccgtgtctagtacgcgtgcctctacaaagggaccctccgtgtttcctctggctcccagcagcaagtctacaagcggaggaacagccgctctgggctgcctggtcaaggattactttcccgagcctgtgaccgtgtcctggaatagcggagcactgacaagcggcgtgcacacctttccagccgtgctgcaaagcagcggcctgtactctctgagcagcgtggtcacagtgcctagctctagcctgggcacccagacctacatctgcaatgtgaaccacaagcctagcaacaccaaggtggacaagagagtggaacccaagagctgtggtaccacaacgccgggcgaaaggagttccttgccggccttttaccccggcacaagcggaagctgtagtgggtgtggaagcctcagcctcccacttcttgcgggcctcgtcgcggcagatgcagtagcttcacttcttattgtaggcgcggtatttctctgtgctcgaccaaggaggtcacccgctcaggaggatggtaaggtgtatataaatatgccaggacgcggacgcgccaagagaagcggatctggcgtgaagcagaccctgaatttcgacctgctgaagctggctggcgacgtggaatccaacccaggcccttctagaggcgggatccacaccatggctacctacgaggtgctgtgcgaggtggcaagaaagctgggcaccgacgacagagaagtggtgctgttcctgctgaacgtgttcatccctcagcctacactggcccagctgatcggtgcactgagagccctgaaagaggaaggccggctgacctttcctctgctggccgaatgcctgttcagagccggaagaagggatctgctgcgggacctgctgcatctggaccccagatttctggaaagacacctggccggcaccatgagctacttcagcccttaccagctgaccgtgctgcacgttgacggcgaactgtgcgccagagatattcggagcctgatcttcctgagcaaggacaccatcggcagccggtctacccctcagacatttctgcactgggtgtactgcatggaaaacctggacctgctcggccccacagatgtggatgccctgatgtccatgctgagaagcctgagcagagtggacctccagagacaggtgcagacactgatgggactgcacctgagcggacctagccacagccagcactacagacacacccct

SEQ ID NO: 1993 - DNA, 2829 bp, Artificial Sequence
  Synthetic Polynucleotide
atggccttaccagtgaccgccttgctcctgccgctggccttgctgctccacgccgccaggccggacatccagatgacacagagccctagcagcctgtctgccagcgtgggagacagagtgaccatcacatgcaaggccagcgaccacatcaacaactggctggcctggtatcagcagaagcctggacaggcccctaagctgctgatctacggcgctaccacactggaaacaggcgtgcccagcagattttctggcagcggctctggcaccgactacaccctgacaatatccagcctccagcctgaggacttcgccacctactactgtcagcagagctggaacaccccttggacattcggccagggcaccaagctggaaatcaagagactcgagggacagcctaaggccaatcctaccgtgacactgttccctccaagcagcgaagaactccaggccaacaaggccacacttgtgtgcctgatctccgacttctaccctggggctgtgacagtggcttggaaggccgatggatctcctgtgaaagccggcgtggaaaccaccaagccatccaagcagagcaacaacaaatacgccgccagctcctacctgagcctgacacctgagcagtggaagtcccacagatcctacagctgccaagtgacccacgaaggcagcaccgtggaaaagacagtggcccctacagagtgcagcggatccacaacacctggcgagagaagtagcctgcctgccttctatcctggcaccagcggctcttgttctggctgtggatctctgagcctgcctctgctggctggactggttgctgctgatgctgtggcctctctgctgattgtgggagccgtgttcctgtgcgccagacctagaagaagccccgctcaagaggacggcaaggtgtacatcaacatgcccggcagaggaagggccaagcgatctggatctggagcaacaaacttctcactactcaaacaagcaggtgacgtggaggagaatcccgggcctactagtatggactggatttggcgcatccttttccttgtcggcgctgctaccggcgcgcattccttcgaacaagttcagcttcaacagcctggcgctgagctggtcaaacctggcgcttctgtgaagatgagctgcaaagccagcggctacgccttcagcagctactggatcaactggatgaagcagaaacccggccagggactcgaatggatcggccaaatctatcccggcgacggcgacaccaactacaacggcaagttcaagggcagagccacactgaccgccgatacctctagcagcacagcctacatgcagctgagcagcctgaccagcgaagatagcgccgtgtacttctgtgcccggtccatcacaacagtcgtgggctgcgctatggactattggggccagggaacaagcgtgaccgtgtctagtacgcgtgcctctacaaagggaccctccgtgtttcctctggctcccagcagcaagtctacaagcggaggaacagccgctctgggctgcctggtcaaggattactttcccgagcctgtgaccgtgtcctggaatagcggagcactgacaagcggcgtgcacacctttccagccgtgctgcaaagcagcggcctgtactctctgagcagcgtggtcacagtgcctagctctagcctgggcacccagacctacatctgcaatgtgaaccacaagcctagcaacaccaaggtggacaagagagtggaacccaagagctgtggtaccacaacgccgggcgaaaggagttccttgccggccttttaccccggcacaagcggaagctgtagtgggtgtggaagcctcagcctcccacttcttgcgggcctcgtcgcggcagatgcagtagcttcacttcttattgtaggcgcggtatttctctgtgctcgaccaaggaggtcacccgctcaggaggatggtaaggtgtatataaatatgccaggacgcggacgcgccaagagaagcggatctggcgtgaagcagaccctgaatttcgacctgctgaagctggctggcgacgtggaatccaacccaggcccttctagaggcgggatccacaccatgtccgactccaaggaggtccctagccttccatttttgcgacacttgctcgaagagttggacagccatgaggacagcttgctgctgtttctgtgtcacgacgcggccccgggctgcacgacggtcacgcaagctttgtgctcgcttagccaacagcgcaagctgaccctcgcggctctggtcgagatgctctacgtgctgcagcgtatggatcttctcaagagccgcttcgggctcagcaaggagggggccgagcaattgctgggcacaagctttctcacgcgctaccgcaagctcatggtttgcgtgggtgaggagctcgactcgagcgagctacgcgctctacgcttgttcgcgtgcaacctgaatccgagcctgagcacggcgctttctgagagcagccgctttgtcgagcttgtactcgcgcttgaaaacgtaggactcgtctcgccatcgagtgtttccgtgcttgcggacatgttgcgcactcttcggcgcctcgatttgtgccagcagcttgttgagtacgaacaacaagagcaagccaggtaccgttactgttacgcggcctcgccctcattgccagttcgtacgttacgtcgggggcacggcgcgagtgaacacgagcagctgtgcatgcccgtgcaagaatcctctgacagccccgagctgctgcgcacgcccgtacaagaatcctccagcgacagccccgagcaaacgact

SEQ ID NO: 1994 - DNA, 2697 bp, Artificial Sequence
  Synthetic Polynucleotide
atggccttaccagtgaccgccttgctcctgccgctggccttgctgctccacgccgccaggccggacatccagatgacacagagccctagcagcctgtctgccagcgtgggagacagagtgaccatcacatgcaaggccagcgaccacatcaacaactggctggcctggtatcagcagaagcctggacaggcccctaagctgctgatctacggcgctaccacactggaaacaggcgtgcccagcagattttctggcagcggctctggcaccgactacaccctgacaatatccagcctccagcctgaggacttcgccacctactactgtcagcagagctggaacaccccttggacattcggccagggcaccaagctggaaatcaagagactcgagggacagcctaaggccaatcctaccgtgacactgttccctccaagcagcgaagaactccaggccaacaaggccacacttgtgtgcctgatctccgacttctaccctggggctgtgacagtggcttggaaggccgatggatctcctgtgaaagccggcgtggaaaccaccaagccatccaagcagagcaacaacaaatacgccgccagctcctacctgagcctgacacctgagcagtggaagtcccacagatcctacagctgccaagtgacccacgaaggcagcaccgtggaaaagacagtggcccctacagagtgcagcggatccacaacacctggcgagagaagtagcctgcctgccttctatcctggcaccagcggctcttgttctggctgtggatctctgagcctgcctctgctggctggactggttgctgctgatgctgtggcctctctgctgattgtgggagccgtgttcctgtgcgccagacctagaagaagccccgctcaagaggacggcaaggtgtacatcaacatgcccggcagaggaagggccaagcgatctggatctggagcaacaaacttctcactactcaaacaagcaggtgacgtggaggagaatcccgggcctactagtatggactggatttggcgcatccttttccttgtcggcgctgctaccggcgcgcattccttcgaacaagttcagcttcaacagcctggcgctgagctggtcaaacctggcgcttctgtgaagatgagctgcaaagccagcggctacgccttcagcagctactggatcaactggatgaagcagaaacccggccagggactcgaatggatcggccaaatctatcccggcgacggcgacaccaactacaacggcaagttcaagggcagagccacactgaccgccgatacctctagcagcacagcctacatgcagctgagcagcctgaccagcgaagatagcgccgtgtacttctgtgcccggtccatcacaacagtcgtgggctgcgctatggactattggggccagggaacaagcgtgaccgtgtctagtacgcgtgcctctacaaagggaccctccgtgtttcctctggctcccagcagcaagtctacaagcggaggaacagccgctctgggctgcctggtcaaggattactttcccgagcctgtgaccgtgtcctggaatagcggagcactgacaagcggcgtgcacacctttccagccgtgctgcaaagcagcggcctgtactctctgagcagcgtggtcacagtgcctagctctagcctgggcacccagacctacatctgcaatgtgaaccacaagcctagcaacaccaaggtggacaagagagtggaacccaagagctgtggtaccacaacgccgggcgaaaggagttccttgccggccttttaccccggcacaagcggaagctgtagtgggtgtggaagcctcagcctcccacttcttgcgggcctcgtcgcggcagatgcagtagcttcacttcttattgtaggcgcggtatttctctgtgctcgaccaaggaggtcacccgctcaggaggatggtaaggtgtatataaatatgccaggacgcggacgcgccaagagaagcggatctggcgtgaagcagaccctgaatttcgacctgctgaagctggctggcgacgtggaatccaacccaggcccttctagaggccatatgaccgagtacaagcccacggtgcgcctcgccacccgcgacgacgtccccagggccgtacgcaccctcgccgccgcgttcgccgactaccccgccacgcgccacaccgtcgatccggaccgccacatcgagcgggtcaccgagctgcaagaactcttcctcacgcgcgtcgggctcgacatcggcaaggtgtgggtcgcggacgacggcgccgcggtggcggtctggaccacgccggagagcgtcgaagcgggggcggtgttcgccgagatcggcccgcgcatggccgagttgagcggttcccggctggccgcgcagcaacagatggaaggcctcctggcgccgcaccggcccaaggagcccgcgtggttcctggccaccgtcggcgtctcgcccgaccaccagggcaagggtctgggcagcgccgtcgtgctccccggagtggaggcggccgagcgcgccggggtgcccgccttcctggagacctccgcgccccgcaacctccccttctacgagcggctcggcttcaccgtcaccgccgacgtcgaggtgcccgaaggaccgcgcacctggtgcatgacccgcaagcccggtgcctga

SEQ ID NO: 1995 - DNA, 3108 bp, Artificial Sequence
  Synthetic Polynucleotide
atggccttaccagtgaccgccttgctcctgccgctggccttgctgctccacgccgccaggccggaagtgcagctggttgaatctggcggaggactggttcaggctggcggatctctgagactgtcttgtgccgccagcggcagaacctttagcatgggctggtttagacaggcccctggcaaagagagagagttcgtcgccgccatcacatactctggcggcagcccttactacgccgactctgtgaagggcagattcaccatcagccgggacaacgccaagaacaccgtgtacctccagatgaacagcctgaagcctgaggacaccgccgtgtactactgcgccgccaatccaacatacggcagcgactggaacgccgagaattggggccagggaacccaagtgacagtgtctagcggtaccggcggaggcggatctggcggcggaggtagcggtggcggaggatctgaattcgacatccagatgacacagagccctagcagcctgtctgccagcgtgggagacagagtgaccatcacatgcaaggccagcgaccacatcaacaactggctggcctggtatcagcagaagcctggacaggcccctaagctgctgatctacggcgctaccacactggaaacaggcgtgcccagcagattttctggcagcggctctggcaccgactacaccctgacaatatccagcctccagcctgaggacttcgccacctactactgtcagcagagctggaacaccccttggacattcggccagggcaccaagctggaaatcaagagactcgagggacagcctaaggccaatcctaccgtgacactgttccctccaagcagcgaagaactccaggccaacaaggccacacttgtgtgcctgatctccgacttctaccctggggctgtgacagtggcttggaaggccgatggatctcctgtgaaagccggcgtggaaaccaccaagccatccaagcagagcaacaacaaatacgccgccagctcctacctgagcctgacacctgagcagtggaagtcccacagatcctacagctgccaagtgacccacgaaggcagcaccgtggaaaagacagtggcccctacagagtgcagcggatccacaacacctggcgagagaagtagcctgcctgccttctatcctggcaccagcggctcttgttctggctgtggatctctgagcctgcctctgctggctggactggttgctgctgatgctgtggcctctctgctgattgtgggagccgtgttcctgtgcgccagacctagaagaagccccgctcaagaggacggcaaggtgtacatcaacatgcccggcagaggaagggccaagcgatctggatctggagcaacaaacttctcactactcaaacaagcaggtgacgtggaggagaatcccgggcctactagtatggactggatttggcgcatccttttccttgtcggcgctgctaccggcgcgcattccttcgaacaagttcagcttcaacagcctggcgctgagctggtcaaacctggcgcttctgtgaagatgagctgcaaagccagcggctacgccttcagcagctactggatcaactggatgaagcagaaacccggccagggactcgaatggatcggccaaatctatcccggcgacggcgacaccaactacaacggcaagttcaagggcagagccacactgaccgccgatacctctagcagcacagcctacatgcagctgagcagcctgaccagcgaagatagcgccgtgtacttctgtgcccggtccatcacaacagtcgtgggctgcgctatggactattggggccagggaacaagcgtgaccgtgtctagtacgcgtgcctctacaaagggaccctccgtgtttcctctggctcccagcagcaagtctacaagcggaggaacagccgctctgggctgcctggtcaaggattactttcccgagcctgtgaccgtgtcctggaatagcggagcactgacaagcggcgtgcacacctttccagccgtgctgcaaagcagcggcctgtactctctgagcagcgtggtcacagtgcctagctctagcctgggcacccagacctacatctgcaatgtgaaccacaagcctagcaacaccaaggtggacaagagagtggaacccaagagctgtggtaccacaacgccgggcgaaaggagttccttgccggccttttaccccggcacaagcggaagctgtagtgggtgtggaagcctcagcctcccacttcttgcgggcctcgtcgcggcagatgcagtagcttcacttcttattgtaggcgcggtatttctctgtgctcgaccaaggaggtcacccgctcaggaggatggtaaggtgtatataaatatgccaggacgcggacgcgccaagagaagcggatctggcgtgaagcagaccctgaatttcgacctgctgaagctggctggcgacgtggaatccaacccaggcccttctagaggccatatgaccgagtacaagcccacggtgcgcctcgccacccgcgacgacgtccccagggccgtacgcaccctcgccgccgcgttcgccgactaccccgccacgcgccacaccgtcgatccggaccgccacatcgagcgggtcaccgagctgcaagaactcttcctcacgcgcgtcgggctcgacatcggcaaggtgtgggtcgcggacgacggcgccgcggtggcggtctggaccacgccggagagcgtcgaagcgggggcggtgttcgccgagatcggcccgcgcatggccgagttgagcggttcccggctggccgcgcagcaacagatggaaggcctcctggcgccgcaccggcccaaggagcccgcgtggttcctggccaccgtcggcgtctcgcccgaccaccagggcaagggtctgggcagcgccgtcgtgctccccggagtggaggcggccgagcgcgccggggtgcccgccttcctggagacctccgcgccccgcaacctccccttctacgagcggctcggcttcaccgtcaccgccgacgtcgaggtgcccgaaggaccgcgcacctggtgcatgacccgcaagcccggtgcctga

SEQ ID NO: 1996 - DNA, 3519 bp, Artificial Sequence
  Synthetic Polynucleotide
atggccttaccagtgaccgccttgctcctgccgctggccttgctgctccacgccgccaggccggaagtgcagctggttgaatctggcggaggactggttcaggctggcggatctctgagactgtcttgtgccgccagcggcagaacctttagcatgggctggtttagacaggcccctggcaaagagagagagttcgtcgccgccatcacatactctggcggcagcccttactacgccgactctgtgaagggcagattcaccatcagccgggacaacgccaagaacaccgtgtacctccagatgaacagcctgaagcctgaggacaccgccgtgtactactgcgccgccaatccaacatacggcagcgactggaacgccgagaattggggccagggaacccaagtgacagtgtctagcggtaccggcggaggcggatctggcggcggaggtagcggtggcggaggatctgaattcgacatccagatgacacagagccctagcagcctgtctgccagcgtgggagacagagtgaccatcacatgcaaggccagcgaccacatcaacaactggctggcctggtatcagcagaagcctggacaggcccctaagctgctgatctacggcgctaccacactggaaacaggcgtgcccagcagattttctggcagcggctctggcaccgactacaccctgacaatatccagcctccagcctgaggacttcgccacctactactgtcagcagagctggaacaccccttggacattcggccagggcaccaagctggaaatcaagagactcgagggacagcctaaggccaatcctaccgtgacactgttccctccaagcagcgaagaactccaggccaacaaggccacacttgtgtgcctgatctccgacttctaccctggggctgtgacagtggcttggaaggccgatggatctcctgtgaaagccggcgtggaaaccaccaagccatccaagcagagcaacaacaaatacgccgccagctcctacctgagcctgacacctgagcagtggaagtcccacagatcctacagctgccaagtgacccacgaaggcagcaccgtggaaaagacagtggcccctacagagtgcagcggatccacaacacctggcgagagaagtagcctgcctgccttctatcctggcaccagcggctcttgttctggctgtggatctctgagcctgcctctgctggctggactggttgctgctgatgctgtggcctctctgctgattgtgggagccgtgttcctgtgcgccagacctagaagaagccccgctcaagaggacggcaaggtgtacatcaacatgcccggcagaggaagggccaagcgatctggatctggagcaacaaacttctcactactcaaacaagcaggtgacgtggaggagaatcccgggcctactagtatggactggatttggcgcatccttttccttgtcggcgctgctaccggcgcgcattccgggcccgaagtgcaactggttgaatccggtggcggcctggtgcaagcaggcggatctctcagacttagctgtgccgcctccggcagaaccttcacaatgggatggtttaggcaggctccagggaaagagagagagttcgtcgccgccatctctctgtctcccacactggcctactacgccgactctgtgaaaggccggttcaccatctccagagataatgccaagaacaccgtggtgctgcaaatgaactctctgaaacccgaggatacagccctgtactattgtgccgctgaccggaagtccgtgatgagcatcagacccgattactggggacagggcacacaagtcacagtgtcctctggatccggcggcggaggatctggcggaggcggatctgggggcggaggctctttcgaacaagttcagcttcaacagcctggcgctgagctggtcaaacctggcgcttctgtgaagatgagctgcaaagccagcggctacgccttcagcagctactggatcaactggatgaagcagaaacccggccagggactcgaatggatcggccaaatctatcccggcgacggcgacaccaactacaacggcaagttcaagggcagagccacactgaccgccgatacctctagcagcacagcctacatgcagctgagcagcctgaccagcgaagatagcgccgtgtacttctgtgcccggtccatcacaacagtcgtgggctgcgctatggactattggggccagggaacaagcgtgaccgtgtctagtacgcgtgcctctacaaagggaccctccgtgtttcctctggctcccagcagcaagtctacaagcggaggaacagccgctctgggctgcctggtcaaggattactttcccgagcctgtgaccgtgtcctggaatagcggagcactgacaagcggcgtgcacacctttccagccgtgctgcaaagcagcggcctgtactctctgagcagcgtggtcacagtgcctagctctagcctgggcacccagacctacatctgcaatgtgaaccacaagcctagcaacaccaaggtggacaagagagtggaacccaagagctgtggtaccacaacgccgggcgaaaggagttccttgccggccttttaccccggcacaagcggaagctgtagtgggtgtggaagcctcagcctcccacttcttgcgggcctcgtcgcggcagatgcagtagcttcacttcttattgtaggcgcggtatttctctgtgctcgaccaaggaggtcacccgctcaggaggatggtaaggtgtatataaatatgccaggacgcggacgcgccaagagaagcggatctggcgtgaagcagaccctgaatttcgacctgctgaagctggctggcgacgtggaatccaacccaggcccttctagaggccatatgaccgagtacaagcccacggtgcgcctcgccacccgcgacgacgtccccagggccgtacgcaccctcgccgccgcgttcgccgactaccccgccacgcgccacaccgtcgatccggaccgccacatcgagcgggtcaccgagctgcaagaactcttcctcacgcgcgtcgggctcgacatcggcaaggtgtgggtcgcggacgacggcgccgcggtggcggtctggaccacgccggagagcgtcgaagcgggggcggtgttcgccgagatcggcccgcgcatggccgagttgagcggttcccggctggccgcgcagcaacagatggaaggcctcctggcgccgcaccggcccaaggagcccgcgtggttcctggccaccgtcggcgtctcgcccgaccaccagggcaagggtctgggcagcgccgtcgtgctccccggagtggaggcggccgagcgcgccggggtgcccgccttcctggagacctccgcgccccgcaacctccccttctacgagcggctcggcttcaccgtcaccgccgacgtcgaggtgcccgaaggaccgcgcacctggtgcatgacccgcaagcccggtgcctga

SEQ ID NO: 1997 - DNA, 2718 bp, Artificial Sequence
  Synthetic Polynucleotide
atggccttaccagtgaccgccttgctcctgccgctggccttgctgctccacgccgccaggccggaagtgcagctggttgaatctggcggaggactggttcaggctggcggatctctgagactgtcttgtgccgccagcggcagaacctttagcatgggctggtttagacaggcccctggcaaagagagagagttcgtcgccgccatcacatactctggcggcagcccttactacgccgactctgtgaagggcagattcaccatcagccgggacaacgccaagaacaccgtgtacctccagatgaacagcctgaagcctgaggacaccgccgtgtactactgcgccgccaatccaacatacggcagcgactggaacgccgagaattggggccagggaacccaagtgacagtgtctagcctcgagggacagcctaaggccaatcctaccgtgacactgttccctccaagcagcgaagaactccaggccaacaaggccacacttgtgtgcctgatctccgacttctaccctggggctgtgacagtggcttggaaggccgatggatctcctgtgaaagccggcgtggaaaccaccaagccatccaagcagagcaacaacaaatacgccgccagctcctacctgagcctgacacctgagcagtggaagtcccacagatcctacagctgccaagtgacccacgaaggcagcaccgtggaaaagacagtggcccctacagagtgcagcggatccacaacacctggcgagagaagtagcctgcctgccttctatcctggcaccagcggctcttgttctggctgtggatctctgagcctgcctctgctggctggactggttgctgctgatgctgtggcctctctgctgattgtgggagccgtgttcctgtgcgccagacctagaagaagccccgctcaagaggacggcaaggtgtacatcaacatgcccggcagaggaagggccaagcgatctggatctggagcaacaaacttctcactactcaaacaagcaggtgacgtggaggagaatcccgggcctactagtatggactggatttggcgcatccttttccttgtcggcgctgctaccggcgcgcattccgggcccgaagtgcaactggttgaatccggtggcggcctggtgcaagcaggcggatctctcagacttagctgtgccgcctccggcagaaccttcacaatgggatggtttaggcaggctccagggaaagagagagagttcgtcgccgccatctctctgtctcccacactggcctactacgccgactctgtgaaaggccggttcaccatctccagagataatgccaagaacaccgtggtgctgcaaatgaactctctgaaacccgaggatacagccctgtactattgtgccgctgaccggaagtccgtgatgagcatcagacccgattactggggacagggcacacaagtcacagtgtcctctacgcgtgcctctacaaagggaccctccgtgtttcctctggctcccagcagcaagtctacaagcggaggaacagccgctctgggctgcctggtcaaggattactttcccgagcctgtgaccgtgtcctggaatagcggagcactgacaagcggcgtgcacacctttccagccgtgctgcaaagcagcggcctgtactctctgagcagcgtggtcacagtgcctagctctagcctgggcacccagacctacatctgcaatgtgaaccacaagcctagcaacaccaaggtggacaagagagtggaacccaagagctgtggtaccacaacgccgggcgaaaggagttccttgccggccttttaccccggcacaagcggaagctgtagtgggtgtggaagcctcagcctcccacttcttgcgggcctcgtcgcggcagatgcagtagcttcacttcttattgtaggcgcggtatttctctgtgctcgaccaaggaggtcacccgctcaggaggatggtaaggtgtatataaatatgccaggacgcggacgcgccaagagaagcggatctggcgtgaagcagaccctgaatttcgacctgctgaagctggctggcgacgtggaatccaacccaggcccttctagaggccatatgaccgagtacaagcccacggtgcgcctcgccacccgcgacgacgtccccagggccgtacgcaccctcgccgccgcgttcgccgactaccccgccacgcgccacaccgtcgatccggaccgccacatcgagcgggtcaccgagctgcaagaactcttcctcacgcgcgtcgggctcgacatcggcaaggtgtgggtcgcggacgacggcgccgcggtggcggtctggaccacgccggagagcgtcgaagcgggggcggtgttcgccgagatcggcccgcgcatggccgagttgagcggttcccggctggccgcgcagcaacagatggaaggcctcctggcgccgcaccggcccaaggagcccgcgtggttcctggccaccgtcggcgtctcgcccgaccaccagggcaagggtctgggcagcgccgtcgtgctccccggagtggaggcggccgagcgcgccggggtgcccgccttcctggagacctccgcgccccgcaacctccccttctacgagcggctcggcttcaccgtcaccgccgacgtcgaggtgcccgaaggaccgcgcacctggtgcatgacccgcaagcccggtgcctga

SEQ ID NO: 1998 - DNA, 2742 bp, Artificial Sequence
  Synthetic Polynucleotide
atggccttaccagtgaccgccttgctcctgccgctggccttgctgctccacgccgccaggccggacatccagatgacacagagccctagcagcctgtctgccagcgtgggagacagagtgaccatcacatgcaaggccagcgaccacatcaacaactggctggcctggtatcagcagaagcctggacaggcccctaagctgctgatctacggcgctaccacactggaaacaggcgtgcccagcagattttctggcagcggctctggcaccgactacaccctgacaatatccagcctccagcctgaggacttcgccacctactactgtcagcagagctggaacaccccttggacattcggccagggcaccaagctggaaatcaagagactcgaggacctgaagaacgtgttcccacctgaggtggccgtgttcgagcctagcgaggccgagatcagccacacccagaaagccaccctcgtgtgcctggctaccggcttctaccccgaccatgtggaactgtcttggtgggtcaacggcaaagaggtgcacagcggcgtgtctaccgacccccagccactgaaagaacagcccgccctgaacgacagccggtactgcctgagcagcagactgagagtgtccgccaccttctggcagaacccccggaaccacttcagatgccaggtgcagttctacggcctgagcgagaacgacgagtggacccaggacagagccaagcccgtgacccagatcgtgtctgccgaagcctggggcagagccgattgcggatccacaacacctggcgagagaagtagcctgcctgccttctatcctggcaccagcggctcttgttctggctgtggatctctgagcctgcctctgctggctggactggttgctgctgatgctgtggcctctctgctgattgtgggagccgtgttcctgtgcgccagacctagaagaagccccgctcaagaggacggcaaggtgtacatcaacatgcccggcagaggaagggccaagcgatctggatctggagcaacaaacttctcactactcaaacaagcaggtgacgtggaggagaatcccgggcctactagtatggactggatttggcgcatccttttccttgtcggcgctgctaccggcgcgcattccttcgaacaagttcagcttcaacagcctggcgctgagctggtcaaacctggcgcttctgtgaagatgagctgcaaagccagcggctacgccttcagcagctactggatcaactggatgaagcagaaacccggccagggactcgaatggatcggccaaatctatcccggcgacggcgacaccaactacaacggcaagttcaagggcagagccacactgaccgccgatacctctagcagcacagcctacatgcagctgagcagcctgaccagcgaagatagcgccgtgtacttctgtgcccggtccatcacaacagtcgtgggctgcgctatggactattggggccagggaacaagcgtgaccgtgtctagtacgcgtatccagaaccctgatcctgccgtgtaccagctgcgggatagcaagagcagcgacaagagcgtgtgtctgttcaccgacttcgacagccagaccaacgtgtcccagagcaaggactccgacgtgtacatcaccgataagaccgtgctggacatgcggagcatggacttcaagagcaactccgccgtggcctggtccaacaagtccgatttcgcctgcgccaacgccttcaacaacagcattatccccgaggacacattcttcccaagccccgagagcagctgcggtaccacaacgccgggcgaaaggagttccttgccggccttttaccccggcacaagcggaagctgtagtgggtgtggaagcctcagcctcccacttcttgcgggcctcgtcgcggcagatgcagtagcttcacttcttattgtaggcgcggtatttctctgtgctcgaccaaggaggtcacccgctcaggaggatggtaaggtgtatataaatatgccaggacgcggacgcgccaagagaagcggatctggcgtgaagcagaccctgaatttcgacctgctgaagctggctggcgacgtggaatccaacccaggcccttctagaggccatatgaccgagtacaagcccacggtgcgcctcgccacccgcgacgacgtccccagggccgtacgcaccctcgccgccgcgttcgccgactaccccgccacgcgccacaccgtcgatccggaccgccacatcgagcgggtcaccgagctgcaagaactcttcctcacgcgcgtcgggctcgacatcggcaaggtgtgggtcgcggacgacggcgccgcggtggcggtctggaccacgccggagagcgtcgaagcgggggcggtgttcgccgagatcggcccgcgcatggccgagttgagcggttcccggctggccgcgcagcaacagatggaaggcctcctggcgccgcaccggcccaaggagcccgcgtggttcctggccaccgtcggcgtctcgcccgaccaccagggcaagggtctgggcagcgccgtcgtgctccccggagtggaggcggccgagcgcgccggggtgcccgccttcctggagacctccgcgccccgcaacctccccttctacgagcggctcggcttcaccgtcaccgccgacgtcgaggtgcccgaaggaccgcgcacctggtgcatgacccgcaagcccggtgcctga

SEQ ID NO: 1999 - DNA, 3153 bp, Artificial Sequence
  Synthetic Polynucleotide
atggccttaccagtgaccgccttgctcctgccgctggccttgctgctccacgccgccaggccggaagtgcagctggttgaatctggcggaggactggttcaggctggcggatctctgagactgtcttgtgccgccagcggcagaacctttagcatgggctggtttagacaggcccctggcaaagagagagagttcgtcgccgccatcacatactctggcggcagcccttactacgccgactctgtgaagggcagattcaccatcagccgggacaacgccaagaacaccgtgtacctccagatgaacagcctgaagcctgaggacaccgccgtgtactactgcgccgccaatccaacatacggcagcgactggaacgccgagaattggggccagggaacccaagtgacagtgtctagcggtaccggcggaggcggatctggcggcggaggtagcggtggcggaggatctgaattcgacatccagatgacacagagccctagcagcctgtctgccagcgtgggagacagagtgaccatcacatgcaaggccagcgaccacatcaacaactggctggcctggtatcagcagaagcctggacaggcccctaagctgctgatctacggcgctaccacactggaaacaggcgtgcccagcagattttctggcagcggctctggcaccgactacaccctgacaatatccagcctccagcctgaggacttcgccacctactactgtcagcagagctggaacaccccttggacattcggccagggcaccaagctggaaatcaagagactcgaggacctgaagaacgtgttcccacctgaggtggccgtgttcgagcctagcgaggccgagatcagccacacccagaaagccaccctcgtgtgcctggctaccggcttctaccccgaccatgtggaactgtcttggtgggtcaacggcaaagaggtgcacagcggcgtgtctaccgacccccagccactgaaagaacagcccgccctgaacgacagccggtactgcctgagcagcagactgagagtgtccgccaccttctggcagaacccccggaaccacttcagatgccaggtgcagttctacggcctgagcgagaacgacgagtggacccaggacagagccaagcccgtgacccagatcgtgtctgccgaagcctggggcagagccgattgcggatccacaacacctggcgagagaagtagcctgcctgccttctatcctggcaccagcggctcttgttctggctgtggatctctgagcctgcctctgctggctggactggttgctgctgatgctgtggcctctctgctgattgtgggagccgtgttcctgtgcgccagacctagaagaagccccgctcaagaggacggcaaggtgtacatcaacatgcccggcagaggaagggccaagcgatctggatctggagcaacaaacttctcactactcaaacaagcaggtgacgtggaggagaatcccgggcctactagtatggactggatttggcgcatccttttccttgtcggcgctgctaccggcgcgcattccttcgaacaagttcagcttcaacagcctggcgctgagctggtcaaacctggcgcttctgtgaagatgagctgcaaagccagcggctacgccttcagcagctactggatcaactggatgaagcagaaacccggccagggactcgaatggatcggccaaatctatcccggcgacggcgacaccaactacaacggcaagttcaagggcagagccacactgaccgccgatacctctagcagcacagcctacatgcagctgagcagcctgaccagcgaagatagcgccgtgtacttctgtgcccggtccatcacaacagtcgtgggctgcgctatggactattggggccagggaacaagcgtgaccgtgtctagtacgcgtatccagaaccctgatcctgccgtgtaccagctgcgggatagcaagagcagcgacaagagcgtgtgtctgttcaccgacttcgacagccagaccaacgtgtcccagagcaaggactccgacgtgtacatcaccgataagaccgtgctggacatgcggagcatggacttcaagagcaactccgccgtggcctggtccaacaagtccgatttcgcctgcgccaacgccttcaacaacagcattatccccgaggacacattcttcccaagccccgagagcagctgcggtaccacaacgccgggcgaaaggagttccttgccggccttttaccccggcacaagcggaagctgtagtgggtgtggaagcctcagcctcccacttcttgcgggcctcgtcgcggcagatgcagtagcttcacttcttattgtaggcgcggtatttctctgtgctcgaccaaggaggtcacccgctcaggaggatggtaaggtgtatataaatatgccaggacgcggacgcgccaagagaagcggatctggcgtgaagcagaccctgaatttcgacctgctgaagctggctggcgacgtggaatccaacccaggcccttctagaggccatatgaccgagtacaagcccacggtgcgcctcgccacccgcgacgacgtccccagggccgtacgcaccctcgccgccgcgttcgccgactaccccgccacgcgccacaccgtcgatccggaccgccacatcgagcgggtcaccgagctgcaagaactcttcctcacgcgcgtcgggctcgacatcggcaaggtgtgggtcgcggacgacggcgccgcggtggcggtctggaccacgccggagagcgtcgaagcgggggcggtgttcgccgagatcggcccgcgcatggccgagttgagcggttcccggctggccgcgcagcaacagatggaaggcctcctggcgccgcaccggcccaaggagcccgcgtggttcctggccaccgtcggcgtctcgcccgaccaccagggcaagggtctgggcagcgccgtcgtgctccccggagtggaggcggccgagcgcgccggggtgcccgccttcctggagacctccgcgccccgcaacctccccttctacgagcggctcggcttcaccgtcaccgccgacgtcgaggtgcccgaaggaccgcgcacctggtgcatgacccgcaagcccggtgcctga

SEQ ID NO: 2000 - DNA, 3564 bp, Artificial Sequence
  Synthetic Polynucleotide
atggccttaccagtgaccgccttgctcctgccgctggccttgctgctccacgccgccaggccggaagtgcagctggttgaatctggcggaggactggttcaggctggcggatctctgagactgtcttgtgccgccagcggcagaacctttagcatgggctggtttagacaggcccctggcaaagagagagagttcgtcgccgccatcacatactctggcggcagcccttactacgccgactctgtgaagggcagattcaccatcagccgggacaacgccaagaacaccgtgtacctccagatgaacagcctgaagcctgaggacaccgccgtgtactactgcgccgccaatccaacatacggcagcgactggaacgccgagaattggggccagggaacccaagtgacagtgtctagcggtaccggcggaggcggatctggcggcggaggtagcggtggcggaggatctgaattcgacatccagatgacacagagccctagcagcctgtctgccagcgtgggagacagagtgaccatcacatgcaaggccagcgaccacatcaacaactggctggcctggtatcagcagaagcctggacaggcccctaagctgctgatctacggcgctaccacactggaaacaggcgtgcccagcagattttctggcagcggctctggcaccgactacaccctgacaatatccagcctccagcctgaggacttcgccacctactactgtcagcagagctggaacaccccttggacattcggccagggcaccaagctggaaatcaagagactcgaggacctgaagaacgtgttcccacctgaggtggccgtgttcgagcctagcgaggccgagatcagccacacccagaaagccaccctcgtgtgcctggctaccggcttctaccccgaccatgtggaactgtcttggtgggtcaacggcaaagaggtgcacagcggcgtgtctaccgacccccagccactgaaagaacagcccgccctgaacgacagccggtactgcctgagcagcagactgagagtgtccgccaccttctggcagaacccccggaaccacttcagatgccaggtgcagttctacggcctgagcgagaacgacgagtggacccaggacagagccaagcccgtgacccagatcgtgtctgccgaagcctggggcagagccgattgcggatccacaacacctggcgagagaagtagcctgcctgccttctatcctggcaccagcggctcttgttctggctgtggatctctgagcctgcctctgctggctggactggttgctgctgatgctgtggcctctctgctgattgtgggagccgtgttcctgtgcgccagacctagaagaagccccgctcaagaggacggcaaggtgtacatcaacatgcccggcagaggaagggccaagcgatctggatctggagcaacaaacttctcactactcaaacaagcaggtgacgtggaggagaatcccgggcctactagtatggactggatttggcgcatccttttccttgtcggcgctgctaccggcgcgcattccgggcccgaagtgcaactggttgaatccggtggcggcctggtgcaagcaggcggatctctcagacttagctgtgccgcctccggcagaaccttcacaatgggatggtttaggcaggctccagggaaagagagagagttcgtcgccgccatctctctgtctcccacactggcctactacgccgactctgtgaaaggccggttcaccatctccagagataatgccaagaacaccgtggtgctgcaaatgaactctctgaaacccgaggatacagccctgtactattgtgccgctgaccggaagtccgtgatgagcatcagacccgattactggggacagggcacacaagtcacagtgtcctctggatccggcggcggaggatctggcggaggcggatctgggggcggaggctctttcgaacaagttcagcttcaacagcctggcgctgagctggtcaaacctggcgcttctgtgaagatgagctgcaaagccagcggctacgccttcagcagctactggatcaactggatgaagcagaaacccggccagggactcgaatggatcggccaaatctatcccggcgacggcgacaccaactacaacggcaagttcaagggcagagccacactgaccgccgatacctctagcagcacagcctacatgcagctgagcagcctgaccagcgaagatagcgccgtgtacttctgtgcccggtccatcacaacagtcgtgggctgcgctatggactattggggccagggaacaagcgtgaccgtgtctagtacgcgtatccagaaccctgatcctgccgtgtaccagctgcgggatagcaagagcagcgacaagagcgtgtgtctgttcaccgacttcgacagccagaccaacgtgtcccagagcaaggactccgacgtgtacatcaccgataagaccgtgctggacatgcggagcatggacttcaagagcaactccgccgtggcctggtccaacaagtccgatttcgcctgcgccaacgccttcaacaacagcattatccccgaggacacattcttcccaagccccgagagcagctgcggtaccacaacgccgggcgaaaggagttccttgccggccttttaccccggcacaagcggaagctgtagtgggtgtggaagcctcagcctcccacttcttgcgggcctcgtcgcggcagatgcagtagcttcacttcttattgtaggcgcggtatttctctgtgctcgaccaaggaggtcacccgctcaggaggatggtaaggtgtatataaatatgccaggacgcggacgcgccaagagaagcggatctggcgtgaagcagaccctgaatttcgacctgctgaagctggctggcgacgtggaatccaacccaggcccttctagaggccatatgaccgagtacaagcccacggtgcgcctcgccacccgcgacgacgtccccagggccgtacgcaccctcgccgccgcgttcgccgactaccccgccacgcgccacaccgtcgatccggaccgccacatcgagcgggtcaccgagctgcaagaactcttcctcacgcgcgtcgggctcgacatcggcaaggtgtgggtcgcggacgacggcgccgcggtggcggtctggaccacgccggagagcgtcgaagcgggggcggtgttcgccgagatcggcccgcgcatggccgagttgagcggttcccggctggccgcgcagcaacagatggaaggcctcctggcgccgcaccggcccaaggagcccgcgtggttcctggccaccgtcggcgtctcgcccgaccaccagggcaagggtctgggcagcgccgtcgtgctccccggagtggaggcggccgagcgcgccggggtgcccgccttcctggagacctccgcgccccgcaacctccccttctacgagcggctcggcttcaccgtcaccgccgacgtcgaggtgcccgaaggaccgcgcacctggtgcatgacccgcaagcccggtgcctga

SEQ ID NO: 2001 - DNA, 2763 bp, Artificial Sequence
  Synthetic Polynucleotide
atggccttaccagtgaccgccttgctcctgccgctggccttgctgctccacgccgccaggccggaagtgcagctggttgaatctggcggaggactggttcaggctggcggatctctgagactgtcttgtgccgccagcggcagaacctttagcatgggctggtttagacaggcccctggcaaagagagagagttcgtcgccgccatcacatactctggcggcagcccttactacgccgactctgtgaagggcagattcaccatcagccgggacaacgccaagaacaccgtgtacctccagatgaacagcctgaagcctgaggacaccgccgtgtactactgcgccgccaatccaacatacggcagcgactggaacgccgagaattggggccagggaacccaagtgacagtgtctagcctcgaggacctgaagaacgtgttcccacctgaggtggccgtgttcgagcctagcgaggccgagatcagccacacccagaaagccaccctcgtgtgcctggctaccggcttctaccccgaccatgtggaactgtcttggtgggtcaacggcaaagaggtgcacagcggcgtgtctaccgacccccagccactgaaagaacagcccgccctgaacgacagccggtactgcctgagcagcagactgagagtgtccgccaccttctggcagaacccccggaaccacttcagatgccaggtgcagttctacggcctgagcgagaacgacgagtggacccaggacagagccaagcccgtgacccagatcgtgtctgccgaagcctggggcagagccgattgcggatccacaacacctggcgagagaagtagcctgcctgccttctatcctggcaccagcggctcttgttctggctgtggatctctgagcctgcctctgctggctggactggttgctgctgatgctgtggcctctctgctgattgtgggagccgtgttcctgtgcgccagacctagaagaagccccgctcaagaggacggcaaggtgtacatcaacatgcccggcagaggaagggccaagcgatctggatctggagcaacaaacttctcactactcaaacaagcaggtgacgtggaggagaatcccgggcctactagtatggactggatttggcgcatccttttccttgtcggcgctgctaccggcgcgcattccgggcccgaagtgcaactggttgaatccggtggcggcctggtgcaagcaggcggatctctcagacttagctgtgccgcctccggcagaaccttcacaatgggatggtttaggcaggctccagggaaagagagagagttcgtcgccgccatctctctgtctcccacactggcctactacgccgactctgtgaaaggccggttcaccatctccagagataatgccaagaacaccgtggtgctgcaaatgaactctctgaaacccgaggatacagccctgtactattgtgccgctgaccggaagtccgtgatgagcatcagacccgattactggggacagggcacacaagtcacagtgtcctctacgcgtatccagaaccctgatcctgccgtgtaccagctgcgggatagcaagagcagcgacaagagcgtgtgtctgttcaccgacttcgacagccagaccaacgtgtcccagagcaaggactccgacgtgtacatcaccgataagaccgtgctggacatgcggagcatggacttcaagagcaactccgccgtggcctggtccaacaagtccgatttcgcctgcgccaacgccttcaacaacagcattatccccgaggacacattcttcccaagccccgagagcagctgcggtaccacaacgccgggcgaaaggagttccttgccggccttttaccccggcacaagcggaagctgtagtgggtgtggaagcctcagcctcccacttcttgcgggcctcgtcgcggcagatgcagtagcttcacttcttattgtaggcgcggtatttctctgtgctcgaccaaggaggtcacccgctcaggaggatggtaaggtgtatataaatatgccaggacgcggacgcgccaagagaagcggatctggcgtgaagcagaccctgaatttcgacctgctgaagctggctggcgacgtggaatccaacccaggcccttctagaggccatatgaccgagtacaagcccacggtgcgcctcgccacccgcgacgacgtccccagggccgtacgcaccctcgccgccgcgttcgccgactaccccgccacgcgccacaccgtcgatccggaccgccacatcgagcgggtcaccgagctgcaagaactcttcctcacgcgcgtcgggctcgacatcggcaaggtgtgggtcgcggacgacggcgccgcggtggcggtctggaccacgccggagagcgtcgaagcgggggcggtgttcgccgagatcggcccgcgcatggccgagttgagcggttcccggctggccgcgcagcaacagatggaaggcctcctggcgccgcaccggcccaaggagcccgcgtggttcctggccaccgtcggcgtctcgcccgaccaccagggcaagggtctgggcagcgccgtcgtgctccccggagtggaggcggccgagcgcgccggggtgcccgccttcctggagacctccgcgccccgcaacctccccttctacgagcggctcggcttcaccgtcaccgccgacgtcgaggtgcccgaaggaccgcgcacctggtgcatgacccgcaagcccggtgcctga

SEQ ID NO: 2002 - DNA, 1410 bp, Artificial Sequence
  Synthetic Polynucleotide
atggccttaccagtgaccgccttgctcctgccgctggccttgctgctccacgccgccaggccggcatgcgaagtgcagctgcttgaaagtggcggcggactgattcagcctggcggatctctgagactgagctgtgccgccagcggcttcaccttttctagccacgccatgacctgggtccgacaggcacctggaaaagggcttgaatgggtgtccgccatcagcggctctggcgattacacacactacgccgacagcgtgaagggcagattcaccatcagcagagacaacagcaagaacaccgtgtacctccagatgaacagcctgagagccgaggacagcgccgtgtattattgcgccaaggatgaggatggcggcagcctgcttggacacagaggacaaggcaccctggtcaccgtttcttccggtaccggcggaggcggatctggcggcggaggtagcggtggcggaggatctgaattcggatctctcgagacaacacctggcgagagaagtagcctgcctgccttctatcctggcaccagcggctcttgttctggctgtggatctctgagcctgcctctgctggctggactggttgctgctgatgctgtggcctctctgctgattgtgggagccgtgttcctgtgcgccagacctagaagaagccccgctcaagaggacggcaaggtgtacatcaacatgcccggcagaggaagggccaagcgatctggatctggagcaacaaacttctcactactcaaacaagcaggtgacgtggaggagaatcccgggcctactagaggccatatgaccgagtacaagcccacggtgcgcctcgccacccgcgacgacgtccccagggccgtacgcaccctcgccgccgcgttcgccgactaccccgccacgcgccacaccgtcgatccggaccgccacatcgagcgggtcaccgagctgcaagaactcttcctcacgcgcgtcgggctcgacatcggcaaggtgtgggtcgcggacgacggcgccgcggtggcggtctggaccacgccggagagcgtcgaagcgggggcggtgttcgccgagatcggcccgcgcatggccgagttgagcggttcccggctggccgcgcagcaacagatggaaggcctcctggcgccgcaccggcccaaggagcccgcgtggttcctggccaccgtcggcgtctcgcccgaccaccagggcaagggtctgggcagcgccgtcgtgctccccggagtggaggcggccgagcgcgccggggtgcccgccttcctggagacctccgcgccccgcaacctccccttctacgagcggctcggcttcaccgtcaccgccgacgtcgaggtgcccgaaggaccgcgcacctggtgcatgacccgcaagcccggtgcctga

SEQ ID NO: 2003 - DNA, 36 bp, Artificial Sequence
  Synthetic Polynucleotide
gggggggggggggggggggggggggggggggggggg

SEQ ID NO: 2004 - DNA, 36 bp, Artificial Sequence; identical to SEQ ID NO: 2003
  Synthetic Polynucleotide

SEQ ID NO: 2005 - DNA, 36 bp, Artificial Sequence; identical to SEQ ID NO: 2003
  Synthetic Polynucleotide

SEQ ID NO: 2006 - DNA, 36 bp, Artificial Sequence; identical to SEQ ID NO: 2003
  Synthetic Polynucleotide

SEQ ID NO: 2007 - DNA, 36 bp, Artificial Sequence; identical to SEQ ID NO: 2003
  Synthetic Polynucleotide

SEQ ID NO: 2008 - DNA, 36 bp, Artificial Sequence; identical to SEQ ID NO: 2003
  Synthetic Polynucleotide

SEQ ID NO: 2009 - DNA, 36 bp, Artificial Sequence; identical to SEQ ID NO: 2003
  Synthetic Polynucleotide

SEQ ID NO: 2010 - DNA, 36 bp, Artificial Sequence; identical to SEQ ID NO: 2003
  Synthetic Polynucleotide

SEQ ID NO: 2011 - DNA, 36 bp, Artificial Sequence; identical to SEQ ID NO: 2003
  Synthetic Polynucleotide

SEQ ID NO: 2012 - DNA, 36 bp, Artificial Sequence; identical to SEQ ID NO: 2003
  Synthetic Polynucleotide

SEQ ID NO: 2013 - DNA, 36 bp, Artificial Sequence; identical to SEQ ID NO: 2003
  Synthetic Polynucleotide

SEQ ID NO: 2014 - DNA, 36 bp, Artificial Sequence; identical to SEQ ID NO: 2003
  Synthetic Polynucleotide

SEQ ID NO: 2015 - DNA, 36 bp, Artificial Sequence; identical to SEQ ID NO: 2003
  Synthetic Polynucleotide

SEQ ID NO: 2016 - DNA, 36 bp, Artificial Sequence; identical to SEQ ID NO: 2003
  Synthetic Polynucleotide

SEQ ID NO: 2017 - DNA, 36 bp, Artificial Sequence; identical to SEQ ID NO: 2003
  Synthetic Polynucleotide

SEQ ID NO: 2018 - DNA, 36 bp, Artificial Sequence; identical to SEQ ID NO: 2003
  Synthetic Polynucleotide

SEQ ID NO: 2019 - DNA, 36 bp, Artificial Sequence; identical to SEQ ID NO: 2003
  Synthetic Polynucleotide

SEQ ID NO: 2020 - DNA, 36 bp, Artificial Sequence; identical to SEQ ID NO: 2003
  Synthetic Polynucleotide

SEQ ID NO: 2021 - DNA, 36 bp, Artificial Sequence; identical to SEQ ID NO: 2003
  Synthetic Polynucleotide

SEQ ID NO: 2022 - DNA, 36 bp, Artificial Sequence; identical to SEQ ID NO: 2003
  Synthetic Polynucleotide

SEQ ID NO: 2023 - DNA, 36 bp, Artificial Sequence; identical to SEQ ID NO: 2003
  Synthetic Polynucleotide

SEQ ID NO: 2024 - DNA, 36 bp, Artificial Sequence; identical to SEQ ID NO: 2003
  Synthetic Polynucleotide

SEQ ID NO: 2025 - DNA, 2742 bp, Artificial Sequence
  Synthetic Polynucleotide
atggccttaccagtgaccgccttgctcctgccgctggccttgctgctccacgccgccaggccggacatccagatgacacagagccctagcagcctgtctgccagcgtgggagacagagtgaccatcacatgcaaggccagcgaccacatcaacaactggctggcctggtatcagcagaagcctggacaggcccctaagctgctgatctacggcgctaccacactggaaacaggcgtgcccagcagattttctggcagcggctctggcaccgactacaccctgacaatatccagcctccagcctgaggacttcgccacctactactgtcagcagagctggaacaccccttggacattcggccagggcaccaagctggaaatcaagagactcgagacaacacctggcgagagaagtagcctgcctgccttctatcctggcaccagcggctcttgttctggctgtggatctctgagcctgcctctgctggctggactggttgctgctgatgctgtggcctctctgctgattgtgggagccgtgttcctgtgcgccagacctagaagaagccccgctcaagaggacggcaaggtgtacatcaacatgcccggcagaggaagcactagtagagtgaagttcagcagaagcgccgacgcccctgcctaccagcagggacagaaccaactgtacaacgagctgaacctgggcagacgggaagagtacgacgtgctggacaagcggagaggcagggaccctgagatgggcggaaagccccagcggagaaagaacccccaggaaggactgtataacgaactccagaaagacaagatggccgaagcctacagcgagatcggcatgaagggcgagcggagaagaggcaagggccacgatggcctgtaccagggcctgagcaccgccaccaaggacacctatgacgccctgcacatgcaggccctgcctccaagaagggccaagcgatctggatctggagcaacaaacttctcactactcaaacaagcaggtgacgtggaggagaatcccgggcctatggactggatttggcgcatccttttccttgtcggcgctgctaccggcgcgcattccttcgaacaagttcagcttcaacagcctggcgctgagctggtcaaacctggcgcttctgtgaagatgagctgcaaagccagcggctacgccttcagcagctactggatcaactggatgaagcagaaacccggccagggactcgaatggatcggccaaatctatcccggcgacggcgacaccaactacaacggcaagttcaagggcagagccacactgaccgccgatacctctagcagcacagcctacatgcagctgagcagcctgaccagcgaagatagcgccgtgtacttctgtgcccggtccatcacaacagtcgtgggctgcgctatggactattggggccagggaacaagcgtgaccgtgtctagtacgcgtacaacgccgggcgaaaggagttccttgccggccttttaccccggcacaagcggaagctgtagtgggtgtggaagcctcagcctcccacttcttgcgggcctcgtcgcggcagatgcagtagcttcacttcttattgtaggcgcggtatttctctgtgctcgaccaaggaggtcacccgctcaggaggatggtaaggtgtatataaatatgccaggacgcggaagctctagacgggttaagttttccagatccgcagacgcacccgcttaccaacaagggcagaaccaactctacaatgaacttaatttggggcggagggaagagtacgacgttctggacaaaaggaggggacgagatcccgagatgggcggaaagcctcagcgaaggaagaatccgcaagaggggctttataacgaactccagaaagataaaatggcagaagcctatagtgagattgggatgaagggagaaaggaggaggggtaaaggtcacgatgggttgtaccaaggattgagcacagccactaaagatacctatgatgcgctccacatgcaggccctgccgccaagacgcgccaagagaagcggatctggcgtgaagcagaccctgaatttcgacctgctgaagctggctggcgacgtggaatccaacccaggccctggccatatgaccgagtacaagcccacggtgcgcctcgccacccgcgacgacgtccccagggccgtacgcaccctcgccgccgcgttcgccgactaccccgccacgcgccacaccgtcgatccggaccgccacatcgagcgggtcaccgagctgcaagaactcttcctcacgcgcgtcgggctcgacatcggcaaggtgtgggtcgcggacgacggcgccgcggtggcggtctggaccacgccggagagcgtcgaagcgggggcggtgttcgccgagatcggcccgcgcatggccgagttgagcggttcccggctggccgcgcagcaacagatggaaggcctcctggcgccgcaccggcccaaggagcccgcgtggttcctggccaccgtcggcgtctcgcccgaccaccagggcaagggtctgggcagcgccgtcgtgctccccggagtggaggcggccgagcgcgccggggtgcccgccttcctggagacctccgcgccccgcaacctccccttctacgagcggctcggcttcaccgtcaccgccgacgtcgaggtgcccgaaggaccgcgcacctggtgcatgacccgcaagcccggtgcctga

SEQ ID NO: 2026 - DNA, 2898 bp, Artificial Sequence
  Synthetic Polynucleotide
atggccttaccagtgaccgccttgctcctgccgctggccttgctgctccacgccgccaggccggcatgcgaagtgcagctgcttgaaagtggcggcggactgattcagcctggcggatctctgagactgagctgtgccgccagcggcttcaccttttctagccacgccatgacctgggtccgacaggcacctggaaaagggcttgaatgggtgtccgccatcagcggctctggcgattacacacactacgccgacagcgtgaagggcagattcaccatcagcagagacaacagcaagaacaccgtgtacctccagatgaacagcctgagagccgaggacagcgccgtgtattattgcgccaaggatgaggatggcggcagcctgcttggacacagaggacaaggcaccctggtcaccgtttcttccggtaccggcggaggcggatctggcggcggaggtagcggtggcggaggatctgaattcggatctctcgagacaacacctggcgagagaagtagcctgcctgccttctatcctggcaccagcggctcttgttctggctgtggatctctgagcctgcctctgctggctggactggttgctgctgatgctgtggcctctctgctgattgtgggagccgtgttcctgtgcgccagacctagaagaagccccgctcaagaggacggcaaggtgtacatcaacatgcccggcagaggaagcactagtagagtgaagttcagcagaagcgccgacgcccctgcctaccagcagggacagaaccaactgtacaacgagctgaacctgggcagacgggaagagtacgacgtgctggacaagcggagaggcagggaccctgagatgggcggaaagccccagcggagaaagaacccccaggaaggactgtataacgaactccagaaagacaagatggccgaagcctacagcgagatcggcatgaagggcgagcggagaagaggcaagggccacgatggcctgtaccagggcctgagcaccgccaccaaggacacctatgacgccctgcacatgcaggccctgcctccaagaagggccaagcgatctggatctggagcaacaaacttctcactactcaaacaagcaggtgacgtggaggagaatcccgggcctatggactggatttggcgcatccttttccttgtcggcgctgctaccggcgcgcattccgggcccgaagtgcagctggttgaatctggcggaggactggttcaggctggcggatctctgagactgtcttgtgccgccagcggcagaacctttagcatgggctggtttagacaggcccctggcaaagagagagagttcgtcgccgccatcacatactctggcggcagcccttactacgccgactctgtgaagggcagattcaccatcagccgggacaacgccaagaacaccgtgtacctccagatgaacagcctgaagcctgaggacaccgccgtgtactactgcgccgccaatccaacatacggcagcgactggaacgccgagaattggggccagggaacccaagtgacagtgtctagcggatccggcggcggaggatctggcggaggcggatctgggggcggaggctctttcgaaggcagcacgcgtacaacgccgggcgaaaggagttccttgccggccttttaccccggcacaagcggaagctgtagtgggtgtggaagcctcagcctcccacttcttgcgggcctcgtcgcggcagatgcagtagcttcacttcttattgtaggcgcggtatttctctgtgctcgaccaaggaggtcacccgctcaggaggatggtaaggtgtatataaatatgccaggacgcggaagctctagacgggttaagttttccagatccgcagacgcacccgcttaccaacaagggcagaaccaactctacaatgaacttaatttggggcggagggaagagtacgacgttctggacaaaaggaggggacgagatcccgagatgggcggaaagcctcagcgaaggaagaatccgcaagaggggctttataacgaactccagaaagataaaatggcagaagcctatagtgagattgggatgaagggagaaaggaggaggggtaaaggtcacgatgggttgtaccaaggattgagcacagccactaaagatacctatgatgcgctccacatgcaggccctgccgccaagacgcgccaagagaagcggatctggcgtgaagcagaccctgaatttcgacctgctgaagctggctggcgacgtggaatccaacccaggccctggccatatgaccgagtacaagcccacggtgcgcctcgccacccgcgacgacgtccccagggccgtacgcaccctcgccgccgcgttcgccgactaccccgccacgcgccacaccgtcgatccggaccgccacatcgagcgggtcaccgagctgcaagaactcttcctcacgcgcgtcgggctcgacatcggcaaggtgtgggtcgcggacgacggcgccgcggtggcggtctggaccacgccggagagcgtcgaagcgggggcggtgttcgccgagatcggcccgcgcatggccgagttgagcggttcccggctggccgcgcagcaacagatggaaggcctcctggcgccgcaccggcccaaggagcccgcgtggttcctggccaccgtcggcgtctcgcccgaccaccagggcaagggtctgggcagcgccgtcgtgctccccggagtggaggcggccgagcgcgccggggtgcccgccttcctggagacctccgcgccccgcaacctccccttctacgagcggctcggcttcaccgtcaccgccgacgtcgaggtgcccgaaggaccgcgcacctggtgcatgacccgcaagcccggtgcctga

SEQ ID NO: 2027 - DNA, 3345 bp, Artificial Sequence
  Synthetic Polynucleotide
atggccttaccagtgaccgccttgctcctgccgctggccttgctgctccacgccgccaggccggacatccagatgacacagagccctagcagcctgtctgccagcgtgggagacagagtgaccatcacatgcaaggccagcgaccacatcaacaactggctggcctggtatcagcagaagcctggacaggcccctaagctgctgatctacggcgctaccacactggaaacaggcgtgcccagcagattttctggcagcggctctggcaccgactacaccctgacaatatccagcctccagcctgaggacttcgccacctactactgtcagcagagctggaacaccccttggacattcggccagggcaccaagctggaaatcaagagactcgagggacagcctaaggccaatcctaccgtgacactgttccctccaagcagcgaagaactccaggccaacaaggccacacttgtgtgcctgatctccgacttctaccctggggctgtgacagtggcttggaaggccgatggatctcctgtgaaagccggcgtggaaaccaccaagccatccaagcagagcaacaacaaatacgccgccagctcctacctgagcctgacacctgagcagtggaagtcccacagatcctacagctgccaagtgacccacgaaggcagcaccgtggaaaagacagtggcccctacagagtgcagcggatccacaacacctggcgagagaagtagcctgcctgccttctatcctggcaccagcggctcttgttctggctgtggatctctgagcctgcctctgctggctggactggttgctgctgatgctgtggcctctctgctgattgtgggagccgtgttcctgtgcgccagacctagaagaagccccgctcaagaggacggcaaggtgtacatcaacatgcccggcagaggaagcactagtagagtgaagttcagcagaagcgccgacgcccctgcctaccagcagggacagaaccaactgtacaacgagctgaacctgggcagacgggaagagtacgacgtgctggacaagcggagaggcagggaccctgagatgggcggaaagccccagcggagaaagaacccccaggaaggactgtataacgaactccagaaagacaagatggccgaagcctacagcgagatcggcatgaagggcgagcggagaagaggcaagggccacgatggcctgtaccagggcctgagcaccgccaccaaggacacctatgacgccctgcacatgcaggccctgcctccaagaagggccaagcgatctggatctggagcaacaaacttctcactactcaaacaagcaggtgacgtggaggagaatcccgggcctatggactggatttggcgcatccttttccttgtcggcgctgctaccggcgcgcattccttcgaacaagttcagcttcaacagcctggcgctgagctggtcaaacctggcgcttctgtgaagatgagctgcaaagccagcggctacgccttcagcagctactggatcaactggatgaagcagaaacccggccagggactcgaatggatcggccaaatctatcccggcgacggcgacaccaactacaacggcaagttcaagggcagagccacactgaccgccgatacctctagcagcacagcctacatgcagctgagcagcctgaccagcgaagatagcgccgtgtacttctgtgcccggtccatcacaacagtcgtgggctgcgctatggactattggggccagggaacaagcgtgaccgtgtctagtacgcgtgcctctacaaagggaccctccgtgtttcctctggctcccagcagcaagtctacaagcggaggaacagccgctctgggctgcctggtcaaggattactttcccgagcctgtgaccgtgtcctggaatagcggagcactgacaagcggcgtgcacacctttccagccgtgctgcaaagcagcggcctgtactctctgagcagcgtggtcacagtgcctagctctagcctgggcacccagacctacatctgcaatgtgaaccacaagcctagcaacaccaaggtggacaagagagtggaacccaagagctgtggtaccacaacgccgggcgaaaggagttccttgccggccttttaccccggcacaagcggaagctgtagtgggtgtggaagcctcagcctcccacttcttgcgggcctcgtcgcggcagatgcagtagcttcacttcttattgtaggcgcggtatttctctgtgctcgaccaaggaggtcacccgctcaggaggatggtaaggtgtatataaatatgccaggacgcggaagctctagacgggttaagttttccagatccgcagacgcacccgcttaccaacaagggcagaaccaactctacaatgaacttaatttggggcggagggaagagtacgacgttctggacaaaaggaggggacgagatcccgagatgggcggaaagcctcagcgaaggaagaatccgcaagaggggctttataacgaactccagaaagataaaatggcagaagcctatagtgagattgggatgaagggagaaaggaggaggggtaaaggtcacgatgggttgtaccaaggattgagcacagccactaaagatacctatgatgcgctccacatgcaggccctgccgccaagacgcgccaagagaagcggatctggcgtgaagcagaccctgaatttcgacctgctgaagctggctggcgacgtggaatccaacccaggccctggccatatggctacctacgaggtgctgtgcgaggtggcaagaaagctgggcaccgacgacagagaagtggtgctgttcctgctgaacgtgttcatccctcagcctacactggcccagctgatcggtgcactgagagccctgaaagaggaaggccggctgacctttcctctgctggccgaatgcctgttcagagccggaagaagggatctgctgcgggacctgctgcatctggaccccagatttctggaaagacacctggccggcaccatgagctacttcagcccttaccagctgaccgtgctgcacgttgacggcgaactgtgcgccagagatattcggagcctgatcttcctgagcaaggacaccatcggcagccggtctacccctcagacatttctgcactgggtgtactgcatggaaaacctggacctgctcggccccacagatgtggatgccctgatgtccatgctgagaagcctgagcagagtggacctccagagacaggtgcagacactgatgggactgcacctgagcggacctagccacagccagcactacagacacacccct

SEQ ID NO: 2028 - DNA, 3504 bp, Artificial Sequence
  Synthetic Polynucleotide
atggccttaccagtgaccgccttgctcctgccgctggccttgctgctccacgccgccaggccggacatccagatgacacagagccctagcagcctgtctgccagcgtgggagacagagtgaccatcacatgcaaggccagcgaccacatcaacaactggctggcctggtatcagcagaagcctggacaggcccctaagctgctgatctacggcgctaccacactggaaacaggcgtgcccagcagattttctggcagcggctctggcaccgactacaccctgacaatatccagcctccagcctgaggacttcgccacctactactgtcagcagagctggaacaccccttggacattcggccagggcaccaagctggaaatcaagagactcgagggacagcctaaggccaatcctaccgtgacactgttccctccaagcagcgaagaactccaggccaacaaggccacacttgtgtgcctgatctccgacttctaccctggggctgtgacagtggcttggaaggccgatggatctcctgtgaaagccggcgtggaaaccaccaagccatccaagcagagcaacaacaaatacgccgccagctcctacctgagcctgacacctgagcagtggaagtcccacagatcctacagctgccaagtgacccacgaaggcagcaccgtggaaaagacagtggcccctacagagtgcagcggatccacaacacctggcgagagaagtagcctgcctgccttctatcctggcaccagcggctcttgttctggctgtggatctctgagcctgcctctgctggctggactggttgctgctgatgctgtggcctctctgctgattgtgggagccgtgttcctgtgcgccagacctagaagaagccccgctcaagaggacggcaaggtgtacatcaacatgcccggcagaggaagcactagtagagtgaagttcagcagaagcgccgacgcccctgcctaccagcagggacagaaccaactgtacaacgagctgaacctgggcagacgggaagagtacgacgtgctggacaagcggagaggcagggaccctgagatgggcggaaagccccagcggagaaagaacccccaggaaggactgtataacgaactccagaaagacaagatggccgaagcctacagcgagatcggcatgaagggcgagcggagaagaggcaagggccacgatggcctgtaccagggcctgagcaccgccaccaaggacacctatgacgccctgcacatgcaggccctgcctccaagaagggccaagcgatctggatctggagcaacaaacttctcactactcaaacaagcaggtgacgtggaggagaatcccgggcctatggactggatttggcgcatccttttccttgtcggcgctgctaccggcgcgcattccttcgaacaagttcagcttcaacagcctggcgctgagctggtcaaacctggcgcttctgtgaagatgagctgcaaagccagcggctacgccttcagcagctactggatcaactggatgaagcagaaacccggccagggactcgaatggatcggccaaatctatcccggcgacggcgacaccaactacaacggcaagttcaagggcagagccacactgaccgccgatacctctagcagcacagcctacatgcagctgagcagcctgaccagcgaagatagcgccgtgtacttctgtgcccggtccatcacaacagtcgtgggctgcgctatggactattggggccagggaacaagcgtgaccgtgtctagtacgcgtgcctctacaaagggaccctccgtgtttcctctggctcccagcagcaagtctacaagcggaggaacagccgctctgggctgcctggtcaaggattactttcccgagcctgtgaccgtgtcctggaatagcggagcactgacaagcggcgtgcacacctttccagccgtgctgcaaagcagcggcctgtactctctgagcagcgtggtcacagtgcctagctctagcctgggcacccagacctacatctgcaatgtgaaccacaagcctagcaacaccaaggtggacaagagagtggaacccaagagctgtggtaccacaacgccgggcgaaaggagttccttgccggccttttaccccggcacaagcggaagctgtagtgggtgtggaagcctcagcctcccacttcttgcgggcctcgtcgcggcagatgcagtagcttcacttcttattgtaggcgcggtatttctctgtgctcgaccaaggaggtcacccgctcaggaggatggtaaggtgtatataaatatgccaggacgcggaagctctagacgggttaagttttccagatccgcagacgcacccgcttaccaacaagggcagaaccaactctacaatgaacttaatttggggcggagggaagagtacgacgttctggacaaaaggaggggacgagatcccgagatgggcggaaagcctcagcgaaggaagaatccgcaagaggggctttataacgaactccagaaagataaaatggcagaagcctatagtgagattgggatgaagggagaaaggaggaggggtaaaggtcacgatgggttgtaccaaggattgagcacagccactaaagatacctatgatgcgctccacatgcaggccctgccgccaagacgcgccaagagaagcggatctggcgtgaagcagaccctgaatttcgacctgctgaagctggctggcgacgtggaatccaacccaggccctggccatatgtccgactccaaggaggtccctagccttccatttttgcgacacttgctcgaagagttggacagccatgaggacagcttgctgctgtttctgtgtcacgacgcggccccgggctgcacgacggtcacgcaagctttgtgctcgcttagccaacagcgcaagctgaccctcgcggctctggtcgagatgctctacgtgctgcagcgtatggatcttctcaagagccgcttcgggctcagcaaggagggggccgagcaattgctgggcacaagctttctcacgcgctaccgcaagctcatggtttgcgtgggtgaggagctcgactcgagcgagctacgcgctctacgcttgttcgcgtgcaacctgaatccgagcctgagcacggcgctttctgagagcagccgctttgtcgagcttgtactcgcgcttgaaaacgtaggactcgtctcgccatcgagtgtttccgtgcttgcggacatgttgcgcactcttcggcgcctcgatttgtgccagcagcttgttgagtacgaacaacaagagcaagccaggtaccgttactgttacgcggcctcgccctcattgccagttcgtacgttacgtcgggggcacggcgcgagtgaacacgagcagctgtgcatgcccgtgcaagaatcctctgacagccccgagctgctgcgcacgcccgtacaagaatcctccagcgacagccccgagcaaacgact

SEQ ID NO: 2029 - DNA, 3381 bp, Artificial Sequence
  Synthetic Polynucleotide
atggccttaccagtgaccgccttgctcctgccgctggccttgctgctccacgccgccaggccggacatccagatgacacagagccctagcagcctgtctgccagcgtgggagacagagtgaccatcacatgcaaggccagcgaccacatcaacaactggctggcctggtatcagcagaagcctggacaggcccctaagctgctgatctacggcgctaccacactggaaacaggcgtgcccagcagattttctggcagcggctctggcaccgactacaccctgacaatatccagcctccagcctgaggacttcgccacctactactgtcagcagagctggaacaccccttggacattcggccagggcaccaagctggaaatcaagagactcgagggacagcctaaggccaatcctaccgtgacactgttccctccaagcagcgaagaactccaggccaacaaggccacacttgtgtgcctgatctccgacttctaccctggggctgtgacagtggcttggaaggccgatggatctcctgtgaaagccggcgtggaaaccaccaagccatccaagcagagcaacaacaaatacgccgccagctcctacctgagcctgacacctgagcagtggaagtcccacagatcctacagctgccaagtgacccacgaaggcagcaccgtggaaaagacagtggcccctacagagtgcagcggatccacaacacctggcgagagaagtagcctgcctgccttctatcctggcaccagcggctcttgttctggctgtggatctctgagcctgcctctgctggctggactggttgctgctgatgctgtggcctctctgctgattgtgggagccgtgttcctgtgcgccagacctagaagaagccccgctcaagaggacggcaaggtgtacatcaacatgcccggcagaggaagcactagtagagtgaagttcagcagaagcgccgacgcccctgcctaccagcagggacagaaccaactgtacaacgagctgaacctgggcagacgggaagagtacgacgtgctggacaagcggagaggcagggaccctgagatgggcggaaagccccagcggagaaagaacccccaggaaggactgtataacgaactccagaaagacaagatggccgaagcctacagcgagatcggcatgaagggcgagcggagaagaggcaagggccacgatggcctgtaccagggcctgagcaccgccaccaaggacacctatgacgccctgcacatgcaggccctgcctccaagaagggccaagcgatctggatctggagcaacaaacttctcactactcaaacaagcaggtgacgtggaggagaatcccgggcctatggactggatttggcgcatccttttccttgtcggcgctgctaccggcgcgcattccttcgaacaagttcagcttcaacagcctggcgctgagctggtcaaacctggcgcttctgtgaagatgagctgcaaagccagcggctacgccttcagcagctactggatcaactggatgaagcagaaacccggccagggactcgaatggatcggccaaatctatcccggcgacggcgacaccaactacaacggcaagttcaagggcagagccacactgaccgccgatacctctagcagcacagcctacatgcagctgagcagcctgaccagcgaagatagcgccgtgtacttctgtgcccggtccatcacaacagtcgtgggctgcgctatggactattggggccagggaacaagcgtgaccgtgtctagtacgcgtgcctctacaaagggaccctccgtgtttcctctggctcccagcagcaagtctacaagcggaggaacagccgctctgggctgcctggtcaaggattactttcccgagcctgtgaccgtgtcctggaatagcggagcactgacaagcggcgtgcacacctttccagccgtgctgcaaagcagcggcctgtactctctgagcagcgtggtcacagtgcctagctctagcctgggcacccagacctacatctgcaatgtgaaccacaagcctagcaacaccaaggtggacaagagagtggaacccaagagctgtggtaccacaacgccgggcgaaaggagttccttgccggccttttaccccggcacaagcggaagctgtagtgggtgtggaagcctcagcctcccacttcttgcgggcctcgtcgcggcagatgcagtagcttcacttcttattgtaggcgcggtatttctctgtgctcgaccaaggaggtcacccgctcaggaggatggtaaggtgtatataaatatgccaggacgcggaagctctagacgggttaagttttccagatccgcagacgcacccgcttaccaacaagggcagaaccaactctacaatgaacttaatttggggcggagggaagagtacgacgttctggacaaaaggaggggacgagatcccgagatgggcggaaagcctcagcgaaggaagaatccgcaagaggggctttataacgaactccagaaagataaaatggcagaagcctatagtgagattgggatgaagggagaaaggaggaggggtaaaggtcacgatgggttgtaccaaggattgagcacagccactaaagatacctatgatgcgctccacatgcaggccctgccgccaagacgcgccaagagaagcggatctggcgtgaagcagaccctgaatttcgacctgctgaagctggctggcgacgtggaatccaacccaggccctggccatatgaccgagtacaagcccacggtgcgcctcgccacccgcgacgacgtccccagggccgtacgcaccctcgccgccgcgttcgccgactaccccgccacgcgccacaccgtcgatccggaccgccacatcgagcgggtcaccgagctgcaagaactcttcctcacgcgcgtcgggctcgacatcggcaaggtgtgggtcgcggacgacggcgccgcggtggcggtctggaccacgccggagagcgtcgaagcgggggcggtgttcgccgagatcggcccgcgcatggccgagttgagcggttcccggctggccgcgcagcaacagatggaaggcctcctggcgccgcaccggcccaaggagcccgcgtggttcctggccaccgtcggcgtctcgcccgaccaccagggcaagggtctgggcagcgccgtcgtgctccccggagtggaggcggccgagcgcgccggggtgcccgccttcctggagacctccgcgccccgcaacctccccttctacgagcggctcggcttcaccgtcaccgccgacgtcgaggtgcccgaaggaccgcgcacctggtgcatgacccgcaagcccggtgcctga

SEQ ID NO: 2030 - DNA, 3792 bp, Artificial Sequence
  Synthetic Polynucleotide
atggccttaccagtgaccgccttgctcctgccgctggccttgctgctccacgccgccaggccggaagtgcagctggttgaatctggcggaggactggttcaggctggcggatctctgagactgtcttgtgccgccagcggcagaacctttagcatgggctggtttagacaggcccctggcaaagagagagagttcgtcgccgccatcacatactctggcggcagcccttactacgccgactctgtgaagggcagattcaccatcagccgggacaacgccaagaacaccgtgtacctccagatgaacagcctgaagcctgaggacaccgccgtgtactactgcgccgccaatccaacatacggcagcgactggaacgccgagaattggggccagggaacccaagtgacagtgtctagcggtaccggcggaggcggatctggcggcggaggtagcggtggcggaggatctgaattcgacatccagatgacacagagccctagcagcctgtctgccagcgtgggagacagagtgaccatcacatgcaaggccagcgaccacatcaacaactggctggcctggtatcagcagaagcctggacaggcccctaagctgctgatctacggcgctaccacactggaaacaggcgtgcccagcagattttctggcagcggctctggcaccgactacaccctgacaatatccagcctccagcctgaggacttcgccacctactactgtcagcagagctggaacaccccttggacattcggccagggcaccaagctggaaatcaagagactcgagggacagcctaaggccaatcctaccgtgacactgttccctccaagcagcgaagaactccaggccaacaaggccacacttgtgtgcctgatctccgacttctaccctggggctgtgacagtggcttggaaggccgatggatctcctgtgaaagccggcgtggaaaccaccaagccatccaagcagagcaacaacaaatacgccgccagctcctacctgagcctgacacctgagcagtggaagtcccacagatcctacagctgccaagtgacccacgaaggcagcaccgtggaaaagacagtggcccctacagagtgcagcggatccacaacacctggcgagagaagtagcctgcctgccttctatcctggcaccagcggctcttgttctggctgtggatctctgagcctgcctctgctggctggactggttgctgctgatgctgtggcctctctgctgattgtgggagccgtgttcctgtgcgccagacctagaagaagccccgctcaagaggacggcaaggtgtacatcaacatgcccggcagaggaagcactagtagagtgaagttcagcagaagcgccgacgcccctgcctaccagcagggacagaaccaactgtacaacgagctgaacctgggcagacgggaagagtacgacgtgctggacaagcggagaggcagggaccctgagatgggcggaaagccccagcggagaaagaacccccaggaaggactgtataacgaactccagaaagacaagatggccgaagcctacagcgagatcggcatgaagggcgagcggagaagaggcaagggccacgatggcctgtaccagggcctgagcaccgccaccaaggacacctatgacgccctgcacatgcaggccctgcctccaagaagggccaagcgatctggatctggagcaacaaacttctcactactcaaacaagcaggtgacgtggaggagaatcccgggcctatggactggatttggcgcatccttttccttgtcggcgctgctaccggcgcgcattccttcgaacaagttcagcttcaacagcctggcgctgagctggtcaaacctggcgcttctgtgaagatgagctgcaaagccagcggctacgccttcagcagctactggatcaactggatgaagcagaaacccggccagggactcgaatggatcggccaaatctatcccggcgacggcgacaccaactacaacggcaagttcaagggcagagccacactgaccgccgatacctctagcagcacagcctacatgcagctgagcagcctgaccagcgaagatagcgccgtgtacttctgtgcccggtccatcacaacagtcgtgggctgcgctatggactattggggccagggaacaagcgtgaccgtgtctagtacgcgtgcctctacaaagggaccctccgtgtttcctctggctcccagcagcaagtctacaagcggaggaacagccgctctgggctgcctggtcaaggattactttcccgagcctgtgaccgtgtcctggaatagcggagcactgacaagcggcgtgcacacctttccagccgtgctgcaaagcagcggcctgtactctctgagcagcgtggtcacagtgcctagctctagcctgggcacccagacctacatctgcaatgtgaaccacaagcctagcaacaccaaggtggacaagagagtggaacccaagagctgtggtaccacaacgccgggcgaaaggagttccttgccggccttttaccccggcacaagcggaagctgtagtgggtgtggaagcctcagcctcccacttcttgcgggcctcgtcgcggcagatgcagtagcttcacttcttattgtaggcgcggtatttctctgtgctcgaccaaggaggtcacccgctcaggaggatggtaaggtgtatataaatatgccaggacgcggaagctctagacgggttaagttttccagatccgcagacgcacccgcttaccaacaagggcagaaccaactctacaatgaacttaatttggggcggagggaagagtacgacgttctggacaaaaggaggggacgagatcccgagatgggcggaaagcctcagcgaaggaagaatccgcaagaggggctttataacgaactccagaaagataaaatggcagaagcctatagtgagattgggatgaagggagaaaggaggaggggtaaaggtcacgatgggttgtaccaaggattgagcacagccactaaagatacctatgatgcgctccacatgcaggccctgccgccaagacgcgccaagagaagcggatctggcgtgaagcagaccctgaatttcgacctgctgaagctggctggcgacgtggaatccaacccaggccctggccatatgaccgagtacaagcccacggtgcgcctcgccacccgcgacgacgtccccagggccgtacgcaccctcgccgccgcgttcgccgactaccccgccacgcgccacaccgtcgatccggaccgccacatcgagcgggtcaccgagctgcaagaactcttcctcacgcgcgtcgggctcgacatcggcaaggtgtgggtcgcggacgacggcgccgcggtggcggtctggaccacgccggagagcgtcgaagcgggggcggtgttcgccgagatcggcccgcgcatggccgagttgagcggttcccggctggccgcgcagcaacagatggaaggcctcctggcgccgcaccggcccaaggagcccgcgtggttcctggccaccgtcggcgtctcgcccgaccaccagggcaagggtctgggcagcgccgtcgtgctccccggagtggaggcggccgagcgcgccggggtgcccgccttcctggagacctccgcgccccgcaacctccccttctacgagcggctcggcttcaccgtcaccgccgacgtcgaggtgcccgaaggaccgcgcacctggtgcatgacccgcaagcccggtgcctga

SEQ ID NO: 2031 - DNA, 4203 bp, Artificial Sequence
  Synthetic Polynucleotide
atggccttaccagtgaccgccttgctcctgccgctggccttgctgctccacgccgccaggccggaagtgcagctggttgaatctggcggaggactggttcaggctggcggatctctgagactgtcttgtgccgccagcggcagaacctttagcatgggctggtttagacaggcccctggcaaagagagagagttcgtcgccgccatcacatactctggcggcagcccttactacgccgactctgtgaagggcagattcaccatcagccgggacaacgccaagaacaccgtgtacctccagatgaacagcctgaagcctgaggacaccgccgtgtactactgcgccgccaatccaacatacggcagcgactggaacgccgagaattggggccagggaacccaagtgacagtgtctagcggtaccggcggaggcggatctggcggcggaggtagcggtggcggaggatctgaattcgacatccagatgacacagagccctagcagcctgtctgccagcgtgggagacagagtgaccatcacatgcaaggccagcgaccacatcaacaactggctggcctggtatcagcagaagcctggacaggcccctaagctgctgatctacggcgctaccacactggaaacaggcgtgcccagcagattttctggcagcggctctggcaccgactacaccctgacaatatccagcctccagcctgaggacttcgccacctactactgtcagcagagctggaacaccccttggacattcggccagggcaccaagctggaaatcaagagactcgagggacagcctaaggccaatcctaccgtgacactgttccctccaagcagcgaagaactccaggccaacaaggccacacttgtgtgcctgatctccgacttctaccctggggctgtgacagtggcttggaaggccgatggatctcctgtgaaagccggcgtggaaaccaccaagccatccaagcagagcaacaacaaatacgccgccagctcctacctgagcctgacacctgagcagtggaagtcccacagatcctacagctgccaagtgacccacgaaggcagcaccgtggaaaagacagtggcccctacagagtgcagcggatccacaacacctggcgagagaagtagcctgcctgccttctatcctggcaccagcggctcttgttctggctgtggatctctgagcctgcctctgctggctggactggttgctgctgatgctgtggcctctctgctgattgtgggagccgtgttcctgtgcgccagacctagaagaagccccgctcaagaggacggcaaggtgtacatcaacatgcccggcagaggaagcactagtagagtgaagttcagcagaagcgccgacgcccctgcctaccagcagggacagaaccaactgtacaacgagctgaacctgggcagacgggaagagtacgacgtgctggacaagcggagaggcagggaccctgagatgggcggaaagccccagcggagaaagaacccccaggaaggactgtataacgaactccagaaagacaagatggccgaagcctacagcgagatcggcatgaagggcgagcggagaagaggcaagggccacgatggcctgtaccagggcctgagcaccgccaccaaggacacctatgacgccctgcacatgcaggccctgcctccaagaagggccaagcgatctggatctggagcaacaaacttctcactactcaaacaagcaggtgacgtggaggagaatcccgggcctatggactggatttggcgcatccttttccttgtcggcgctgctaccggcgcgcattccgggcccgaagtgcaactggttgaatccggtggcggcctggtgcaagcaggcggatctctcagacttagctgtgccgcctccggcagaaccttcacaatgggatggtttaggcaggctccagggaaagagagagagttcgtcgccgccatctctctgtctcccacactggcctactacgccgactctgtgaaaggccggttcaccatctccagagataatgccaagaacaccgtggtgctgcaaatgaactctctgaaacccgaggatacagccctgtactattgtgccgctgaccggaagtccgtgatgagcatcagacccgattactggggacagggcacacaagtcacagtgtcctctggatccggcggcggaggatctggcggaggcggatctgggggcggaggctctttcgaacaagttcagcttcaacagcctggcgctgagctggtcaaacctggcgcttctgtgaagatgagctgcaaagccagcggctacgccttcagcagctactggatcaactggatgaagcagaaacccggccagggactcgaatggatcggccaaatctatcccggcgacggcgacaccaactacaacggcaagttcaagggcagagccacactgaccgccgatacctctagcagcacagcctacatgcagctgagcagcctgaccagcgaagatagcgccgtgtacttctgtgcccggtccatcacaacagtcgtgggctgcgctatggactattggggccagggaacaagcgtgaccgtgtctagtacgcgtgcctctacaaagggaccctccgtgtttcctctggctcccagcagcaagtctacaagcggaggaacagccgctctgggctgcctggtcaaggattactttcccgagcctgtgaccgtgtcctggaatagcggagcactgacaagcggcgtgcacacctttccagccgtgctgcaaagcagcggcctgtactctctgagcagcgtggtcacagtgcctagctctagcctgggcacccagacctacatctgcaatgtgaaccacaagcctagcaacaccaaggtggacaagagagtggaacccaagagctgtggtaccacaacgccgggcgaaaggagttccttgccggccttttaccccggcacaagcggaagctgtagtgggtgtggaagcctcagcctcccacttcttgcgggcctcgtcgcggcagatgcagtagcttcacttcttattgtaggcgcggtatttctctgtgctcgaccaaggaggtcacccgctcaggaggatggtaaggtgtatataaatatgccaggacgcggaagctctagacgggttaagttttccagatccgcagacgcacccgcttaccaacaagggcagaaccaactctacaatgaacttaatttggggcggagggaagagtacgacgttctggacaaaaggaggggacgagatcccgagatgggcggaaagcctcagcgaaggaagaatccgcaagaggggctttataacgaactccagaaagataaaatggcagaagcctatagtgagattgggatgaagggagaaaggaggaggggtaaaggtcacgatgggttgtaccaaggattgagcacagccactaaagatacctatgatgcgctccacatgcaggccctgccgccaagacgcgccaagagaagcggatctggcgtgaagcagaccctgaatttcgacctgctgaagctggctggcgacgtggaatccaacccaggccctggccatatgaccgagtacaagcccacggtgcgcctcgccacccgcgacgacgtccccagggccgtacgcaccctcgccgccgcgttcgccgactaccccgccacgcgccacaccgtcgatccggaccgccacatcgagcgggtcaccgagctgcaagaactcttcctcacgcgcgtcgggctcgacatcggcaaggtgtgggtcgcggacgacggcgccgcggtggcggtctggaccacgccggagagcgtcgaagcgggggcggtgttcgccgagatcggcccgcgcatggccgagttgagcggttcccggctggccgcgcagcaacagatggaaggcctcctggcgccgcaccggcccaaggagcccgcgtggttcctggccaccgtcggcgtctcgcccgaccaccagggcaagggtctgggcagcgccgtcgtgctccccggagtggaggcggccgagcgcgccggggtgcccgccttcctggagacctccgcgccccgcaacctccccttctacgagcggctcggcttcaccgtcaccgccgacgtcgaggtgcccgaaggaccgcgcacctggtgcatgacccgcaagcccggtgcctga

SEQ ID NO: 2032 - DNA, 3402 bp, Artificial Sequence
  Synthetic Polynucleotide
atggccttaccagtgaccgccttgctcctgccgctggccttgctgctccacgccgccaggccggaagtgcagctggttgaatctggcggaggactggttcaggctggcggatctctgagactgtcttgtgccgccagcggcagaacctttagcatgggctggtttagacaggcccctggcaaagagagagagttcgtcgccgccatcacatactctggcggcagcccttactacgccgactctgtgaagggcagattcaccatcagccgggacaacgccaagaacaccgtgtacctccagatgaacagcctgaagcctgaggacaccgccgtgtactactgcgccgccaatccaacatacggcagcgactggaacgccgagaattggggccagggaacccaagtgacagtgtctagcctcgagggacagcctaaggccaatcctaccgtgacactgttccctccaagcagcgaagaactccaggccaacaaggccacacttgtgtgcctgatctccgacttctaccctggggctgtgacagtggcttggaaggccgatggatctcctgtgaaagccggcgtggaaaccaccaagccatccaagcagagcaacaacaaatacgccgccagctcctacctgagcctgacacctgagcagtggaagtcccacagatcctacagctgccaagtgacccacgaaggcagcaccgtggaaaagacagtggcccctacagagtgcagcggatccacaacacctggcgagagaagtagcctgcctgccttctatcctggcaccagcggctcttgttctggctgtggatctctgagcctgcctctgctggctggactggttgctgctgatgctgtggcctctctgctgattgtgggagccgtgttcctgtgcgccagacctagaagaagccccgctcaagaggacggcaaggtgtacatcaacatgcccggcagaggaagcactagtagagtgaagttcagcagaagcgccgacgcccctgcctaccagcagggacagaaccaactgtacaacgagctgaacctgggcagacgggaagagtacgacgtgctggacaagcggagaggcagggaccctgagatgggcggaaagccccagcggagaaagaacccccaggaaggactgtataacgaactccagaaagacaagatggccgaagcctacagcgagatcggcatgaagggcgagcggagaagaggcaagggccacgatggcctgtaccagggcctgagcaccgccaccaaggacacctatgacgccctgcacatgcaggccctgcctccaagaagggccaagcgatctggatctggagcaacaaacttctcactactcaaacaagcaggtgacgtggaggagaatcccgggcctatggactggatttggcgcatccttttccttgtcggcgctgctaccggcgcgcattccgggcccgaagtgcaactggttgaatccggtggcggcctggtgcaagcaggcggatctctcagacttagctgtgccgcctccggcagaaccttcacaatgggatggtttaggcaggctccagggaaagagagagagttcgtcgccgccatctctctgtctcccacactggcctactacgccgactctgtgaaaggccggttcaccatctccagagataatgccaagaacaccgtggtgctgcaaatgaactctctgaaacccgaggatacagccctgtactattgtgccgctgaccggaagtccgtgatgagcatcagacccgattactggggacagggcacacaagtcacagtgtcctctacgcgtgcctctacaaagggaccctccgtgtttcctctggctcccagcagcaagtctacaagcggaggaacagccgctctgggctgcctggtcaaggattactttcccgagcctgtgaccgtgtcctggaatagcggagcactgacaagcggcgtgcacacctttccagccgtgctgcaaagcagcggcctgtactctctgagcagcgtggtcacagtgcctagctctagcctgggcacccagacctacatctgcaatgtgaaccacaagcctagcaacaccaaggtggacaagagagtggaacccaagagctgtggtaccacaacgccgggcgaaaggagttccttgccggccttttaccccggcacaagcggaagctgtagtgggtgtggaagcctcagcctcccacttcttgcgggcctcgtcgcggcagatgcagtagcttcacttcttattgtaggcgcggtatttctctgtgctcgaccaaggaggtcacccgctcaggaggatggtaaggtgtatataaatatgccaggacgcggaagctctagacgggttaagttttccagatccgcagacgcacccgcttaccaacaagggcagaaccaactctacaatgaacttaatttggggcggagggaagagtacgacgttctggacaaaaggaggggacgagatcccgagatgggcggaaagcctcagcgaaggaagaatccgcaagaggggctttataacgaactccagaaagataaaatggcagaagcctatagtgagattgggatgaagggagaaaggaggaggggtaaaggtcacgatgggttgtaccaaggattgagcacagccactaaagatacctatgatgcgctccacatgcaggccctgccgccaagacgcgccaagagaagcggatctggcgtgaagcagaccctgaatttcgacctgctgaagctggctggcgacgtggaatccaacccaggccctggccatatgaccgagtacaagcccacggtgcgcctcgccacccgcgacgacgtccccagggccgtacgcaccctcgccgccgcgttcgccgactaccccgccacgcgccacaccgtcgatccggaccgccacatcgagcgggtcaccgagctgcaagaactcttcctcacgcgcgtcgggctcgacatcggcaaggtgtgggtcgcggacgacggcgccgcggtggcggtctggaccacgccggagagcgtcgaagcgggggcggtgttcgccgagatcggcccgcgcatggccgagttgagcggttcccggctggccgcgcagcaacagatggaaggcctcctggcgccgcaccggcccaaggagcccgcgtggttcctggccaccgtcggcgtctcgcccgaccaccagggcaagggtctgggcagcgccgtcgtgctccccggagtggaggcggccgagcgcgccggggtgcccgccttcctggagacctccgcgccccgcaacctccccttctacgagcggctcggcttcaccgtcaccgccgacgtcgaggtgcccgaaggaccgcgcacctggtgcatgacccgcaagcccggtgcctga

SEQ ID NO: 2033 - DNA, 3426 bp, Artificial Sequence
  Synthetic Polynucleotide
atggccttaccagtgaccgccttgctcctgccgctggccttgctgctccacgccgccaggccggacatccagatgacacagagccctagcagcctgtctgccagcgtgggagacagagtgaccatcacatgcaaggccagcgaccacatcaacaactggctggcctggtatcagcagaagcctggacaggcccctaagctgctgatctacggcgctaccacactggaaacaggcgtgcccagcagattttctggcagcggctctggcaccgactacaccctgacaatatccagcctccagcctgaggacttcgccacctactactgtcagcagagctggaacaccccttggacattcggccagggcaccaagctggaaatcaagagactcgaggacctgaagaacgtgttcccacctgaggtggccgtgttcgagcctagcgaggccgagatcagccacacccagaaagccaccctcgtgtgcctggctaccggcttctaccccgaccatgtggaactgtcttggtgggtcaacggcaaagaggtgcacagcggcgtgtctaccgacccccagccactgaaagaacagcccgccctgaacgacagccggtactgcctgagcagcagactgagagtgtccgccaccttctggcagaacccccggaaccacttcagatgccaggtgcagttctacggcctgagcgagaacgacgagtggacccaggacagagccaagcccgtgacccagatcgtgtctgccgaagcctggggcagagccgattgcggatccacaacacctggcgagagaagtagcctgcctgccttctatcctggcaccagcggctcttgttctggctgtggatctctgagcctgcctctgctggctggactggttgctgctgatgctgtggcctctctgctgattgtgggagccgtgttcctgtgcgccagacctagaagaagccccgctcaagaggacggcaaggtgtacatcaacatgcccggcagaggaagcactagtagagtgaagttcagcagaagcgccgacgcccctgcctaccagcagggacagaaccaactgtacaacgagctgaacctgggcagacgggaagagtacgacgtgctggacaagcggagaggcagggaccctgagatgggcggaaagccccagcggagaaagaacccccaggaaggactgtataacgaactccagaaagacaagatggccgaagcctacagcgagatcggcatgaagggcgagcggagaagaggcaagggccacgatggcctgtaccagggcctgagcaccgccaccaaggacacctatgacgccctgcacatgcaggccctgcctccaagaagggccaagcgatctggatctggagcaacaaacttctcactactcaaacaagcaggtgacgtggaggagaatcccgggcctatggactggatttggcgcatccttttccttgtcggcgctgctaccggcgcgcattccttcgaacaagttcagcttcaacagcctggcgctgagctggtcaaacctggcgcttctgtgaagatgagctgcaaagccagcggctacgccttcagcagctactggatcaactggatgaagcagaaacccggccagggactcgaatggatcggccaaatctatcccggcgacggcgacaccaactacaacggcaagttcaagggcagagccacactgaccgccgatacctctagcagcacagcctacatgcagctgagcagcctgaccagcgaagatagcgccgtgtacttctgtgcccggtccatcacaacagtcgtgggctgcgctatggactattggggccagggaacaagcgtgaccgtgtctagtacgcgtatccagaaccctgatcctgccgtgtaccagctgcgggatagcaagagcagcgacaagagcgtgtgtctgttcaccgacttcgacagccagaccaacgtgtcccagagcaaggactccgacgtgtacatcaccgataagaccgtgctggacatgcggagcatggacttcaagagcaactccgccgtggcctggtccaacaagtccgatttcgcctgcgccaacgccttcaacaacagcattatccccgaggacacattcttcccaagccccgagagcagctgcggtaccacaacgccgggcgaaaggagttccttgccggccttttaccccggcacaagcggaagctgtagtgggtgtggaagcctcagcctcccacttcttgcgggcctcgtcgcggcagatgcagtagcttcacttcttattgtaggcgcggtatttctctgtgctcgaccaaggaggtcacccgctcaggaggatggtaaggtgtatataaatatgccaggacgcggaagctctagacgggttaagttttccagatccgcagacgcacccgcttaccaacaagggcagaaccaactctacaatgaacttaatttggggcggagggaagagtacgacgttctggacaaaaggaggggacgagatcccgagatgggcggaaagcctcagcgaaggaagaatccgcaagaggggctttataacgaactccagaaagataaaatggcagaagcctatagtgagattgggatgaagggagaaaggaggaggggtaaaggtcacgatgggttgtaccaaggattgagcacagccactaaagatacctatgatgcgctccacatgcaggccctgccgccaagacgcgccaagagaagcggatctggcgtgaagcagaccctgaatttcgacctgctgaagctggctggcgacgtggaatccaacccaggccctggccatatgaccgagtacaagcccacggtgcgcctcgccacccgcgacgacgtccccagggccgtacgcaccctcgccgccgcgttcgccgactaccccgccacgcgccacaccgtcgatccggaccgccacatcgagcgggtcaccgagctgcaagaactcttcctcacgcgcgtcgggctcgacatcggcaaggtgtgggtcgcggacgacggcgccgcggtggcggtctggaccacgccggagagcgtcgaagcgggggcggtgttcgccgagatcggcccgcgcatggccgagttgagcggttcccggctggccgcgcagcaacagatggaaggcctcctggcgccgcaccggcccaaggagcccgcgtggttcctggccaccgtcggcgtctcgcccgaccaccagggcaagggtctgggcagcgccgtcgtgctccccggagtggaggcggccgagcgcgccggggtgcccgccttcctggagacctccgcgccccgcaacctccccttctacgagcggctcggcttcaccgtcaccgccgacgtcgaggtgcccgaaggaccgcgcacctggtgcatgacccgcaagcccggtgcctga

SEQ ID NO: 2034 - DNA, 3837 bp, Artificial Sequence
  Synthetic Polynucleotide
atggccttaccagtgaccgccttgctcctgccgctggccttgctgctccacgccgccaggccggaagtgcagctggttgaatctggcggaggactggttcaggctggcggatctctgagactgtcttgtgccgccagcggcagaacctttagcatgggctggtttagacaggcccctggcaaagagagagagttcgtcgccgccatcacatactctggcggcagcccttactacgccgactctgtgaagggcagattcaccatcagccgggacaacgccaagaacaccgtgtacctccagatgaacagcctgaagcctgaggacaccgccgtgtactactgcgccgccaatccaacatacggcagcgactggaacgccgagaattggggccagggaacccaagtgacagtgtctagcggtaccggcggaggcggatctggcggcggaggtagcggtggcggaggatctgaattcgacatccagatgacacagagccctagcagcctgtctgccagcgtgggagacagagtgaccatcacatgcaaggccagcgaccacatcaacaactggctggcctggtatcagcagaagcctggacaggcccctaagctgctgatctacggcgctaccacactggaaacaggcgtgcccagcagattttctggcagcggctctggcaccgactacaccctgacaatatccagcctccagcctgaggacttcgccacctactactgtcagcagagctggaacaccccttggacattcggccagggcaccaagctggaaatcaagagactcgaggacctgaagaacgtgttcccacctgaggtggccgtgttcgagcctagcgaggccgagatcagccacacccagaaagccaccctcgtgtgcctggctaccggcttctaccccgaccatgtggaactgtcttggtgggtcaacggcaaagaggtgcacagcggcgtgtctaccgacccccagccactgaaagaacagcccgccctgaacgacagccggtactgcctgagcagcagactgagagtgtccgccaccttctggcagaacccccggaaccacttcagatgccaggtgcagttctacggcctgagcgagaacgacgagtggacccaggacagagccaagcccgtgacccagatcgtgtctgccgaagcctggggcagagccgattgcggatccacaacacctggcgagagaagtagcctgcctgccttctatcctggcaccagcggctcttgttctggctgtggatctctgagcctgcctctgctggctggactggttgctgctgatgctgtggcctctctgctgattgtgggagccgtgttcctgtgcgccagacctagaagaagccccgctcaagaggacggcaaggtgtacatcaacatgcccggcagaggaagcactagtagagtgaagttcagcagaagcgccgacgcccctgcctaccagcagggacagaaccaactgtacaacgagctgaacctgggcagacgggaagagtacgacgtgctggacaagcggagaggcagggaccctgagatgggcggaaagccccagcggagaaagaacccccaggaaggactgtataacgaactccagaaagacaagatggccgaagcctacagcgagatcggcatgaagggcgagcggagaagaggcaagggccacgatggcctgtaccagggcctgagcaccgccaccaaggacacctatgacgccctgcacatgcaggccctgcctccaagaagggccaagcgatctggatctggagcaacaaacttctcactactcaaacaagcaggtgacgtggaggagaatcccgggcctatggactggatttggcgcatccttttccttgtcggcgctgctaccggcgcgcattccttcgaacaagttcagcttcaacagcctggcgctgagctggtcaaacctggcgcttctgtgaagatgagctgcaaagccagcggctacgccttcagcagctactggatcaactggatgaagcagaaacccggccagggactcgaatggatcggccaaatctatcccggcgacggcgacaccaactacaacggcaagttcaagggcagagccacactgaccgccgatacctctagcagcacagcctacatgcagctgagcagcctgaccagcgaagatagcgccgtgtacttctgtgcccggtccatcacaacagtcgtgggctgcgctatggactattggggccagggaacaagcgtgaccgtgtctagtacgcgtatccagaaccctgatcctgccgtgtaccagctgcgggatagcaagagcagcgacaagagcgtgtgtctgttcaccgacttcgacagccagaccaacgtgtcccagagcaaggactccgacgtgtacatcaccgataagaccgtgctggacatgcggagcatggacttcaagagcaactccgccgtggcctggtccaacaagtccgatttcgcctgcgccaacgccttcaacaacagcattatccccgaggacacattcttcccaagccccgagagcagctgcggtaccacaacgccgggcgaaaggagttccttgccggccttttaccccggcacaagcggaagctgtagtgggtgtggaagcctcagcctcccacttcttgcgggcctcgtcgcggcagatgcagtagcttcacttcttattgtaggcgcggtatttctctgtgctcgaccaaggaggtcacccgctcaggaggatggtaaggtgtatataaatatgccaggacgcggaagctctagacgggttaagttttccagatccgcagacgcacccgcttaccaacaagggcagaaccaactctacaatgaacttaatttggggcggagggaagagtacgacgttctggacaaaaggaggggacgagatcccgagatgggcggaaagcctcagcgaaggaagaatccgcaagaggggctttataacgaactccagaaagataaaatggcagaagcctatagtgagattgggatgaagggagaaaggaggaggggtaaaggtcacgatgggttgtaccaaggattgagcacagccactaaagatacctatgatgcgctccacatgcaggccctgccgccaagacgcgccaagagaagcggatctggcgtgaagcagaccctgaatttcgacctgctgaagctggctggcgacgtggaatccaacccaggccctggccatatgaccgagtacaagcccacggtgcgcctcgccacccgcgacgacgtccccagggccgtacgcaccctcgccgccgcgttcgccgactaccccgccacgcgccacaccgtcgatccggaccgccacatcgagcgggtcaccgagctgcaagaactcttcctcacgcgcgtcgggctcgacatcggcaaggtgtgggtcgcggacgacggcgccgcggtggcggtctggaccacgccggagagcgtcgaagcgggggcggtgttcgccgagatcggcccgcgcatggccgagttgagcggttcccggctggccgcgcagcaacagatggaaggcctcctggcgccgcaccggcccaaggagcccgcgtggttcctggccaccgtcggcgtctcgcccgaccaccagggcaagggtctgggcagcgccgtcgtgctccccggagtggaggcggccgagcgcgccggggtgcccgccttcctggagacctccgcgccccgcaacctccccttctacgagcggctcggcttcaccgtcaccgccgacgtcgaggtgcccgaaggaccgcgcacctggtgcatgacccgcaagcccggtgcctga

SEQ ID NO: 2035 - DNA, 4248 bp, Artificial Sequence
  Synthetic Polynucleotide
atggccttaccagtgaccgccttgctcctgccgctggccttgctgctccacgccgccaggccggaagtgcagctggttgaatctggcggaggactggttcaggctggcggatctctgagactgtcttgtgccgccagcggcagaacctttagcatgggctggtttagacaggcccctggcaaagagagagagttcgtcgccgccatcacatactctggcggcagcccttactacgccgactctgtgaagggcagattcaccatcagccgggacaacgccaagaacaccgtgtacctccagatgaacagcctgaagcctgaggacaccgccgtgtactactgcgccgccaatccaacatacggcagcgactggaacgccgagaattggggccagggaacccaagtgacagtgtctagcggtaccggcggaggcggatctggcggcggaggtagcggtggcggaggatctgaattcgacatccagatgacacagagccctagcagcctgtctgccagcgtgggagacagagtgaccatcacatgcaaggccagcgaccacatcaacaactggctggcctggtatcagcagaagcctggacaggcccctaagctgctgatctacggcgctaccacactggaaacaggcgtgcccagcagattttctggcagcggctctggcaccgactacaccctgacaatatccagcctccagcctgaggacttcgccacctactactgtcagcagagctggaacaccccttggacattcggccagggcaccaagctggaaatcaagagactcgaggacctgaagaacgtgttcccacctgaggtggccgtgttcgagcctagcgaggccgagatcagccacacccagaaagccaccctcgtgtgcctggctaccggcttctaccccgaccatgtggaactgtcttggtgggtcaacggcaaagaggtgcacagcggcgtgtctaccgacccccagccactgaaagaacagcccgccctgaacgacagccggtactgcctgagcagcagactgagagtgtccgccaccttctggcagaacccccggaaccacttcagatgccaggtgcagttctacggcctgagcgagaacgacgagtggacccaggacagagccaagcccgtgacccagatcgtgtctgccgaagcctggggcagagccgattgcggatccacaacacctggcgagagaagtagcctgcctgccttctatcctggcaccagcggctcttgttctggctgtggatctctgagcctgcctctgctggctggactggttgctgctgatgctgtggcctctctgctgattgtgggagccgtgttcctgtgcgccagacctagaagaagccccgctcaagaggacggcaaggtgtacatcaacatgcccggcagaggaagcactagtagagtgaagttcagcagaagcgccgacgcccctgcctaccagcagggacagaaccaactgtacaacgagctgaacctgggcagacgggaagagtacgacgtgctggacaagcggagaggcagggaccctgagatgggcggaaagccccagcggagaaagaacccccaggaaggactgtataacgaactccagaaagacaagatggccgaagcctacagcgagatcggcatgaagggcgagcggagaagaggcaagggccacgatggcctgtaccagggcctgagcaccgccaccaaggacacctatgacgccctgcacatgcaggccctgcctccaagaagggccaagcgatctggatctggagcaacaaacttctcactactcaaacaagcaggtgacgtggaggagaatcccgggcctatggactggatttggcgcatccttttccttgtcggcgctgctaccggcgcgcattccgggcccgaagtgcaactggttgaatccggtggcggcctggtgcaagcaggcggatctctcagacttagctgtgccgcctccggcagaaccttcacaatgggatggtttaggcaggctccagggaaagagagagagttcgtcgccgccatctctctgtctcccacactggcctactacgccgactctgtgaaaggccggttcaccatctccagagataatgccaagaacaccgtggtgctgcaaatgaactctctgaaacccgaggatacagccctgtactattgtgccgctgaccggaagtccgtgatgagcatcagacccgattactggggacagggcacacaagtcacagtgtcctctggatccggcggcggaggatctggcggaggcggatctgggggcggaggctctttcgaacaagttcagcttcaacagcctggcgctgagctggtcaaacctggcgcttctgtgaagatgagctgcaaagccagcggctacgccttcagcagctactggatcaactggatgaagcagaaacccggccagggactcgaatggatcggccaaatctatcccggcgacggcgacaccaactacaacggcaagttcaagggcagagccacactgaccgccgatacctctagcagcacagcctacatgcagctgagcagcctgaccagcgaagatagcgccgtgtacttctgtgcccggtccatcacaacagtcgtgggctgcgctatggactattggggccagggaacaagcgtgaccgtgtctagtacgcgtatccagaaccctgatcctgccgtgtaccagctgcgggatagcaagagcagcgacaagagcgtgtgtctgttcaccgacttcgacagccagaccaacgtgtcccagagcaaggactccgacgtgtacatcaccgataagaccgtgctggacatgcggagcatggacttcaagagcaactccgccgtggcctggtccaacaagtccgatttcgcctgcgccaacgccttcaacaacagcattatccccgaggacacattcttcccaagccccgagagcagctgcggtaccacaacgccgggcgaaaggagttccttgccggccttttaccccggcacaagcggaagctgtagtgggtgtggaagcctcagcctcccacttcttgcgggcctcgtcgcggcagatgcagtagcttcacttcttattgtaggcgcggtatttctctgtgctcgaccaaggaggtcacccgctcaggaggatggtaaggtgtatataaatatgccaggacgcggaagctctagacgggttaagttttccagatccgcagacgcacccgcttaccaacaagggcagaaccaactctacaatgaacttaatttggggcggagggaagagtacgacgttctggacaaaaggaggggacgagatcccgagatgggcggaaagcctcagcgaaggaagaatccgcaagaggggctttataacgaactccagaaagataaaatggcagaagcctatagtgagattgggatgaagggagaaaggaggaggggtaaaggtcacgatgggttgtaccaaggattgagcacagccactaaagatacctatgatgcgctccacatgcaggccctgccgccaagacgcgccaagagaagcggatctggcgtgaagcagaccctgaatttcgacctgctgaagctggctggcgacgtggaatccaacccaggccctggccatatgaccgagtacaagcccacggtgcgcctcgccacccgcgacgacgtccccagggccgtacgcaccctcgccgccgcgttcgccgactaccccgccacgcgccacaccgtcgatccggaccgccacatcgagcgggtcaccgagctgcaagaactcttcctcacgcgcgtcgggctcgacatcggcaaggtgtgggtcgcggacgacggcgccgcggtggcggtctggaccacgccggagagcgtcgaagcgggggcggtgttcgccgagatcggcccgcgcatggccgagttgagcggttcccggctggccgcgcagcaacagatggaaggcctcctggcgccgcaccggcccaaggagcccgcgtggttcctggccaccgtcggcgtctcgcccgaccaccagggcaagggtctgggcagcgccgtcgtgctccccggagtggaggcggccgagcgcgccggggtgcccgccttcctggagacctccgcgccccgcaacctccccttctacgagcggctcggcttcaccgtcaccgccgacgtcgaggtgcccgaaggaccgcgcacctggtgcatgacccgcaagcccggtgcctga

SEQ ID NO: 2036 - DNA, 3447 bp, Artificial Sequence
  Synthetic Polynucleotide
atggccttaccagtgaccgccttgctcctgccgctggccttgctgctccacgccgccaggccggaagtgcagctggttgaatctggcggaggactggttcaggctggcggatctctgagactgtcttgtgccgccagcggcagaacctttagcatgggctggtttagacaggcccctggcaaagagagagagttcgtcgccgccatcacatactctggcggcagcccttactacgccgactctgtgaagggcagattcaccatcagccgggacaacgccaagaacaccgtgtacctccagatgaacagcctgaagcctgaggacaccgccgtgtactactgcgccgccaatccaacatacggcagcgactggaacgccgagaattggggccagggaacccaagtgacagtgtctagcctcgaggacctgaagaacgtgttcccacctgaggtggccgtgttcgagcctagcgaggccgagatcagccacacccagaaagccaccctcgtgtgcctggctaccggcttctaccccgaccatgtggaactgtcttggtgggtcaacggcaaagaggtgcacagcggcgtgtctaccgacccccagccactgaaagaacagcccgccctgaacgacagccggtactgcctgagcagcagactgagagtgtccgccaccttctggcagaacccccggaaccacttcagatgccaggtgcagttctacggcctgagcgagaacgacgagtggacccaggacagagccaagcccgtgacccagatcgtgtctgccgaagcctggggcagagccgattgcggatccacaacacctggcgagagaagtagcctgcctgccttctatcctggcaccagcggctcttgttctggctgtggatctctgagcctgcctctgctggctggactggttgctgctgatgctgtggcctctctgctgattgtgggagccgtgttcctgtgcgccagacctagaagaagccccgctcaagaggacggcaaggtgtacatcaacatgcccggcagaggaagcactagtagagtgaagttcagcagaagcgccgacgcccctgcctaccagcagggacagaaccaactgtacaacgagctgaacctgggcagacgggaagagtacgacgtgctggacaagcggagaggcagggaccctgagatgggcggaaagccccagcggagaaagaacccccaggaaggactgtataacgaactccagaaagacaagatggccgaagcctacagcgagatcggcatgaagggcgagcggagaagaggcaagggccacgatggcctgtaccagggcctgagcaccgccaccaaggacacctatgacgccctgcacatgcaggccctgcctccaagaagggccaagcgatctggatctggagcaacaaacttctcactactcaaacaagcaggtgacgtggaggagaatcccgggcctatggactggatttggcgcatccttttccttgtcggcgctgctaccggcgcgcattccgggcccgaagtgcaactggttgaatccggtggcggcctggtgcaagcaggcggatctctcagacttagctgtgccgcctccggcagaaccttcacaatgggatggtttaggcaggctccagggaaagagagagagttcgtcgccgccatctctctgtctcccacactggcctactacgccgactctgtgaaaggccggttcaccatctccagagataatgccaagaacaccgtggtgctgcaaatgaactctctgaaacccgaggatacagccctgtactattgtgccgctgaccggaagtccgtgatgagcatcagacccgattactggggacagggcacacaagtcacagtgtcctctacgcgtatccagaaccctgatcctgccgtgtaccagctgcgggatagcaagagcagcgacaagagcgtgtgtctgttcaccgacttcgacagccagaccaacgtgtcccagagcaaggactccgacgtgtacatcaccgataagaccgtgctggacatgcggagcatggacttcaagagcaactccgccgtggcctggtccaacaagtccgatttcgcctgcgccaacgccttcaacaacagcattatccccgaggacacattcttcccaagccccgagagcagctgcggtaccacaacgccgggcgaaaggagttccttgccggccttttaccccggcacaagcggaagctgtagtgggtgtggaagcctcagcctcccacttcttgcgggcctcgtcgcggcagatgcagtagcttcacttcttattgtaggcgcggtatttctctgtgctcgaccaaggaggtcacccgctcaggaggatggtaaggtgtatataaatatgccaggacgcggaagctctagacgggttaagttttccagatccgcagacgcacccgcttaccaacaagggcagaaccaactctacaatgaacttaatttggggcggagggaagagtacgacgttctggacaaaaggaggggacgagatcccgagatgggcggaaagcctcagcgaaggaagaatccgcaagaggggctttataacgaactccagaaagataaaatggcagaagcctatagtgagattgggatgaagggagaaaggaggaggggtaaaggtcacgatgggttgtaccaaggattgagcacagccactaaagatacctatgatgcgctccacatgcaggccctgccgccaagacgcgccaagagaagcggatctggcgtgaagcagaccctgaatttcgacctgctgaagctggctggcgacgtggaatccaacccaggccctggccatatgaccgagtacaagcccacggtgcgcctcgccacccgcgacgacgtccccagggccgtacgcaccctcgccgccgcgttcgccgactaccccgccacgcgccacaccgtcgatccggaccgccacatcgagcgggtcaccgagctgcaagaactcttcctcacgcgcgtcgggctcgacatcggcaaggtgtgggtcgcggacgacggcgccgcggtggcggtctggaccacgccggagagcgtcgaagcgggggcggtgttcgccgagatcggcccgcgcatggccgagttgagcggttcccggctggccgcgcagcaacagatggaaggcctcctggcgccgcaccggcccaaggagcccgcgtggttcctggccaccgtcggcgtctcgcccgaccaccagggcaagggtctgggcagcgccgtcgtgctccccggagtggaggcggccgagcgcgccggggtgcccgccttcctggagacctccgcgccccgcaacctccccttctacgagcggctcggcttcaccgtcaccgccgacgtcgaggtgcccgaaggaccgcgcacctggtgcatgacccgcaagcccggtgcctga

SEQ ID NO: 2037 - DNA, 1758 bp, Artificial Sequence
  Synthetic Polynucleotide
atggccttaccagtgaccgccttgctcctgccgctggccttgctgctccacgccgccaggccggcatgcgaagtgcagctgcttgaaagtggcggcggactgattcagcctggcggatctctgagactgagctgtgccgccagcggcttcaccttttctagccacgccatgacctgggtccgacaggcacctggaaaagggcttgaatgggtgtccgccatcagcggctctggcgattacacacactacgccgacagcgtgaagggcagattcaccatcagcagagacaacagcaagaacaccgtgtacctccagatgaacagcctgagagccgaggacagcgccgtgtattattgcgccaaggatgaggatggcggcagcctgcttggacacagaggacaaggcaccctggtcaccgtttcttccggtaccggcggaggcggatctggcggcggaggtagcggtggcggaggatctgaattcggatctctcgagacaacacctggcgagagaagtagcctgcctgccttctatcctggcaccagcggctcttgttctggctgtggatctctgagcctgcctctgctggctggactggttgctgctgatgctgtggcctctctgctgattgtgggagccgtgttcctgtgcgccagacctagaagaagccccgctcaagaggacggcaaggtgtacatcaacatgcccggcagaggaagcactagtagagtgaagttcagcagaagcgccgacgcccctgcctaccagcagggacagaaccaactgtacaacgagctgaacctgggcagacgggaagagtacgacgtgctggacaagcggagaggcagggaccctgagatgggcggaaagccccagcggagaaagaacccccaggaaggactgtataacgaactccagaaagacaagatggccgaagcctacagcgagatcggcatgaagggcgagcggagaagaggcaagggccacgatggcctgtaccagggcctgagcaccgccaccaaggacacctatgacgccctgcacatgcaggccctgcctccaagaagggccaagcgatctggatctggagcaacaaacttctcactactcaaacaagcaggtgacgtggaggagaatcccgggcctactagaggccatatgaccgagtacaagcccacggtgcgcctcgccacccgcgacgacgtccccagggccgtacgcaccctcgccgccgcgttcgccgactaccccgccacgcgccacaccgtcgatccggaccgccacatcgagcgggtcaccgagctgcaagaactcttcctcacgcgcgtcgggctcgacatcggcaaggtgtgggtcgcggacgacggcgccgcggtggcggtctggaccacgccggagagcgtcgaagcgggggcggtgttcgccgagatcggcccgcgcatggccgagttgagcggttcccggctggccgcgcagcaacagatggaaggcctcctggcgccgcaccggcccaaggagcccgcgtggttcctggccaccgtcggcgtctcgcccgaccaccagggcaagggtctgggcagcgccgtcgtgctccccggagtggaggcggccgagcgcgccggggtgcccgccttcctggagacctccgcgccccgcaacctccccttctacgagcggctcggcttcaccgtcaccgccgacgtcgaggtgcccgaaggaccgcgcacctggtgcatgacccgcaagcccggtgcctga

SEQ ID NO: 2038 - DNA, 2610 bp, Artificial Sequence
  Synthetic Polynucleotide
atggccttaccagtgaccgccttgctcctgccgctggccttgctgctccacgccgccaggccggacatccagatgacacagagccctagcagcctgtctgccagcgtgggagacagagtgaccatcacatgcaaggccagcgaccacatcaacaactggctggcctggtatcagcagaagcctggacaggcccctaagctgctgatctacggcgctaccacactggaaacaggcgtgcccagcagattttctggcagcggctctggcaccgactacaccctgacaatatccagcctccagcctgaggacttcgccacctactactgtcagcagagctggaacaccccttggacattcggccagggcaccaagctggaaatcaagagactcgagacaacacctggcgagagaagtagcctgcctgccttctatcctggcaccagcggctcttgttctggctgtggatctctgagcctgcctctgctggctggactggttgctgctgatgctgtggcctctctgctgattgtgggagccgtgttcctgtgcgccagacctagaagaagccccgctcaagaggacggcaaggtgtacatcaacatgcccggcagaggaagcactagtagagtgaagttcagcagaagcgccgacgcccctgcctaccagcagggacagaaccaactgtacaacgagctgaacctgggcagacgggaagagtacgacgtgctggacaagcggagaggcagggaccctgagatgggcggaaagccccagcggagaaagaacccccaggaaggactgtataacgaactccagaaagacaagatggccgaagcctacagcgagatcggcatgaagggcgagcggagaagaggcaagggccacgatggcctgtaccagggcctgagcaccgccaccaaggacacctatgacgccctgcacatgcaggccctgcctccaagaagggccaagcgatctggatctggagcaacaaacttctcactactcaaacaagcaggtgacgtggaggagaatcccgggcctatggactggatttggcgcatccttttccttgtcggcgctgctaccggcgcgcattccttcgaacaagttcagcttcaacagcctggcgctgagctggtcaaacctggcgcttctgtgaagatgagctgcaaagccagcggctacgccttcagcagctactggatcaactggatgaagcagaaacccggccagggactcgaatggatcggccaaatctatcccggcgacggcgacaccaactacaacggcaagttcaagggcagagccacactgaccgccgatacctctagcagcacagcctacatgcagctgagcagcctgaccagcgaagatagcgccgtgtacttctgtgcccggtccatcacaacagtcgtgggctgcgctatggactattggggccagggaacaagcgtgaccgtgtctagtacgcgtcagagttttgggttgttggaccctaaattgagctatctgttggacggaatcctgttcatttacggagtgatcctgaccgcattgttcctgagctctagacgggttaagttttccagatccgcagacgcacccgcttaccaacaagggcagaaccaactctacaatgaacttaatttggggcggagggaagagtacgacgttctggacaaaaggaggggacgagatcccgagatgggcggaaagcctcagcgaaggaagaatccgcaagaggggctttataacgaactccagaaagataaaatggcagaagcctatagtgagattgggatgaagggagaaaggaggaggggtaaaggtcacgatgggttgtaccaaggattgagcacagccactaaagatacctatgatgcgctccacatgcaggccctgccgccaagacgcgccaagagaagcggatctggcgtgaagcagaccctgaatttcgacctgctgaagctggctggcgacgtggaatccaacccaggccctggccatatgaccgagtacaagcccacggtgcgcctcgccacccgcgacgacgtccccagggccgtacgcaccctcgccgccgcgttcgccgactaccccgccacgcgccacaccgtcgatccggaccgccacatcgagcgggtcaccgagctgcaagaactcttcctcacgcgcgtcgggctcgacatcggcaaggtgtgggtcgcggacgacggcgccgcggtggcggtctggaccacgccggagagcgtcgaagcgggggcggtgttcgccgagatcggcccgcgcatggccgagttgagcggttcccggctggccgcgcagcaacagatggaaggcctcctggcgccgcaccggcccaaggagcccgcgtggttcctggccaccgtcggcgtctcgcccgaccaccagggcaagggtctgggcagcgccgtcgtgctccccggagtggaggcggccgagcgcgccggggtgcccgccttcctggagacctccgcgccccgcaacctccccttctacgagcggctcggcttcaccgtcaccgccgacgtcgaggtgcccgaaggaccgcgcacctggtgcatgacccgcaagcccggtgcctga

SEQ ID NO: 2039 - DNA, 2766 bp, Artificial Sequence
  Synthetic Polynucleotide
atggccttaccagtgaccgccttgctcctgccgctggccttgctgctccacgccgccaggccggcatgcgaagtgcagctgcttgaaagtggcggcggactgattcagcctggcggatctctgagactgagctgtgccgccagcggcttcaccttttctagccacgccatgacctgggtccgacaggcacctggaaaagggcttgaatgggtgtccgccatcagcggctctggcgattacacacactacgccgacagcgtgaagggcagattcaccatcagcagagacaacagcaagaacaccgtgtacctccagatgaacagcctgagagccgaggacagcgccgtgtattattgcgccaaggatgaggatggcggcagcctgcttggacacagaggacaaggcaccctggtcaccgtttcttccggtaccggcggaggcggatctggcggcggaggtagcggtggcggaggatctgaattcggatctctcgagacaacacctggcgagagaagtagcctgcctgccttctatcctggcaccagcggctcttgttctggctgtggatctctgagcctgcctctgctggctggactggttgctgctgatgctgtggcctctctgctgattgtgggagccgtgttcctgtgcgccagacctagaagaagccccgctcaagaggacggcaaggtgtacatcaacatgcccggcagaggaagcactagtagagtgaagttcagcagaagcgccgacgcccctgcctaccagcagggacagaaccaactgtacaacgagctgaacctgggcagacgggaagagtacgacgtgctggacaagcggagaggcagggaccctgagatgggcggaaagccccagcggagaaagaacccccaggaaggactgtataacgaactccagaaagacaagatggccgaagcctacagcgagatcggcatgaagggcgagcggagaagaggcaagggccacgatggcctgtaccagggcctgagcaccgccaccaaggacacctatgacgccctgcacatgcaggccctgcctccaagaagggccaagcgatctggatctggagcaacaaacttctcactactcaaacaagcaggtgacgtggaggagaatcccgggcctatggactggatttggcgcatccttttccttgtcggcgctgctaccggcgcgcattccgggcccgaagtgcagctggttgaatctggcggaggactggttcaggctggcggatctctgagactgtcttgtgccgccagcggcagaacctttagcatgggctggtttagacaggcccctggcaaagagagagagttcgtcgccgccatcacatactctggcggcagcccttactacgccgactctgtgaagggcagattcaccatcagccgggacaacgccaagaacaccgtgtacctccagatgaacagcctgaagcctgaggacaccgccgtgtactactgcgccgccaatccaacatacggcagcgactggaacgccgagaattggggccagggaacccaagtgacagtgtctagcggatccggcggcggaggatctggcggaggcggatctgggggcggaggctctttcgaaggcagcacgcgtcagagttttgggttgttggaccctaaattgagctatctgttggacggaatcctgttcatttacggagtgatcctgaccgcattgttcctgagctctagacgggttaagttttccagatccgcagacgcacccgcttaccaacaagggcagaaccaactctacaatgaacttaatttggggcggagggaagagtacgacgttctggacaaaaggaggggacgagatcccgagatgggcggaaagcctcagcgaaggaagaatccgcaagaggggctttataacgaactccagaaagataaaatggcagaagcctatagtgagattgggatgaagggagaaaggaggaggggtaaaggtcacgatgggttgtaccaaggattgagcacagccactaaagatacctatgatgcgctccacatgcaggccctgccgccaagacgcgccaagagaagcggatctggcgtgaagcagaccctgaatttcgacctgctgaagctggctggcgacgtggaatccaacccaggccctggccatatgaccgagtacaagcccacggtgcgcctcgccacccgcgacgacgtccccagggccgtacgcaccctcgccgccgcgttcgccgactaccccgccacgcgccacaccgtcgatccggaccgccacatcgagcgggtcaccgagctgcaagaactcttcctcacgcgcgtcgggctcgacatcggcaaggtgtgggtcgcggacgacggcgccgcggtggcggtctggaccacgccggagagcgtcgaagcgggggcggtgttcgccgagatcggcccgcgcatggccgagttgagcggttcccggctggccgcgcagcaacagatggaaggcctcctggcgccgcaccggcccaaggagcccgcgtggttcctggccaccgtcggcgtctcgcccgaccaccagggcaagggtctgggcagcgccgtcgtgctccccggagtggaggcggccgagcgcgccggggtgcccgccttcctggagacctccgcgccccgcaacctccccttctacgagcggctcggcttcaccgtcaccgccgacgtcgaggtgcccgaaggaccgcgcacctggtgcatgacccgcaagcccggtgcctga

SEQ ID NO: 2040 - DNA, 3213 bp, Artificial Sequence
  Synthetic Polynucleotide
atggccttaccagtgaccgccttgctcctgccgctggccttgctgctccacgccgccaggccggacatccagatgacacagagccctagcagcctgtctgccagcgtgggagacagagtgaccatcacatgcaaggccagcgaccacatcaacaactggctggcctggtatcagcagaagcctggacaggcccctaagctgctgatctacggcgctaccacactggaaacaggcgtgcccagcagattttctggcagcggctctggcaccgactacaccctgacaatatccagcctccagcctgaggacttcgccacctactactgtcagcagagctggaacaccccttggacattcggccagggcaccaagctggaaatcaagagactcgagggacagcctaaggccaatcctaccgtgacactgttccctccaagcagcgaagaactccaggccaacaaggccacacttgtgtgcctgatctccgacttctaccctggggctgtgacagtggcttggaaggccgatggatctcctgtgaaagccggcgtggaaaccaccaagccatccaagcagagcaacaacaaatacgccgccagctcctacctgagcctgacacctgagcagtggaagtcccacagatcctacagctgccaagtgacccacgaaggcagcaccgtggaaaagacagtggcccctacagagtgcagcggatccacaacacctggcgagagaagtagcctgcctgccttctatcctggcaccagcggctcttgttctggctgtggatctctgagcctgcctctgctggctggactggttgctgctgatgctgtggcctctctgctgattgtgggagccgtgttcctgtgcgccagacctagaagaagccccgctcaagaggacggcaaggtgtacatcaacatgcccggcagaggaagcactagtagagtgaagttcagcagaagcgccgacgcccctgcctaccagcagggacagaaccaactgtacaacgagctgaacctgggcagacgggaagagtacgacgtgctggacaagcggagaggcagggaccctgagatgggcggaaagccccagcggagaaagaacccccaggaaggactgtataacgaactccagaaagacaagatggccgaagcctacagcgagatcggcatgaagggcgagcggagaagaggcaagggccacgatggcctgtaccagggcctgagcaccgccaccaaggacacctatgacgccctgcacatgcaggccctgcctccaagaagggccaagcgatctggatctggagcaacaaacttctcactactcaaacaagcaggtgacgtggaggagaatcccgggcctatggactggatttggcgcatccttttccttgtcggcgctgctaccggcgcgcattccttcgaacaagttcagcttcaacagcctggcgctgagctggtcaaacctggcgcttctgtgaagatgagctgcaaagccagcggctacgccttcagcagctactggatcaactggatgaagcagaaacccggccagggactcgaatggatcggccaaatctatcccggcgacggcgacaccaactacaacggcaagttcaagggcagagccacactgaccgccgatacctctagcagcacagcctacatgcagctgagcagcctgaccagcgaagatagcgccgtgtacttctgtgcccggtccatcacaacagtcgtgggctgcgctatggactattggggccagggaacaagcgtgaccgtgtctagtacgcgtgcctctacaaagggaccctccgtgtttcctctggctcccagcagcaagtctacaagcggaggaacagccgctctgggctgcctggtcaaggattactttcccgagcctgtgaccgtgtcctggaatagcggagcactgacaagcggcgtgcacacctttccagccgtgctgcaaagcagcggcctgtactctctgagcagcgtggtcacagtgcctagctctagcctgggcacccagacctacatctgcaatgtgaaccacaagcctagcaacaccaaggtggacaagagagtggaacccaagagctgtggtacccagagttttgggttgttggaccctaaattgagctatctgttggacggaatcctgttcatttacggagtgatcctgaccgcattgttcctgagctctagacgggttaagttttccagatccgcagacgcacccgcttaccaacaagggcagaaccaactctacaatgaacttaatttggggcggagggaagagtacgacgttctggacaaaaggaggggacgagatcccgagatgggcggaaagcctcagcgaaggaagaatccgcaagaggggctttataacgaactccagaaagataaaatggcagaagcctatagtgagattgggatgaagggagaaaggaggaggggtaaaggtcacgatgggttgtaccaaggattgagcacagccactaaagatacctatgatgcgctccacatgcaggccctgccgccaagacgcgccaagagaagcggatctggcgtgaagcagaccctgaatttcgacctgctgaagctggctggcgacgtggaatccaacccaggccctggccatatggctacctacgaggtgctgtgcgaggtggcaagaaagctgggcaccgacgacagagaagtggtgctgttcctgctgaacgtgttcatccctcagcctacactggcccagctgatcggtgcactgagagccctgaaagaggaaggccggctgacctttcctctgctggccgaatgcctgttcagagccggaagaagggatctgctgcgggacctgctgcatctggaccccagatttctggaaagacacctggccggcaccatgagctacttcagcccttaccagctgaccgtgctgcacgttgacggcgaactgtgcgccagagatattcggagcctgatcttcctgagcaaggacaccatcggcagccggtctacccctcagacatttctgcactgggtgtactgcatggaaaacctggacctgctcggccccacagatgtggatgccctgatgtccatgctgagaagcctgagcagagtggacctccagagacaggtgcagacactgatgggactgcacctgagcggacctagccacagccagcactacagacacacccct

SEQ ID NO: 2041 - DNA, 3372 bp, Artificial Sequence
  Synthetic Polynucleotide
atggccttaccagtgaccgccttgctcctgccgctggccttgctgctccacgccgccaggccggacatccagatgacacagagccctagcagcctgtctgccagcgtgggagacagagtgaccatcacatgcaaggccagcgaccacatcaacaactggctggcctggtatcagcagaagcctggacaggcccctaagctgctgatctacggcgctaccacactggaaacaggcgtgcccagcagattttctggcagcggctctggcaccgactacaccctgacaatatccagcctccagcctgaggacttcgccacctactactgtcagcagagctggaacaccccttggacattcggccagggcaccaagctggaaatcaagagactcgagggacagcctaaggccaatcctaccgtgacactgttccctccaagcagcgaagaactccaggccaacaaggccacacttgtgtgcctgatctccgacttctaccctggggctgtgacagtggcttggaaggccgatggatctcctgtgaaagccggcgtggaaaccaccaagccatccaagcagagcaacaacaaatacgccgccagctcctacctgagcctgacacctgagcagtggaagtcccacagatcctacagctgccaagtgacccacgaaggcagcaccgtggaaaagacagtggcccctacagagtgcagcggatccacaacacctggcgagagaagtagcctgcctgccttctatcctggcaccagcggctcttgttctggctgtggatctctgagcctgcctctgctggctggactggttgctgctgatgctgtggcctctctgctgattgtgggagccgtgttcctgtgcgccagacctagaagaagccccgctcaagaggacggcaaggtgtacatcaacatgcccggcagaggaagcactagtagagtgaagttcagcagaagcgccgacgcccctgcctaccagcagggacagaaccaactgtacaacgagctgaacctgggcagacgggaagagtacgacgtgctggacaagcggagaggcagggaccctgagatgggcggaaagccccagcggagaaagaacccccaggaaggactgtataacgaactccagaaagacaagatggccgaagcctacagcgagatcggcatgaagggcgagcggagaagaggcaagggccacgatggcctgtaccagggcctgagcaccgccaccaaggacacctatgacgccctgcacatgcaggccctgcctccaagaagggccaagcgatctggatctggagcaacaaacttctcactactcaaacaagcaggtgacgtggaggagaatcccgggcctatggactggatttggcgcatccttttccttgtcggcgctgctaccggcgcgcattccttcgaacaagttcagcttcaacagcctggcgctgagctggtcaaacctggcgcttctgtgaagatgagctgcaaagccagcggctacgccttcagcagctactggatcaactggatgaagcagaaacccggccagggactcgaatggatcggccaaatctatcccggcgacggcgacaccaactacaacggcaagttcaagggcagagccacactgaccgccgatacctctagcagcacagcctacatgcagctgagcagcctgaccagcgaagatagcgccgtgtacttctgtgcccggtccatcacaacagtcgtgggctgcgctatggactattggggccagggaacaagcgtgaccgtgtctagtacgcgtgcctctacaaagggaccctccgtgtttcctctggctcccagcagcaagtctacaagcggaggaacagccgctctgggctgcctggtcaaggattactttcccgagcctgtgaccgtgtcctggaatagcggagcactgacaagcggcgtgcacacctttccagccgtgctgcaaagcagcggcctgtactctctgagcagcgtggtcacagtgcctagctctagcctgggcacccagacctacatctgcaatgtgaaccacaagcctagcaacaccaaggtggacaagagagtggaacccaagagctgtggtacccagagttttgggttgttggaccctaaattgagctatctgttggacggaatcctgttcatttacggagtgatcctgaccgcattgttcctgagctctagacgggttaagttttccagatccgcagacgcacccgcttaccaacaagggcagaaccaactctacaatgaacttaatttggggcggagggaagagtacgacgttctggacaaaaggaggggacgagatcccgagatgggcggaaagcctcagcgaaggaagaatccgcaagaggggctttataacgaactccagaaagataaaatggcagaagcctatagtgagattgggatgaagggagaaaggaggaggggtaaaggtcacgatgggttgtaccaaggattgagcacagccactaaagatacctatgatgcgctccacatgcaggccctgccgccaagacgcgccaagagaagcggatctggcgtgaagcagaccctgaatttcgacctgctgaagctggctggcgacgtggaatccaacccaggccctggccatatgtccgactccaaggaggtccctagccttccatttttgcgacacttgctcgaagagttggacagccatgaggacagcttgctgctgtttctgtgtcacgacgcggccccgggctgcacgacggtcacgcaagctttgtgctcgcttagccaacagcgcaagctgaccctcgcggctctggtcgagatgctctacgtgctgcagcgtatggatcttctcaagagccgcttcgggctcagcaaggagggggccgagcaattgctgggcacaagctttctcacgcgctaccgcaagctcatggtttgcgtgggtgaggagctcgactcgagcgagctacgcgctctacgcttgttcgcgtgcaacctgaatccgagcctgagcacggcgctttctgagagcagccgctttgtcgagcttgtactcgcgcttgaaaacgtaggactcgtctcgccatcgagtgtttccgtgcttgcggacatgttgcgcactcttcggcgcctcgatttgtgccagcagcttgttgagtacgaacaacaagagcaagccaggtaccgttactgttacgcggcctcgccctcattgccagttcgtacgttacgtcgggggcacggcgcgagtgaacacgagcagctgtgcatgcccgtgcaagaatcctctgacagccccgagctgctgcgcacgcccgtacaagaatcctccagcgacagccccgagcaaacgact

SEQ ID NO: 2042 - DNA, 3249 bp, Artificial Sequence
  Synthetic Polynucleotide
atggccttaccagtgaccgccttgctcctgccgctggccttgctgctccacgccgccaggccggacatccagatgacacagagccctagcagcctgtctgccagcgtgggagacagagtgaccatcacatgcaaggccagcgaccacatcaacaactggctggcctggtatcagcagaagcctggacaggcccctaagctgctgatctacggcgctaccacactggaaacaggcgtgcccagcagattttctggcagcggctctggcaccgactacaccctgacaatatccagcctccagcctgaggacttcgccacctactactgtcagcagagctggaacaccccttggacattcggccagggcaccaagctggaaatcaagagactcgagggacagcctaaggccaatcctaccgtgacactgttccctccaagcagcgaagaactccaggccaacaaggccacacttgtgtgcctgatctccgacttctaccctggggctgtgacagtggcttggaaggccgatggatctcctgtgaaagccggcgtggaaaccaccaagccatccaagcagagcaacaacaaatacgccgccagctcctacctgagcctgacacctgagcagtggaagtcccacagatcctacagctgccaagtgacccacgaaggcagcaccgtggaaaagacagtggcccctacagagtgcagcggatccacaacacctggcgagagaagtagcctgcctgccttctatcctggcaccagcggctcttgttctggctgtggatctctgagcctgcctctgctggctggactggttgctgctgatgctgtggcctctctgctgattgtgggagccgtgttcctgtgcgccagacctagaagaagccccgctcaagaggacggcaaggtgtacatcaacatgcccggcagaggaagcactagtagagtgaagttcagcagaagcgccgacgcccctgcctaccagcagggacagaaccaactgtacaacgagctgaacctgggcagacgggaagagtacgacgtgctggacaagcggagaggcagggaccctgagatgggcggaaagccccagcggagaaagaacccccaggaaggactgtataacgaactccagaaagacaagatggccgaagcctacagcgagatcggcatgaagggcgagcggagaagaggcaagggccacgatggcctgtaccagggcctgagcaccgccaccaaggacacctatgacgccctgcacatgcaggccctgcctccaagaagggccaagcgatctggatctggagcaacaaacttctcactactcaaacaagcaggtgacgtggaggagaatcccgggcctatggactggatttggcgcatccttttccttgtcggcgctgctaccggcgcgcattccttcgaacaagttcagcttcaacagcctggcgctgagctggtcaaacctggcgcttctgtgaagatgagctgcaaagccagcggctacgccttcagcagctactggatcaactggatgaagcagaaacccggccagggactcgaatggatcggccaaatctatcccggcgacggcgacaccaactacaacggcaagttcaagggcagagccacactgaccgccgatacctctagcagcacagcctacatgcagctgagcagcctgaccagcgaagatagcgccgtgtacttctgtgcccggtccatcacaacagtcgtgggctgcgctatggactattggggccagggaacaagcgtgaccgtgtctagtacgcgtgcctctacaaagggaccctccgtgtttcctctggctcccagcagcaagtctacaagcggaggaacagccgctctgggctgcctggtcaaggattactttcccgagcctgtgaccgtgtcctggaatagcggagcactgacaagcggcgtgcacacctttccagccgtgctgcaaagcagcggcctgtactctctgagcagcgtggtcacagtgcctagctctagcctgggcacccagacctacatctgcaatgtgaaccacaagcctagcaacaccaaggtggacaagagagtggaacccaagagctgtggtacccagagttttgggttgttggaccctaaattgagctatctgttggacggaatcctgttcatttacggagtgatcctgaccgcattgttcctgagctctagacgggttaagttttccagatccgcagacgcacccgcttaccaacaagggcagaaccaactctacaatgaacttaatttggggcggagggaagagtacgacgttctggacaaaaggaggggacgagatcccgagatgggcggaaagcctcagcgaaggaagaatccgcaagaggggctttataacgaactccagaaagataaaatggcagaagcctatagtgagattgggatgaagggagaaaggaggaggggtaaaggtcacgatgggttgtaccaaggattgagcacagccactaaagatacctatgatgcgctccacatgcaggccctgccgccaagacgcgccaagagaagcggatctggcgtgaagcagaccctgaatttcgacctgctgaagctggctggcgacgtggaatccaacccaggccctggccatatgaccgagtacaagcccacggtgcgcctcgccacccgcgacgacgtccccagggccgtacgcaccctcgccgccgcgttcgccgactaccccgccacgcgccacaccgtcgatccggaccgccacatcgagcgggtcaccgagctgcaagaactcttcctcacgcgcgtcgggctcgacatcggcaaggtgtgggtcgcggacgacggcgccgcggtggcggtctggaccacgccggagagcgtcgaagcgggggcggtgttcgccgagatcggcccgcgcatggccgagttgagcggttcccggctggccgcgcagcaacagatggaaggcctcctggcgccgcaccggcccaaggagcccgcgtggttcctggccaccgtcggcgtctcgcccgaccaccagggcaagggtctgggcagcgccgtcgtgctccccggagtggaggcggccgagcgcgccggggtgcccgccttcctggagacctccgcgccccgcaacctccccttctacgagcggctcggcttcaccgtcaccgccgacgtcgaggtgcccgaaggaccgcgcacctggtgcatgacccgcaagcccggtgcctga

SEQ ID NO: 2043 - DNA, 3660 bp, Artificial Sequence
  Synthetic Polynucleotide
atggccttaccagtgaccgccttgctcctgccgctggccttgctgctccacgccgccaggccggaagtgcagctggttgaatctggcggaggactggttcaggctggcggatctctgagactgtcttgtgccgccagcggcagaacctttagcatgggctggtttagacaggcccctggcaaagagagagagttcgtcgccgccatcacatactctggcggcagcccttactacgccgactctgtgaagggcagattcaccatcagccgggacaacgccaagaacaccgtgtacctccagatgaacagcctgaagcctgaggacaccgccgtgtactactgcgccgccaatccaacatacggcagcgactggaacgccgagaattggggccagggaacccaagtgacagtgtctagcggtaccggcggaggcggatctggcggcggaggtagcggtggcggaggatctgaattcgacatccagatgacacagagccctagcagcctgtctgccagcgtgggagacagagtgaccatcacatgcaaggccagcgaccacatcaacaactggctggcctggtatcagcagaagcctggacaggcccctaagctgctgatctacggcgctaccacactggaaacaggcgtgcccagcagattttctggcagcggctctggcaccgactacaccctgacaatatccagcctccagcctgaggacttcgccacctactactgtcagcagagctggaacaccccttggacattcggccagggcaccaagctggaaatcaagagactcgagggacagcctaaggccaatcctaccgtgacactgttccctccaagcagcgaagaactccaggccaacaaggccacacttgtgtgcctgatctccgacttctaccctggggctgtgacagtggcttggaaggccgatggatctcctgtgaaagccggcgtggaaaccaccaagccatccaagcagagcaacaacaaatacgccgccagctcctacctgagcctgacacctgagcagtggaagtcccacagatcctacagctgccaagtgacccacgaaggcagcaccgtggaaaagacagtggcccctacagagtgcagcggatccacaacacctggcgagagaagtagcctgcctgccttctatcctggcaccagcggctcttgttctggctgtggatctctgagcctgcctctgctggctggactggttgctgctgatgctgtggcctctctgctgattgtgggagccgtgttcctgtgcgccagacctagaagaagccccgctcaagaggacggcaaggtgtacatcaacatgcccggcagaggaagcactagtagagtgaagttcagcagaagcgccgacgcccctgcctaccagcagggacagaaccaactgtacaacgagctgaacctgggcagacgggaagagtacgacgtgctggacaagcggagaggcagggaccctgagatgggcggaaagccccagcggagaaagaacccccaggaaggactgtataacgaactccagaaagacaagatggccgaagcctacagcgagatcggcatgaagggcgagcggagaagaggcaagggccacgatggcctgtaccagggcctgagcaccgccaccaaggacacctatgacgccctgcacatgcaggccctgcctccaagaagggccaagcgatctggatctggagcaacaaacttctcactactcaaacaagcaggtgacgtggaggagaatcccgggcctatggactggatttggcgcatccttttccttgtcggcgctgctaccggcgcgcattccttcgaacaagttcagcttcaacagcctggcgctgagctggtcaaacctggcgcttctgtgaagatgagctgcaaagccagcggctacgccttcagcagctactggatcaactggatgaagcagaaacccggccagggactcgaatggatcggccaaatctatcccggcgacggcgacaccaactacaacggcaagttcaagggcagagccacactgaccgccgatacctctagcagcacagcctacatgcagctgagcagcctgaccagcgaagatagcgccgtgtacttctgtgcccggtccatcacaacagtcgtgggctgcgctatggactattggggccagggaacaagcgtgaccgtgtctagtacgcgtgcctctacaaagggaccctccgtgtttcctctggctcccagcagcaagtctacaagcggaggaacagccgctctgggctgcctggtcaaggattactttcccgagcctgtgaccgtgtcctggaatagcggagcactgacaagcggcgtgcacacctttccagccgtgctgcaaagcagcggcctgtactctctgagcagcgtggtcacagtgcctagctctagcctgggcacccagacctacatctgcaatgtgaaccacaagcctagcaacaccaaggtggacaagagagtggaacccaagagctgtggtacccagagttttgggttgttggaccctaaattgagctatctgttggacggaatcctgttcatttacggagtgatcctgaccgcattgttcctgagctctagacgggttaagttttccagatccgcagacgcacccgcttaccaacaagggcagaaccaactctacaatgaacttaatttggggcggagggaagagtacgacgttctggacaaaaggaggggacgagatcccgagatgggcggaaagcctcagcgaaggaagaatccgcaagaggggctttataacgaactccagaaagataaaatggcagaagcctatagtgagattgggatgaagggagaaaggaggaggggtaaaggtcacgatgggttgtaccaaggattgagcacagccactaaagatacctatgatgcgctccacatgcaggccctgccgccaagacgcgccaagagaagcggatctggcgtgaagcagaccctgaatttcgacctgctgaagctggctggcgacgtggaatccaacccaggccctggccatatgaccgagtacaagcccacggtgcgcctcgccacccgcgacgacgtccccagggccgtacgcaccctcgccgccgcgttcgccgactaccccgccacgcgccacaccgtcgatccggaccgccacatcgagcgggtcaccgagctgcaagaactcttcctcacgcgcgtcgggctcgacatcggcaaggtgtgggtcgcggacgacggcgccgcggtggcggtctggaccacgccggagagcgtcgaagcgggggcggtgttcgccgagatcggcccgcgcatggccgagttgagcggttcccggctggccgcgcagcaacagatggaaggcctcctggcgccgcaccggcccaaggagcccgcgtggttcctggccaccgtcggcgtctcgcccgaccaccagggcaagggtctgggcagcgccgtcgtgctccccggagtggaggcggccgagcgcgccggggtgcccgccttcctggagacctccgcgccccgcaacctccccttctacgagcggctcggcttcaccgtcaccgccgacgtcgaggtgcccgaaggaccgcgcacctggtgcatgacccgcaagcccggtgcctga

SEQ ID NO: 2044 - DNA, 4071 bp, Artificial Sequence
  Synthetic Polynucleotide
atggccttaccagtgaccgccttgctcctgccgctggccttgctgctccacgccgccaggccggaagtgcagctggttgaatctggcggaggactggttcaggctggcggatctctgagactgtcttgtgccgccagcggcagaacctttagcatgggctggtttagacaggcccctggcaaagagagagagttcgtcgccgccatcacatactctggcggcagcccttactacgccgactctgtgaagggcagattcaccatcagccgggacaacgccaagaacaccgtgtacctccagatgaacagcctgaagcctgaggacaccgccgtgtactactgcgccgccaatccaacatacggcagcgactggaacgccgagaattggggccagggaacccaagtgacagtgtctagcggtaccggcggaggcggatctggcggcggaggtagcggtggcggaggatctgaattcgacatccagatgacacagagccctagcagcctgtctgccagcgtgggagacagagtgaccatcacatgcaaggccagcgaccacatcaacaactggctggcctggtatcagcagaagcctggacaggcccctaagctgctgatctacggcgctaccacactggaaacaggcgtgcccagcagattttctggcagcggctctggcaccgactacaccctgacaatatccagcctccagcctgaggacttcgccacctactactgtcagcagagctggaacaccccttggacattcggccagggcaccaagctggaaatcaagagactcgagggacagcctaaggccaatcctaccgtgacactgttccctccaagcagcgaagaactccaggccaacaaggccacacttgtgtgcctgatctccgacttctaccctggggctgtgacagtggcttggaaggccgatggatctcctgtgaaagccggcgtggaaaccaccaagccatccaagcagagcaacaacaaatacgccgccagctcctacctgagcctgacacctgagcagtggaagtcccacagatcctacagctgccaagtgacccacgaaggcagcaccgtggaaaagacagtggcccctacagagtgcagcggatccacaacacctggcgagagaagtagcctgcctgccttctatcctggcaccagcggctcttgttctggctgtggatctctgagcctgcctctgctggctggactggttgctgctgatgctgtggcctctctgctgattgtgggagccgtgttcctgtgcgccagacctagaagaagccccgctcaagaggacggcaaggtgtacatcaacatgcccggcagaggaagcactagtagagtgaagttcagcagaagcgccgacgcccctgcctaccagcagggacagaaccaactgtacaacgagctgaacctgggcagacgggaagagtacgacgtgctggacaagcggagaggcagggaccctgagatgggcggaaagccccagcggagaaagaacccccaggaaggactgtataacgaactccagaaagacaagatggccgaagcctacagcgagatcggcatgaagggcgagcggagaagaggcaagggccacgatggcctgtaccagggcctgagcaccgccaccaaggacacctatgacgccctgcacatgcaggccctgcctccaagaagggccaagcgatctggatctggagcaacaaacttctcactactcaaacaagcaggtgacgtggaggagaatcccgggcctatggactggatttggcgcatccttttccttgtcggcgctgctaccggcgcgcattccgggcccgaagtgcaactggttgaatccggtggcggcctggtgcaagcaggcggatctctcagacttagctgtgccgcctccggcagaaccttcacaatgggatggtttaggcaggctccagggaaagagagagagttcgtcgccgccatctctctgtctcccacactggcctactacgccgactctgtgaaaggccggttcaccatctccagagataatgccaagaacaccgtggtgctgcaaatgaactctctgaaacccgaggatacagccctgtactattgtgccgctgaccggaagtccgtgatgagcatcagacccgattactggggacagggcacacaagtcacagtgtcctctggatccggcggcggaggatctggcggaggcggatctgggggcggaggctctttcgaacaagttcagcttcaacagcctggcgctgagctggtcaaacctggcgcttctgtgaagatgagctgcaaagccagcggctacgccttcagcagctactggatcaactggatgaagcagaaacccggccagggactcgaatggatcggccaaatctatcccggcgacggcgacaccaactacaacggcaagttcaagggcagagccacactgaccgccgatacctctagcagcacagcctacatgcagctgagcagcctgaccagcgaagatagcgccgtgtacttctgtgcccggtccatcacaacagtcgtgggctgcgctatggactattggggccagggaacaagcgtgaccgtgtctagtacgcgtgcctctacaaagggaccctccgtgtttcctctggctcccagcagcaagtctacaagcggaggaacagccgctctgggctgcctggtcaaggattactttcccgagcctgtgaccgtgtcctggaatagcggagcactgacaagcggcgtgcacacctttccagccgtgctgcaaagcagcggcctgtactctctgagcagcgtggtcacagtgcctagctctagcctgggcacccagacctacatctgcaatgtgaaccacaagcctagcaacaccaaggtggacaagagagtggaacccaagagctgtggtacccagagttttgggttgttggaccctaaattgagctatctgttggacggaatcctgttcatttacggagtgatcctgaccgcattgttcctgagctctagacgggttaagttttccagatccgcagacgcacccgcttaccaacaagggcagaaccaactctacaatgaacttaatttggggcggagggaagagtacgacgttctggacaaaaggaggggacgagatcccgagatgggcggaaagcctcagcgaaggaagaatccgcaagaggggctttataacgaactccagaaagataaaatggcagaagcctatagtgagattgggatgaagggagaaaggaggaggggtaaaggtcacgatgggttgtaccaaggattgagcacagccactaaagatacctatgatgcgctccacatgcaggccctgccgccaagacgcgccaagagaagcggatctggcgtgaagcagaccctgaatttcgacctgctgaagctggctggcgacgtggaatccaacccaggccctggccatatgaccgagtacaagcccacggtgcgcctcgccacccgcgacgacgtccccagggccgtacgcaccctcgccgccgcgttcgccgactaccccgccacgcgccacaccgtcgatccggaccgccacatcgagcgggtcaccgagctgcaagaactcttcctcacgcgcgtcgggctcgacatcggcaaggtgtgggtcgcggacgacggcgccgcggtggcggtctggaccacgccggagagcgtcgaagcgggggcggtgttcgccgagatcggcccgcgcatggccgagttgagcggttcccggctggccgcgcagcaacagatggaaggcctcctggcgccgcaccggcccaaggagcccgcgtggttcctggccaccgtcggcgtctcgcccgaccaccagggcaagggtctgggcagcgccgtcgtgctccccggagtggaggcggccgagcgcgccggggtgcccgccttcctggagacctccgcgccccgcaacctccccttctacgagcggctcggcttcaccgtcaccgccgacgtcgaggtgcccgaaggaccgcgcacctggtgcatgacccgcaagcccggtgcctga

SEQ ID NO: 2045 - DNA, 3270 bp, Artificial Sequence
  Synthetic Polynucleotide
atggccttaccagtgaccgccttgctcctgccgctggccttgctgctccacgccgccaggccggaagtgcagctggttgaatctggcggaggactggttcaggctggcggatctctgagactgtcttgtgccgccagcggcagaacctttagcatgggctggtttagacaggcccctggcaaagagagagagttcgtcgccgccatcacatactctggcggcagcccttactacgccgactctgtgaagggcagattcaccatcagccgggacaacgccaagaacaccgtgtacctccagatgaacagcctgaagcctgaggacaccgccgtgtactactgcgccgccaatccaacatacggcagcgactggaacgccgagaattggggccagggaacccaagtgacagtgtctagcctcgagggacagcctaaggccaatcctaccgtgacactgttccctccaagcagcgaagaactccaggccaacaaggccacacttgtgtgcctgatctccgacttctaccctggggctgtgacagtggcttggaaggccgatggatctcctgtgaaagccggcgtggaaaccaccaagccatccaagcagagcaacaacaaatacgccgccagctcctacctgagcctgacacctgagcagtggaagtcccacagatcctacagctgccaagtgacccacgaaggcagcaccgtggaaaagacagtggcccctacagagtgcagcggatccacaacacctggcgagagaagtagcctgcctgccttctatcctggcaccagcggctcttgttctggctgtggatctctgagcctgcctctgctggctggactggttgctgctgatgctgtggcctctctgctgattgtgggagccgtgttcctgtgcgccagacctagaagaagccccgctcaagaggacggcaaggtgtacatcaacatgcccggcagaggaagcactagtagagtgaagttcagcagaagcgccgacgcccctgcctaccagcagggacagaaccaactgtacaacgagctgaacctgggcagacgggaagagtacgacgtgctggacaagcggagaggcagggaccctgagatgggcggaaagccccagcggagaaagaacccccaggaaggactgtataacgaactccagaaagacaagatggccgaagcctacagcgagatcggcatgaagggcgagcggagaagaggcaagggccacgatggcctgtaccagggcctgagcaccgccaccaaggacacctatgacgccctgcacatgcaggccctgcctccaagaagggccaagcgatctggatctggagcaacaaacttctcactactcaaacaagcaggtgacgtggaggagaatcccgggcctatggactggatttggcgcatccttttccttgtcggcgctgctaccggcgcgcattccgggcccgaagtgcaactggttgaatccggtggcggcctggtgcaagcaggcggatctctcagacttagctgtgccgcctccggcagaaccttcacaatgggatggtttaggcaggctccagggaaagagagagagttcgtcgccgccatctctctgtctcccacactggcctactacgccgactctgtgaaaggccggttcaccatctccagagataatgccaagaacaccgtggtgctgcaaatgaactctctgaaacccgaggatacagccctgtactattgtgccgctgaccggaagtccgtgatgagcatcagacccgattactggggacagggcacacaagtcacagtgtcctctacgcgtgcctctacaaagggaccctccgtgtttcctctggctcccagcagcaagtctacaagcggaggaacagccgctctgggctgcctggtcaaggattactttcccgagcctgtgaccgtgtcctggaatagcggagcactgacaagcggcgtgcacacctttccagccgtgctgcaaagcagcggcctgtactctctgagcagcgtggtcacagtgcctagctctagcctgggcacccagacctacatctgcaatgtgaaccacaagcctagcaacaccaaggtggacaagagagtggaacccaagagctgtggtacccagagttttgggttgttggaccctaaattgagctatctgttggacggaatcctgttcatttacggagtgatcctgaccgcattgttcctgagctctagacgggttaagttttccagatccgcagacgcacccgcttaccaacaagggcagaaccaactctacaatgaacttaatttggggcggagggaagagtacgacgttctggacaaaaggaggggacgagatcccgagatgggcggaaagcctcagcgaaggaagaatccgcaagaggggctttataacgaactccagaaagataaaatggcagaagcctatagtgagattgggatgaagggagaaaggaggaggggtaaaggtcacgatgggttgtaccaaggattgagcacagccactaaagatacctatgatgcgctccacatgcaggccctgccgccaagacgcgccaagagaagcggatctggcgtgaagcagaccctgaatttcgacctgctgaagctggctggcgacgtggaatccaacccaggccctggccatatgaccgagtacaagcccacggtgcgcctcgccacccgcgacgacgtccccagggccgtacgcaccctcgccgccgcgttcgccgactaccccgccacgcgccacaccgtcgatccggaccgccacatcgagcgggtcaccgagctgcaagaactcttcctcacgcgcgtcgggctcgacatcggcaaggtgtgggtcgcggacgacggcgccgcggtggcggtctggaccacgccggagagcgtcgaagcgggggcggtgttcgccgagatcggcccgcgcatggccgagttgagcggttcccggctggccgcgcagcaacagatggaaggcctcctggcgccgcaccggcccaaggagcccgcgtggttcctggccaccgtcggcgtctcgcccgaccaccagggcaagggtctgggcagcgccgtcgtgctccccggagtggaggcggccgagcgcgccggggtgcccgccttcctggagacctccgcgccccgcaacctccccttctacgagcggctcggcttcaccgtcaccgccgacgtcgaggtgcccgaaggaccgcgcacctggtgcatgacccgcaagcccggtgcctga

SEQ ID NO: 2046 - DNA, 3294 bp, Artificial Sequence
  Synthetic Polynucleotide
atggccttaccagtgaccgccttgctcctgccgctggccttgctgctccacgccgccaggccggacatccagatgacacagagccctagcagcctgtctgccagcgtgggagacagagtgaccatcacatgcaaggccagcgaccacatcaacaactggctggcctggtatcagcagaagcctggacaggcccctaagctgctgatctacggcgctaccacactggaaacaggcgtgcccagcagattttctggcagcggctctggcaccgactacaccctgacaatatccagcctccagcctgaggacttcgccacctactactgtcagcagagctggaacaccccttggacattcggccagggcaccaagctggaaatcaagagactcgaggacctgaagaacgtgttcccacctgaggtggccgtgttcgagcctagcgaggccgagatcagccacacccagaaagccaccctcgtgtgcctggctaccggcttctaccccgaccatgtggaactgtcttggtgggtcaacggcaaagaggtgcacagcggcgtgtctaccgacccccagccactgaaagaacagcccgccctgaacgacagccggtactgcctgagcagcagactgagagtgtccgccaccttctggcagaacccccggaaccacttcagatgccaggtgcagttctacggcctgagcgagaacgacgagtggacccaggacagagccaagcccgtgacccagatcgtgtctgccgaagcctggggcagagccgattgcggatccacaacacctggcgagagaagtagcctgcctgccttctatcctggcaccagcggctcttgttctggctgtggatctctgagcctgcctctgctggctggactggttgctgctgatgctgtggcctctctgctgattgtgggagccgtgttcctgtgcgccagacctagaagaagccccgctcaagaggacggcaaggtgtacatcaacatgcccggcagaggaagcactagtagagtgaagttcagcagaagcgccgacgcccctgcctaccagcagggacagaaccaactgtacaacgagctgaacctgggcagacgggaagagtacgacgtgctggacaagcggagaggcagggaccctgagatgggcggaaagccccagcggagaaagaacccccaggaaggactgtataacgaactccagaaagacaagatggccgaagcctacagcgagatcggcatgaagggcgagcggagaagaggcaagggccacgatggcctgtaccagggcctgagcaccgccaccaaggacacctatgacgccctgcacatgcaggccctgcctccaagaagggccaagcgatctggatctggagcaacaaacttctcactactcaaacaagcaggtgacgtggaggagaatcccgggcctatggactggatttggcgcatccttttccttgtcggcgctgctaccggcgcgcattccttcgaacaagttcagcttcaacagcctggcgctgagctggtcaaacctggcgcttctgtgaagatgagctgcaaagccagcggctacgccttcagcagctactggatcaactggatgaagcagaaacccggccagggactcgaatggatcggccaaatctatcccggcgacggcgacaccaactacaacggcaagttcaagggcagagccacactgaccgccgatacctctagcagcacagcctacatgcagctgagcagcctgaccagcgaagatagcgccgtgtacttctgtgcccggtccatcacaacagtcgtgggctgcgctatggactattggggccagggaacaagcgtgaccgtgtctagtacgcgtatccagaaccctgatcctgccgtgtaccagctgcgggatagcaagagcagcgacaagagcgtgtgtctgttcaccgacttcgacagccagaccaacgtgtcccagagcaaggactccgacgtgtacatcaccgataagaccgtgctggacatgcggagcatggacttcaagagcaactccgccgtggcctggtccaacaagtccgatttcgcctgcgccaacgccttcaacaacagcattatccccgaggacacattcttcccaagccccgagagcagctgcggtacccagagttttgggttgttggaccctaaattgagctatctgttggacggaatcctgttcatttacggagtgatcctgaccgcattgttcctgagctctagacgggttaagttttccagatccgcagacgcacccgcttaccaacaagggcagaaccaactctacaatgaacttaatttggggcggagggaagagtacgacgttctggacaaaaggaggggacgagatcccgagatgggcggaaagcctcagcgaaggaagaatccgcaagaggggctttataacgaactccagaaagataaaatggcagaagcctatagtgagattgggatgaagggagaaaggaggaggggtaaaggtcacgatgggttgtaccaaggattgagcacagccactaaagatacctatgatgcgctccacatgcaggccctgccgccaagacgcgccaagagaagcggatctggcgtgaagcagaccctgaatttcgacctgctgaagctggctggcgacgtggaatccaacccaggccctggccatatgaccgagtacaagcccacggtgcgcctcgccacccgcgacgacgtccccagggccgtacgcaccctcgccgccgcgttcgccgactaccccgccacgcgccacaccgtcgatccggaccgccacatcgagcgggtcaccgagctgcaagaactcttcctcacgcgcgtcgggctcgacatcggcaaggtgtgggtcgcggacgacggcgccgcggtggcggtctggaccacgccggagagcgtcgaagcgggggcggtgttcgccgagatcggcccgcgcatggccgagttgagcggttcccggctggccgcgcagcaacagatggaaggcctcctggcgccgcaccggcccaaggagcccgcgtggttcctggccaccgtcggcgtctcgcccgaccaccagggcaagggtctgggcagcgccgtcgtgctccccggagtggaggcggccgagcgcgccggggtgcccgccttcctggagacctccgcgccccgcaacctccccttctacgagcggctcggcttcaccgtcaccgccgacgtcgaggtgcccgaaggaccgcgcacctggtgcatgacccgcaagcccggtgcctga

SEQ ID NO: 2047 - DNA, 3705 bp, Artificial Sequence
  Synthetic Polynucleotide
atggccttaccagtgaccgccttgctcctgccgctggccttgctgctccacgccgccaggccggaagtgcagctggttgaatctggcggaggactggttcaggctggcggatctctgagactgtcttgtgccgccagcggcagaacctttagcatgggctggtttagacaggcccctggcaaagagagagagttcgtcgccgccatcacatactctggcggcagcccttactacgccgactctgtgaagggcagattcaccatcagccgggacaacgccaagaacaccgtgtacctccagatgaacagcctgaagcctgaggacaccgccgtgtactactgcgccgccaatccaacatacggcagcgactggaacgccgagaattggggccagggaacccaagtgacagtgtctagcggtaccggcggaggcggatctggcggcggaggtagcggtggcggaggatctgaattcgacatccagatgacacagagccctagcagcctgtctgccagcgtgggagacagagtgaccatcacatgcaaggccagcgaccacatcaacaactggctggcctggtatcagcagaagcctggacaggcccctaagctgctgatctacggcgctaccacactggaaacaggcgtgcccagcagattttctggcagcggctctggcaccgactacaccctgacaatatccagcctccagcctgaggacttcgccacctactactgtcagcagagctggaacaccccttggacattcggccagggcaccaagctggaaatcaagagactcgaggacctgaagaacgtgttcccacctgaggtggccgtgttcgagcctagcgaggccgagatcagccacacccagaaagccaccctcgtgtgcctggctaccggcttctaccccgaccatgtggaactgtcttggtgggtcaacggcaaagaggtgcacagcggcgtgtctaccgacccccagccactgaaagaacagcccgccctgaacgacagccggtactgcctgagcagcagactgagagtgtccgccaccttctggcagaacccccggaaccacttcagatgccaggtgcagttctacggcctgagcgagaacgacgagtggacccaggacagagccaagcccgtgacccagatcgtgtctgccgaagcctggggcagagccgattgcggatccacaacacctggcgagagaagtagcctgcctgccttctatcctggcaccagcggctcttgttctggctgtggatctctgagcctgcctctgctggctggactggttgctgctgatgctgtggcctctctgctgattgtgggagccgtgttcctgtgcgccagacctagaagaagccccgctcaagaggacggcaaggtgtacatcaacatgcccggcagaggaagcactagtagagtgaagttcagcagaagcgccgacgcccctgcctaccagcagggacagaaccaactgtacaacgagctgaacctgggcagacgggaagagtacgacgtgctggacaagcggagaggcagggaccctgagatgggcggaaagccccagcggagaaagaacccccaggaaggactgtataacgaactccagaaagacaagatggccgaagcctacagcgagatcggcatgaagggcgagcggagaagaggcaagggccacgatggcctgtaccagggcctgagcaccgccaccaaggacacctatgacgccctgcacatgcaggccctgcctccaagaagggccaagcgatctggatctggagcaacaaacttctcactactcaaacaagcaggtgacgtggaggagaatcccgggcctatggactggatttggcgcatccttttccttgtcggcgctgctaccggcgcgcattccttcgaacaagttcagcttcaacagcctggcgctgagctggtcaaacctggcgcttctgtgaagatgagctgcaaagccagcggctacgccttcagcagctactggatcaactggatgaagcagaaacccggccagggactcgaatggatcggccaaatctatcccggcgacggcgacaccaactacaacggcaagttcaagggcagagccacactgaccgccgatacctctagcagcacagcctacatgcagctgagcagcctgaccagcgaagatagcgccgtgtacttctgtgcccggtccatcacaacagtcgtgggctgcgctatggactattggggccagggaacaagcgtgaccgtgtctagtacgcgtatccagaaccctgatcctgccgtgtaccagctgcgggatagcaagagcagcgacaagagcgtgtgtctgttcaccgacttcgacagccagaccaacgtgtcccagagcaaggactccgacgtgtacatcaccgataagaccgtgctggacatgcggagcatggacttcaagagcaactccgccgtggcctggtccaacaagtccgatttcgcctgcgccaacgccttcaacaacagcattatccccgaggacacattcttcccaagccccgagagcagctgcggtacccagagttttgggttgttggaccctaaattgagctatctgttggacggaatcctgttcatttacggagtgatcctgaccgcattgttcctgagctctagacgggttaagttttccagatccgcagacgcacccgcttaccaacaagggcagaaccaactctacaatgaacttaatttggggcggagggaagagtacgacgttctggacaaaaggaggggacgagatcccgagatgggcggaaagcctcagcgaaggaagaatccgcaagaggggctttataacgaactccagaaagataaaatggcagaagcctatagtgagattgggatgaagggagaaaggaggaggggtaaaggtcacgatgggttgtaccaaggattgagcacagccactaaagatacctatgatgcgctccacatgcaggccctgccgccaagacgcgccaagagaagcggatctggcgtgaagcagaccctgaatttcgacctgctgaagctggctggcgacgtggaatccaacccaggccctggccatatgaccgagtacaagcccacggtgcgcctcgccacccgcgacgacgtccccagggccgtacgcaccctcgccgccgcgttcgccgactaccccgccacgcgccacaccgtcgatccggaccgccacatcgagcgggtcaccgagctgcaagaactcttcctcacgcgcgtcgggctcgacatcggcaaggtgtgggtcgcggacgacggcgccgcggtggcggtctggaccacgccggagagcgtcgaagcgggggcggtgttcgccgagatcggcccgcgcatggccgagttgagcggttcccggctggccgcgcagcaacagatggaaggcctcctggcgccgcaccggcccaaggagcccgcgtggttcctggccaccgtcggcgtctcgcccgaccaccagggcaagggtctgggcagcgccgtcgtgctccccggagtggaggcggccgagcgcgccggggtgcccgccttcctggagacctccgcgccccgcaacctccccttctacgagcggctcggcttcaccgtcaccgccgacgtcgaggtgcccgaaggaccgcgcacctggtgcatgacccgcaagcccggtgcctga

SEQ ID NO: 2048 - DNA, 4116 bp, Artificial Sequence
  Synthetic Polynucleotide
atggccttaccagtgaccgccttgctcctgccgctggccttgctgctccacgccgccaggccggaagtgcagctggttgaatctggcggaggactggttcaggctggcggatctctgagactgtcttgtgccgccagcggcagaacctttagcatgggctggtttagacaggcccctggcaaagagagagagttcgtcgccgccatcacatactctggcggcagcccttactacgccgactctgtgaagggcagattcaccatcagccgggacaacgccaagaacaccgtgtacctccagatgaacagcctgaagcctgaggacaccgccgtgtactactgcgccgccaatccaacatacggcagcgactggaacgccgagaattggggccagggaacccaagtgacagtgtctagcggtaccggcggaggcggatctggcggcggaggtagcggtggcggaggatctgaattcgacatccagatgacacagagccctagcagcctgtctgccagcgtgggagacagagtgaccatcacatgcaaggccagcgaccacatcaacaactggctggcctggtatcagcagaagcctggacaggcccctaagctgctgatctacggcgctaccacactggaaacaggcgtgcccagcagattttctggcagcggctctggcaccgactacaccctgacaatatccagcctccagcctgaggacttcgccacctactactgtcagcagagctggaacaccccttggacattcggccagggcaccaagctggaaatcaagagactcgaggacctgaagaacgtgttcccacctgaggtggccgtgttcgagcctagcgaggccgagatcagccacacccagaaagccaccctcgtgtgcctggctaccggcttctaccccgaccatgtggaactgtcttggtgggtcaacggcaaagaggtgcacagcggcgtgtctaccgacccccagccactgaaagaacagcccgccctgaacgacagccggtactgcctgagcagcagactgagagtgtccgccaccttctggcagaacccccggaaccacttcagatgccaggtgcagttctacggcctgagcgagaacgacgagtggacccaggacagagccaagcccgtgacccagatcgtgtctgccgaagcctggggcagagccgattgcggatccacaacacctggcgagagaagtagcctgcctgccttctatcctggcaccagcggctcttgttctggctgtggatctctgagcctgcctctgctggctggactggttgctgctgatgctgtggcctctctgctgattgtgggagccgtgttcctgtgcgccagacctagaagaagccccgctcaagaggacggcaaggtgtacatcaacatgcccggcagaggaagcactagtagagtgaagttcagcagaagcgccgacgcccctgcctaccagcagggacagaaccaactgtacaacgagctgaacctgggcagacgggaagagtacgacgtgctggacaagcggagaggcagggaccctgagatgggcggaaagccccagcggagaaagaacccccaggaaggactgtataacgaactccagaaagacaagatggccgaagcctacagcgagatcggcatgaagggcgagcggagaagaggcaagggccacgatggcctgtaccagggcctgagcaccgccaccaaggacacctatgacgccctgcacatgcaggccctgcctccaagaagggccaagcgatctggatctggagcaacaaacttctcactactcaaacaagcaggtgacgtggaggagaatcccgggcctatggactggatttggcgcatccttttccttgtcggcgctgctaccggcgcgcattccgggcccgaagtgcaactggttgaatccggtggcggcctggtgcaagcaggcggatctctcagacttagctgtgccgcctccggcagaaccttcacaatgggatggtttaggcaggctccagggaaagagagagagttcgtcgccgccatctctctgtctcccacactggcctactacgccgactctgtgaaaggccggttcaccatctccagagataatgccaagaacaccgtggtgctgcaaatgaactctctgaaacccgaggatacagccctgtactattgtgccgctgaccggaagtccgtgatgagcatcagacccgattactggggacagggcacacaagtcacagtgtcctctggatccggcggcggaggatctggcggaggcggatctgggggcggaggctctttcgaacaagttcagcttcaacagcctggcgctgagctggtcaaacctggcgcttctgtgaagatgagctgcaaagccagcggctacgccttcagcagctactggatcaactggatgaagcagaaacccggccagggactcgaatggatcggccaaatctatcccggcgacggcgacaccaactacaacggcaagttcaagggcagagccacactgaccgccgatacctctagcagcacagcctacatgcagctgagcagcctgaccagcgaagatagcgccgtgtacttctgtgcccggtccatcacaacagtcgtgggctgcgctatggactattggggccagggaacaagcgtgaccgtgtctagtacgcgtatccagaaccctgatcctgccgtgtaccagctgcgggatagcaagagcagcgacaagagcgtgtgtctgttcaccgacttcgacagccagaccaacgtgtcccagagcaaggactccgacgtgtacatcaccgataagaccgtgctggacatgcggagcatggacttcaagagcaactccgccgtggcctggtccaacaagtccgatttcgcctgcgccaacgccttcaacaacagcattatccccgaggacacattcttcccaagccccgagagcagctgcggtacccagagttttgggttgttggaccctaaattgagctatctgttggacggaatcctgttcatttacggagtgatcctgaccgcattgttcctgagctctagacgggttaagttttccagatccgcagacgcacccgcttaccaacaagggcagaaccaactctacaatgaacttaatttggggcggagggaagagtacgacgttctggacaaaaggaggggacgagatcccgagatgggcggaaagcctcagcgaaggaagaatccgcaagaggggctttataacgaactccagaaagataaaatggcagaagcctatagtgagattgggatgaagggagaaaggaggaggggtaaaggtcacgatgggttgtaccaaggattgagcacagccactaaagatacctatgatgcgctccacatgcaggccctgccgccaagacgcgccaagagaagcggatctggcgtgaagcagaccctgaatttcgacctgctgaagctggctggcgacgtggaatccaacccaggccctggccatatgaccgagtacaagcccacggtgcgcctcgccacccgcgacgacgtccccagggccgtacgcaccctcgccgccgcgttcgccgactaccccgccacgcgccacaccgtcgatccggaccgccacatcgagcgggtcaccgagctgcaagaactcttcctcacgcgcgtcgggctcgacatcggcaaggtgtgggtcgcggacgacggcgccgcggtggcggtctggaccacgccggagagcgtcgaagcgggggcggtgttcgccgagatcggcccgcgcatggccgagttgagcggttcccggctggccgcgcagcaacagatggaaggcctcctggcgccgcaccggcccaaggagcccgcgtggttcctggccaccgtcggcgtctcgcccgaccaccagggcaagggtctgggcagcgccgtcgtgctccccggagtggaggcggccgagcgcgccggggtgcccgccttcctggagacctccgcgccccgcaacctccccttctacgagcggctcggcttcaccgtcaccgccgacgtcgaggtgcccgaaggaccgcgcacctggtgcatgacccgcaagcccggtgcctga

SEQ ID NO: 2049 - DNA, 3315 bp, Artificial Sequence
  Synthetic Polynucleotide
atggccttaccagtgaccgccttgctcctgccgctggccttgctgctccacgccgccaggccggaagtgcagctggttgaatctggcggaggactggttcaggctggcggatctctgagactgtcttgtgccgccagcggcagaacctttagcatgggctggtttagacaggcccctggcaaagagagagagttcgtcgccgccatcacatactctggcggcagcccttactacgccgactctgtgaagggcagattcaccatcagccgggacaacgccaagaacaccgtgtacctccagatgaacagcctgaagcctgaggacaccgccgtgtactactgcgccgccaatccaacatacggcagcgactggaacgccgagaattggggccagggaacccaagtgacagtgtctagcctcgaggacctgaagaacgtgttcccacctgaggtggccgtgttcgagcctagcgaggccgagatcagccacacccagaaagccaccctcgtgtgcctggctaccggcttctaccccgaccatgtggaactgtcttggtgggtcaacggcaaagaggtgcacagcggcgtgtctaccgacccccagccactgaaagaacagcccgccctgaacgacagccggtactgcctgagcagcagactgagagtgtccgccaccttctggcagaacccccggaaccacttcagatgccaggtgcagttctacggcctgagcgagaacgacgagtggacccaggacagagccaagcccgtgacccagatcgtgtctgccgaagcctggggcagagccgattgcggatccacaacacctggcgagagaagtagcctgcctgccttctatcctggcaccagcggctcttgttctggctgtggatctctgagcctgcctctgctggctggactggttgctgctgatgctgtggcctctctgctgattgtgggagccgtgttcctgtgcgccagacctagaagaagccccgctcaagaggacggcaaggtgtacatcaacatgcccggcagaggaagcactagtagagtgaagttcagcagaagcgccgacgcccctgcctaccagcagggacagaaccaactgtacaacgagctgaacctgggcagacgggaagagtacgacgtgctggacaagcggagaggcagggaccctgagatgggcggaaagccccagcggagaaagaacccccaggaaggactgtataacgaactccagaaagacaagatggccgaagcctacagcgagatcggcatgaagggcgagcggagaagaggcaagggccacgatggcctgtaccagggcctgagcaccgccaccaaggacacctatgacgccctgcacatgcaggccctgcctccaagaagggccaagcgatctggatctggagcaacaaacttctcactactcaaacaagcaggtgacgtggaggagaatcccgggcctatggactggatttggcgcatccttttccttgtcggcgctgctaccggcgcgcattccgggcccgaagtgcaactggttgaatccggtggcggcctggtgcaagcaggcggatctctcagacttagctgtgccgcctccggcagaaccttcacaatgggatggtttaggcaggctccagggaaagagagagagttcgtcgccgccatctctctgtctcccacactggcctactacgccgactctgtgaaaggccggttcaccatctccagagataatgccaagaacaccgtggtgctgcaaatgaactctctgaaacccgaggatacagccctgtactattgtgccgctgaccggaagtccgtgatgagcatcagacccgattactggggacagggcacacaagtcacagtgtcctctacgcgtatccagaaccctgatcctgccgtgtaccagctgcgggatagcaagagcagcgacaagagcgtgtgtctgttcaccgacttcgacagccagaccaacgtgtcccagagcaaggactccgacgtgtacatcaccgataagaccgtgctggacatgcggagcatggacttcaagagcaactccgccgtggcctggtccaacaagtccgatttcgcctgcgccaacgccttcaacaacagcattatccccgaggacacattcttcccaagccccgagagcagctgcggtacccagagttttgggttgttggaccctaaattgagctatctgttggacggaatcctgttcatttacggagtgatcctgaccgcattgttcctgagctctagacgggttaagttttccagatccgcagacgcacccgcttaccaacaagggcagaaccaactctacaatgaacttaatttggggcggagggaagagtacgacgttctggacaaaaggaggggacgagatcccgagatgggcggaaagcctcagcgaaggaagaatccgcaagaggggctttataacgaactccagaaagataaaatggcagaagcctatagtgagattgggatgaagggagaaaggaggaggggtaaaggtcacgatgggttgtaccaaggattgagcacagccactaaagatacctatgatgcgctccacatgcaggccctgccgccaagacgcgccaagagaagcggatctggcgtgaagcagaccctgaatttcgacctgctgaagctggctggcgacgtggaatccaacccaggccctggccatatgaccgagtacaagcccacggtgcgcctcgccacccgcgacgacgtccccagggccgtacgcaccctcgccgccgcgttcgccgactaccccgccacgcgccacaccgtcgatccggaccgccacatcgagcgggtcaccgagctgcaagaactcttcctcacgcgcgtcgggctcgacatcggcaaggtgtgggtcgcggacgacggcgccgcggtggcggtctggaccacgccggagagcgtcgaagcgggggcggtgttcgccgagatcggcccgcgcatggccgagttgagcggttcccggctggccgcgcagcaacagatggaaggcctcctggcgccgcaccggcccaaggagcccgcgtggttcctggccaccgtcggcgtctcgcccgaccaccagggcaagggtctgggcagcgccgtcgtgctccccggagtggaggcggccgagcgcgccggggtgcccgccttcctggagacctccgcgccccgcaacctccccttctacgagcggctcggcttcaccgtcaccgccgacgtcgaggtgcccgaaggaccgcgcacctggtgcatgacccgcaagcccggtgcctga

SEQ ID NO: 2050 - DNA, 1758 bp, Artificial Sequence; identical to SEQ ID NO: 2037
  Synthetic Polynucleotide

SEQ ID NO: 2051 - DNA, 2478 bp, Artificial Sequence
  Synthetic Polynucleotide
atggccttaccagtgaccgccttgctcctgccgctggccttgctgctccacgccgccaggccggacatccagatgacacagagccctagcagcctgtctgccagcgtgggagacagagtgaccatcacatgcaaggccagcgaccacatcaacaactggctggcctggtatcagcagaagcctggacaggcccctaagctgctgatctacggcgctaccacactggaaacaggcgtgcccagcagattttctggcagcggctctggcaccgactacaccctgacaatatccagcctccagcctgaggacttcgccacctactactgtcagcagagctggaacaccccttggacattcggccagggcaccaagctggaaatcaagagactcgagcagagcttcggcctgctggaccccaagctgagctacctgctggatggcatcctgttcatctacggcgtgatcctgaccgccctgttcctgagcactagtagagtgaagttcagcagaagcgccgacgcccctgcctaccagcagggacagaaccaactgtacaacgagctgaacctgggcagacgggaagagtacgacgtgctggacaagcggagaggcagggaccctgagatgggcggaaagccccagcggagaaagaacccccaggaaggactgtataacgaactccagaaagacaagatggccgaagcctacagcgagatcggcatgaagggcgagcggagaagaggcaagggccacgatggcctgtaccagggcctgagcaccgccaccaaggacacctatgacgccctgcacatgcaggccctgcctccaagaagggccaagcgatctggatctggagcaacaaacttctcactactcaaacaagcaggtgacgtggaggagaatcccgggcctatggactggatttggcgcatccttttccttgtcggcgctgctaccggcgcgcattccttcgaacaagttcagcttcaacagcctggcgctgagctggtcaaacctggcgcttctgtgaagatgagctgcaaagccagcggctacgccttcagcagctactggatcaactggatgaagcagaaacccggccagggactcgaatggatcggccaaatctatcccggcgacggcgacaccaactacaacggcaagttcaagggcagagccacactgaccgccgatacctctagcagcacagcctacatgcagctgagcagcctgaccagcgaagatagcgccgtgtacttctgtgcccggtccatcacaacagtcgtgggctgcgctatggactattggggccagggaacaagcgtgaccgtgtctagtacgcgtcagagttttgggttgttggaccctaaattgagctatctgttggacggaatcctgttcatttacggagtgatcctgaccgcattgttcctgagctctagacgggttaagttttccagatccgcagacgcacccgcttaccaacaagggcagaaccaactctacaatgaacttaatttggggcggagggaagagtacgacgttctggacaaaaggaggggacgagatcccgagatgggcggaaagcctcagcgaaggaagaatccgcaagaggggctttataacgaactccagaaagataaaatggcagaagcctatagtgagattgggatgaagggagaaaggaggaggggtaaaggtcacgatgggttgtaccaaggattgagcacagccactaaagatacctatgatgcgctccacatgcaggccctgccgccaagacgcgccaagagaagcggatctggcgtgaagcagaccctgaatttcgacctgctgaagctggctggcgacgtggaatccaacccaggccctggccatatgaccgagtacaagcccacggtgcgcctcgccacccgcgacgacgtccccagggccgtacgcaccctcgccgccgcgttcgccgactaccccgccacgcgccacaccgtcgatccggaccgccacatcgagcgggtcaccgagctgcaagaactcttcctcacgcgcgtcgggctcgacatcggcaaggtgtgggtcgcggacgacggcgccgcggtggcggtctggaccacgccggagagcgtcgaagcgggggcggtgttcgccgagatcggcccgcgcatggccgagttgagcggttcccggctggccgcgcagcaacagatggaaggcctcctggcgccgcaccggcccaaggagcccgcgtggttcctggccaccgtcggcgtctcgcccgaccaccagggcaagggtctgggcagcgccgtcgtgctccccggagtggaggcggccgagcgcgccggggtgcccgccttcctggagacctccgcgccccgcaacctccccttctacgagcggctcggcttcaccgtcaccgccgacgtcgaggtgcccgaaggaccgcgcacctggtgcatgacccgcaagcccggtgcctga

SEQ ID NO: 2052 - DNA, 2634 bp, Artificial Sequence
  Synthetic Polynucleotide
atggccttaccagtgaccgccttgctcctgccgctggccttgctgctccacgccgccaggccggcatgcgaagtgcagctgcttgaaagtggcggcggactgattcagcctggcggatctctgagactgagctgtgccgccagcggcttcaccttttctagccacgccatgacctgggtccgacaggcacctggaaaagggcttgaatgggtgtccgccatcagcggctctggcgattacacacactacgccgacagcgtgaagggcagattcaccatcagcagagacaacagcaagaacaccgtgtacctccagatgaacagcctgagagccgaggacagcgccgtgtattattgcgccaaggatgaggatggcggcagcctgcttggacacagaggacaaggcaccctggtcaccgtttcttccggtaccggcggaggcggatctggcggcggaggtagcggtggcggaggatctgaattcggatctctcgagcagagcttcggcctgctggaccccaagctgagctacctgctggatggcatcctgttcatctacggcgtgatcctgaccgccctgttcctgagcactagtagagtgaagttcagcagaagcgccgacgcccctgcctaccagcagggacagaaccaactgtacaacgagctgaacctgggcagacgggaagagtacgacgtgctggacaagcggagaggcagggaccctgagatgggcggaaagccccagcggagaaagaacccccaggaaggactgtataacgaactccagaaagacaagatggccgaagcctacagcgagatcggcatgaagggcgagcggagaagaggcaagggccacgatggcctgtaccagggcctgagcaccgccaccaaggacacctatgacgccctgcacatgcaggccctgcctccaagaagggccaagcgatctggatctggagcaacaaacttctcactactcaaacaagcaggtgacgtggaggagaatcccgggcctatggactggatttggcgcatccttttccttgtcggcgctgctaccggcgcgcattccgggcccgaagtgcagctggttgaatctggcggaggactggttcaggctggcggatctctgagactgtcttgtgccgccagcggcagaacctttagcatgggctggtttagacaggcccctggcaaagagagagagttcgtcgccgccatcacatactctggcggcagcccttactacgccgactctgtgaagggcagattcaccatcagccgggacaacgccaagaacaccgtgtacctccagatgaacagcctgaagcctgaggacaccgccgtgtactactgcgccgccaatccaacatacggcagcgactggaacgccgagaattggggccagggaacccaagtgacagtgtctagcggatccggcggcggaggatctggcggaggcggatctgggggcggaggctctttcgaaggcagcacgcgtcagagttttgggttgttggaccctaaattgagctatctgttggacggaatcctgttcatttacggagtgatcctgaccgcattgttcctgagctctagacgggttaagttttccagatccgcagacgcacccgcttaccaacaagggcagaaccaactctacaatgaacttaatttggggcggagggaagagtacgacgttctggacaaaaggaggggacgagatcccgagatgggcggaaagcctcagcgaaggaagaatccgcaagaggggctttataacgaactccagaaagataaaatggcagaagcctatagtgagattgggatgaagggagaaaggaggaggggtaaaggtcacgatgggttgtaccaaggattgagcacagccactaaagatacctatgatgcgctccacatgcaggccctgccgccaagacgcgccaagagaagcggatctggcgtgaagcagaccctgaatttcgacctgctgaagctggctggcgacgtggaatccaacccaggccctggccatatgaccgagtacaagcccacggtgcgcctcgccacccgcgacgacgtccccagggccgtacgcaccctcgccgccgcgttcgccgactaccccgccacgcgccacaccgtcgatccggaccgccacatcgagcgggtcaccgagctgcaagaactcttcctcacgcgcgtcgggctcgacatcggcaaggtgtgggtcgcggacgacggcgccgcggtggcggtctggaccacgccggagagcgtcgaagcgggggcggtgttcgccgagatcggcccgcgcatggccgagttgagcggttcccggctggccgcgcagcaacagatggaaggcctcctggcgccgcaccggcccaaggagcccgcgtggttcctggccaccgtcggcgtctcgcccgaccaccagggcaagggtctgggcagcgccgtcgtgctccccggagtggaggcggccgagcgcgccggggtgcccgccttcctggagacctccgcgccccgcaacctccccttctacgagcggctcggcttcaccgtcaccgccgacgtcgaggtgcccgaaggaccgcgcacctggtgcatgacccgcaagcccggtgcctga

SEQ ID NO: 2053 - DNA, 3081 bp, Artificial Sequence
  Synthetic Polynucleotide
atggccttaccagtgaccgccttgctcctgccgctggccttgctgctccacgccgccaggccggacatccagatgacacagagccctagcagcctgtctgccagcgtgggagacagagtgaccatcacatgcaaggccagcgaccacatcaacaactggctggcctggtatcagcagaagcctggacaggcccctaagctgctgatctacggcgctaccacactggaaacaggcgtgcccagcagattttctggcagcggctctggcaccgactacaccctgacaatatccagcctccagcctgaggacttcgccacctactactgtcagcagagctggaacaccccttggacattcggccagggcaccaagctggaaatcaagagactcgagggacagcctaaggccaatcctaccgtgacactgttccctccaagcagcgaagaactccaggccaacaaggccacacttgtgtgcctgatctccgacttctaccctggggctgtgacagtggcttggaaggccgatggatctcctgtgaaagccggcgtggaaaccaccaagccatccaagcagagcaacaacaaatacgccgccagctcctacctgagcctgacacctgagcagtggaagtcccacagatcctacagctgccaagtgacccacgaaggcagcaccgtggaaaagacagtggcccctacagagtgcagcggatcccagagcttcggcctgctggaccccaagctgagctacctgctggatggcatcctgttcatctacggcgtgatcctgaccgccctgttcctgagcactagtagagtgaagttcagcagaagcgccgacgcccctgcctaccagcagggacagaaccaactgtacaacgagctgaacctgggcagacgggaagagtacgacgtgctggacaagcggagaggcagggaccctgagatgggcggaaagccccagcggagaaagaacccccaggaaggactgtataacgaactccagaaagacaagatggccgaagcctacagcgagatcggcatgaagggcgagcggagaagaggcaagggccacgatggcctgtaccagggcctgagcaccgccaccaaggacacctatgacgccctgcacatgcaggccctgcctccaagaagggccaagcgatctggatctggagcaacaaacttctcactactcaaacaagcaggtgacgtggaggagaatcccgggcctatggactggatttggcgcatccttttccttgtcggcgctgctaccggcgcgcattccttcgaacaagttcagcttcaacagcctggcgctgagctggtcaaacctggcgcttctgtgaagatgagctgcaaagccagcggctacgccttcagcagctactggatcaactggatgaagcagaaacccggccagggactcgaatggatcggccaaatctatcccggcgacggcgacaccaactacaacggcaagttcaagggcagagccacactgaccgccgatacctctagcagcacagcctacatgcagctgagcagcctgaccagcgaagatagcgccgtgtacttctgtgcccggtccatcacaacagtcgtgggctgcgctatggactattggggccagggaacaagcgtgaccgtgtctagtacgcgtgcctctacaaagggaccctccgtgtttcctctggctcccagcagcaagtctacaagcggaggaacagccgctctgggctgcctggtcaaggattactttcccgagcctgtgaccgtgtcctggaatagcggagcactgacaagcggcgtgcacacctttccagccgtgctgcaaagcagcggcctgtactctctgagcagcgtggtcacagtgcctagctctagcctgggcacccagacctacatctgcaatgtgaaccacaagcctagcaacaccaaggtggacaagagagtggaacccaagagctgtggtacccagagttttgggttgttggaccctaaattgagctatctgttggacggaatcctgttcatttacggagtgatcctgaccgcattgttcctgagctctagacgggttaagttttccagatccgcagacgcacccgcttaccaacaagggcagaaccaactctacaatgaacttaatttggggcggagggaagagtacgacgttctggacaaaaggaggggacgagatcccgagatgggcggaaagcctcagcgaaggaagaatccgcaagaggggctttataacgaactccagaaagataaaatggcagaagcctatagtgagattgggatgaagggagaaaggaggaggggtaaaggtcacgatgggttgtaccaaggattgagcacagccactaaagatacctatgatgcgctccacatgcaggccctgccgccaagacgcgccaagagaagcggatctggcgtgaagcagaccctgaatttcgacctgctgaagctggctggcgacgtggaatccaacccaggccctggccatatggctacctacgaggtgctgtgcgaggtggcaagaaagctgggcaccgacgacagagaagtggtgctgttcctgctgaacgtgttcatccctcagcctacactggcccagctgatcggtgcactgagagccctgaaagaggaaggccggctgacctttcctctgctggccgaatgcctgttcagagccggaagaagggatctgctgcgggacctgctgcatctggaccccagatttctggaaagacacctggccggcaccatgagctacttcagcccttaccagctgaccgtgctgcacgttgacggcgaactgtgcgccagagatattcggagcctgatcttcctgagcaaggacaccatcggcagccggtctacccctcagacatttctgcactgggtgtactgcatggaaaacctggacctgctcggccccacagatgtggatgccctgatgtccatgctgagaagcctgagcagagtggacctccagagacaggtgcagacactgatgggactgcacctgagcggacctagccacagccagcactacagacacacccct

(The sequence listing continues in the following parts.)

1. An at least one recombinant polynucleotide encoding a synthetic a antigen receptor (SAR) that specifically binds to a target antigen, wherein the SAR comprises a dimer of two polypeptide chains comprising:
(i) a first module comprising one or more heterologous antigen binding domains selected from the group consisting of:
a) an antibody;
b) an antibody fragment;
c) a heavy chain variable region of an antibody (vH domain) or a fragment thereof;
d) a light chain variable region of an antibody (vL domain) or a fragment thereof;
e) a single chain variable fragment (scFv) or a fragment thereof;
f) a single domain antibody (SDAB) or a fragment thereof;
g) a vHH domain or a fragment thereof;
h) a monomeric variable region of an antibody;
i) a single vH domain (SVH) or a fragment thereof;
j) a single vL domain (SVL) or a fragment thereof;
k) a non-immunoglobulin antigen binding scaffold optionally selected from the group consisting of a DARPIN, an affibody, an affilis, an adnectin, an affitin, an obody, a repebody, an fynomer, an alphabody, an avimer, an atrimer, a centyrin, a pronecti, an anticalins, a kunitz domain, an Armadillo repeat protein, a D domain, and a fragment of any of the foregoing;
l) a ligand-binding domain of a receptor or a fragment thereof;
m) a receptor-binding domain of a ligand;
n) a bispecific-antibody;
o) an autoantigen or a fragment thereof;
p) an adaptor binding domain or a fragment thereof;
q) an Fc binding domain or a fragment thereof;
r) a TCR or an HLA-independent TCR or a fragment thereof; and
s) Va, Vb, Vg or Vd fragment of a TCR or a fragment thereof,
wherein, when present, a vH domain of an antibody is attached to one polypeptide chain and the complementary vL domain of the antibody is attached to the other polypeptide chain and where the vH and the vL domains form a Fv- like antigen-binding module that specifically binds to the target antigen; or
wherein, when present, a Va domain of a TCR is attached to one polypeptide chain and the complementary Vb domain of a TCR is attached to the other polypeptide chain and where the Va and the Vb domains form a TCR-Fv-like antigen-binding module that specifically binds to the target antigen; or
wherein, when present, a Vg domain of a TCR is attached to one polypeptide chain and the complementary Vd domain of the TCR is attached to the other polypeptide chain and where the Vg and the Vd domains form a TCR-Fv-like antigen-binding module that specifically binds to the target antigen; and
(ii) a second module that comprise at least one membrane associated module (MAM), wherein the first and the second modules are operationally linked; and wherein the MAM of the first polypeptide chain (first MAM) and the MAM of the second polypeptide chain (second MAM) form a non-T cell receptor module (NTCRM) that is capable of activating at least one signaling pathway and/or recruiting at least one signaling adaptor; and
an optional third module comprising one or more autonomous antigen binding domains (AABD) that are operably linked via optional linkers to the N-terminus or near the N-terminus of the first module of one or both polypeptide chains.

2-43. (canceled)

44. The recombinant polynucleotide encoding the SAR of claim 1, wherein
a) the first polypeptide chain comprises a first antigen-binding domain comprising a vL, a Vα or a Vγ domain and a first Membrane associated module (MAM); and
b) the second polypeptide chain comprises a second antigen-binding domain comprising a vH, a Vβ or a Vδ domain and a second Membrane associated module (MAM);
wherein, when present
(i) the vL domain of the first antigen-binding domain and the complementary vH domain of the second antigen-binding domain form a Fv- like antigen-binding module that specifically binds to the target antigen; or
(ii) Vα domain of the first antigen-binding domain and the complementary VD domain of the second antigen-binding domain form a TCR-Fv-like antigen-binding module that specifically binds to the target antigen; or
(iii) Vγ domain of the first antigen-binding domain and the complementary Vδ domain of the second antigen-binding domain form a TCR-Fv-like antigen-binding module that specifically binds to the target antigen; and
wherein the first MAM and the second MAM form a non-T cell receptor module (NTCRM) that is capable of activating at least one signaling pathway and/or recruiting at least one signaling adaptor.

45. The recombinant polynucleotide encoding the SAR of claim 44, where the first polypeptide chain further comprises a first peptide linker between the first antigen-binding domain and the first MAM, and the second polypeptide chain further comprises a second peptide linker between the second antigen-binding domain and the second MAM, wherein optionally the first and/or second peptide linkers comprise, individually, one or more of the following:
(a) a constant domain of an immunoglobulin or a fragment thereof, wherein optionally the constant domain of an immunoglobulin is selected from the group consisting of CH1, CH2, CH3, CH4 or CL antibody domain, and/or comprises a sequence as set forth in any one of SEQ ID NO: 3536-3551 or a sequence with at least 70% identity thereto;
(b) a constant domain of a T cell receptor subunit or fragment thereof, wherein optionally the constant domain of a T cell receptor subunit is selected from the group consisting of Cα, Cβ, Cγ, or Cδ TCR domain, and/or comprises a sequence as set forth in any one of SEQ ID NO:3552-3569 and 9627-9631 or a sequence with at least 70% identity thereto;
and wherein optionally (a) and/or (b) comprises mutations that increase the expression, affinity and/or pairing of the two polypeptide chains and or comprise disulfide bonds that link the two polypeptide chains.

46-51. (canceled)

52. The recombinant polynucleotide encoding the SAR of claim 44,
wherein the first polypeptide further comprises a first hinge domain or fragment thereof that is located N-terminal to the first MAM; and/or wherein the second polypeptide further comprises a second hinge domain or fragment thereof that is located N-terminal to the second MAM, and wherein optionally the SAR comprises a disulfide bond between a residue in the first MAM and the second MAM and/or a residue in the first hinge domain and a residue in the second hinge domain.

53. (canceled)

54. The recombinant polynucleotide encoding the SAR of claim 44, wherein the first polypeptide further comprises a first homologous antigen binding domain or fragment thereof that is located N-terminal to the first hinge domain and/or the second polypeptide further comprises a second homologous antigen binding domain or fragment thereof that is located N-terminal to the second hinge domain, wherein the two homologous antigen binding domains are derived from the same naturally occurring non-T cell receptor as the corresponding hinge domains.

55. The recombinant polynucleotide encoding the SAR of claim 44, wherein the first polypeptide further comprises a first cytosolic domain comprising an optional activation domain, wherein the first cytosolic domain is located C-terminal to the first transmembrane/membrane-anchoring domain comprising the first MAM; and/or wherein the second polypeptide further comprises a second cytosolic comprising an optional activation domain, wherein the second cytosolic domain is located C-terminal to the second transmembrane/membrane anchoring domain comprising the second MAM, and wherein optionally the first and/or the second cytosolic domain comprises the cytosolic domain or a functional fragment thereof of one or more molecules selected from the group consisting of a z chain of the T-cell receptor complex or a homolog; a human CD3 chain wherein the human CD3 chain is optionally selected from the group consisting of CD3ƒ, CD3γ, CD3δ and CD3ε; a syk family tyrosine kinase wherein the syk family kinase is optionally selected from the group consisting of Syk and ZAP 70: a src family tyrosine kinase wherein the syk family kinase is optionally selected from the group consisting of Lck, Fyn and Lyn: a molecule involved in T-cell transduction, wherein the molecule is optionally selected from the group consisting of CD2, CD5 and CD28: a common FcR gamma (FCER1G or FcRγ or FCRG): Fc gamma RIIIa; FcR beta (Fc Epsilon Rib): CD79a, CD79b, DAP10 and DAP12.

56. The recombinant polynucleotide encoding the SAR of claim 44, wherein the first polypeptide chain further comprises a first accessory intracellular domain comprising one or more co-stimulatory domains or functional fragments thereof, wherein optionally the first accessory intracellular domain is located C-terminal to the first transmembrane/membrane anchoring domain of the first MAM; and/or wherein the second polypeptide chain further comprises a second accessory intracellular domain comprising one or more co-stimulatory or functional fragments thereof, wherein optionally the second accessory intracellular domain is located C-terminal to the second transmembrane/membrane anchoring domain comprising the second MAM, and wherein optionally the co-stimulatory domain comprises the co-stimulatory domain of a co-stimulatory molecule or a functional fragment thereof, wherein optionally the costimulatory molecule is selected from the group consisting of CD28, CD137 (4-1BB), CD134 (OX40), 2B4, CD27, CD81, CD2, CD5, CD8, BAFF-R, CD30, CD40, HVEM, CD278 (ICOS), ICAM, TNFR-I, TNFR-II, Fas, Toll ligand receptor, LFA-1, MHC class I molecule, BTLA, NKp30, NKp44, NKp46, GITR, CD81, CD160, DAP10, B7-H3, TNFR superfamily, Lck or a variant or a fragment thereof.

57. (canceled)

58. The recombinant polynucleotide encoding the SAR of claim 44, wherein the first and/or the second MAM and/or the first and/or the second NTCRM are comprised of the transmembrane/membrane anchored domain, optional cytosolic domain, optional hinge domain and/or optional extracellular domain of a non-T cell receptor and/or a signaling adaptor, and optionally wherein
(a) the transmembrane/membrane anchored domain, optional cytosolic domain, optional hinge domain and/or optional extracellular domain are derived from a single non-T cell receptor and/or a signaling adaptor or variants thereof, or
(b) the transmembrane/membrane anchored domain, optional cytosolic domain, optional hinge domain and/or optional extracellular domain are derived from different non-T cell receptor and/or a signaling adaptor or variants thereof; or
(c) one MAM comprises of the transmembrane domain of a non-T cell receptor or a variant thereof and the other MAM comprises the transmembrane domain of a signaling adaptor or a variant thereof; or
(d) one MAM comprises of the transmembrane domain of CD3ƒ or a variant thereof and the other MAM comprises of the transmembrane domain of FcRγ or a variant thereof; or
(e) one MAM comprises of the transmembrane domain of CD3ƒ or a variant thereof and the other MAM comprises of the transmembrane domain of CD16 or a variant thereof; or
(f) one MAM comprises of the transmembrane domain of FcRγ or a variant thereof and the other MAM comprises of the transmembrane domain of CD16 or a variant thereof; or
(g) one MAM comprises of the transmembrane domain of CD3ƒ or a variant thereof and the other MAM comprises of the transmembrane domain of DAP10 or a variant thereof; or
(h) one MAM comprises of the transmembrane domain of FcRγ or a variant thereof and the other MAM comprises of the transmembrane domain of DAP10 or a variant thereof, or (i) one MAM comprises of the transmembrane domain of CD3ƒ or a variant thereof and the other MAM comprises of the transmembrane domain of a TCR chain or a variant thereof, or
(i) one MAM comprises of the transmembrane domain of FcRγ or a variant thereof and the other MAM comprises of the transmembrane domain of a TCR chain or a variant thereof, or
(k) one MAM comprises of the transmembrane domain of CD16 or a variant thereof and the other MAM comprises of the transmembrane domain of a TCR chain or a variant thereof, or
(l) one MAM comprises of the transmembrane domain of CD3ƒ or a variant thereof and the other MAM comprises of the transmembrane domain of CD64 or a variant thereof; or
(m)one MAM comprises of the transmembrane domain of FcRγ or a variant thereof and the other MAM comprises of the transmembrane domain of CD64 or a variant thereof; or
(n) one MAM comprises of the transmembrane domain of CD3ƒ or a variant thereof and the other MAM comprises of the transmembrane domain of NKp30, NKp40 or NKp46 or a variant thereof; or
(o) one MAM comprises of the transmembrane domain of FcRγ or a variant thereof and the other MAM comprises of the transmembrane domain of NKp30, NKp40 or NKp46 or a variant thereof; or
(p) the two transmembrane/membrane anchored domains, optional cytosolic domains, optional co-stimulatory domain, optional hinge domains and/or optional extracellular domains are identical in sequence and are all derived from a) a single protein or b) different proteins.

59-62. (canceled)

63. The recombinant polynucleotide encoding the SAR of claim 58, wherein
a. the non T cell receptor is a naturally occurring receptor and is optionally selected from the group consisting of: CD16A, CD16B, CD64, CD32, NKp30, NKp44, NKp46, KIR2DL1, KIR2DL2, KIR2DL3, KIR2DL5A, KIR2DL5B, KIR3DL1, KIR3DL2, KIR3DL4, KIR2DL4, KIR2DS1, KIR2DS2, KIR2DS3, KIR2DS4, KIR2DS5, KIR3DS1, NKG2D, NKG2C, NKG2A, NKG2E, NKG2F, DNAM-1, 2B4, OX40, CD28, 4-1BB, CD27, CD81, CD2, CD5, TNFR-I, TNFR-II, Fas, CD30, CD40, CRTAM, TIGIT, CD96, SLAMF6, SLAMF7, CD100, CD160, CEACAM, ILT2, KLRG1, LAIR1, CD161, a variant of any of the foregoing, and fragments thereof; and
b. the signaling adaptor is optionally selected from the group consisting of: CD3ƒ, FcRγ, DAP10, a variant of any of the foregoing and fragments thereof.

64. The recombinant polynucleotide encoding the SAR of claim 44, wherein
a) the first MAM and the second MAM do not comprise the transmembrane domain and optionally the cytosolic domain of a CD3 chain selected from CD3ε, CD3γ, CD3δ or CD3ƒ; and/or
b) the first MAM and the second MAM do not comprise the transmembrane domain of a TCR chain and a CD3 chain; and/or
c) the first MAM and the second MAM do not comprise the transmembrane domain of CD3ƒ; and/or
d) at least one of the MAM does not comprise the transmembrane domain of CD3C;
e) at least one of the MAM does not comprise the transmembrane domain of a CD3 chain; and/or
f) one of the MAM comprises of the transmembrane domain of a T cell receptor constant chain selected from the group consisting of constant chain of TCRα, TCRβ, TCRγ, TCRδ and preTCRα.

65-67. (canceled)

68. The recombinant polynucleotide encoding the SAR of claim 44, wherein the first and/or the second polypeptide chains further comprise one or more autonomous antigen binding domains (AABD) that are attached to the N-terminus or near the N-terminus of the first and/or the second antigen binding domains, wherein optionally the one or more AABD are selected from a group consisting of a single vH domain (SVH), a single vL domain (SVL), a vHH domain, a single domain antibody, a single variable domain of a TCR (svd-TCR), a non-immunoglobulin antigen binding scaffold, a ligand-binding domain of a receptor, a receptor-binding domain of a ligand, an autoantigen, an adaptor binding domain, an adaptor, a epitope, a tag, an Fc binding domain, a fragment thereof and/or a variant thereof; and wherein a non-immunoglobulin antigen binding scaffold is optionally selection from the group of a DARPIN, an affibody, an affilis, an adnectin, an affitin, an obody, a repebody, an fynomer, an alphabody, an avimer, an atrimer, a centyrin, a pronecti, an anticalins, a kunitz domain, an Armadillo repeat protein, a D domain; and wherein optionally the AABD is a non-scFv domain.

69-70. (canceled)

71. The recombinant polynucleotide encoding the SAR of claim 1, wherein the SAR that binds to the one or more target antigens selected from the group consisting of: CD19; CD123; CD22; CD30; CD171; CS-1 (also referred to as CD2 subset 1, CRACC, SLAMF7, CD319, and 19A24); C-type lectin-like molecule-1 (CLL-1 or CLECL1); CD33; epidermal growth factor receptor variant III (EGFRviii); ganglioside G2 (GD2); ganglioside GD3; TNF receptor family member B cell maturation (BCMA); Tn antigen ((Tn Ag); prostate-specific membrane antigen (PSMA); Receptor tyrosine kinase-like orphan receptor 1 (ROR1); FmsLike Tyrosine Kinase 3 (FLT3); Tumor-associated glycoprotein 72 (TAG72); CD38; CD44v6; a glycosylated CD43 epitope expressed on acute leukemia or lymphoma but not on hematopoietic progenitors, a glycosylated CD43 epitope expressed on non-hematopoietic cancers, Carcinoembryonic antigen (CEA); Epithelial cell adhesion molecule (EPCAM); B7H3 (CD276); KIT (CD 117); Interleukin-13 receptor subunit alpha-2 (IL-13Ra2 or CD213A2); Mesothelin; Interleukin 11 receptor alpha (IL-llRa); prostate stem cell antigen (PSCA); Protease Serine 21 (Testisin or PRSS21); vascular endothelial growth factor receptor 2 (VEGFR2); Lewis(Y) antigen; CD24; Platelet-derived growth factor receptor beta (PDGFR-beta); Stage-specific embryonic antigen-4 (SSEA-4); CD20; Folate receptor alpha; Receptor tyrosine-protein kinase ERBB2 (Her2/neu); Mucin 1, cell surface associated (MUC1); epidermal growth factor receptor (EGFR); neural cell adhesion molecule (NCAM); Prostase; prostatic acid phosphatase (PAP); elongation factor 2 mutated (ELF2M); Ephrin B2; fibroblast activation protein alpha (FAP); insulin-like growth factor 1 receptor (IGF-I receptor), carbonic anhydrase IX (CAlX); Proteasome (Prosome, Macropain) Subunit, Beta Type, 9 (LMP2); glycoprotein 100 (gp10O); oncogene fusion protein consisting of breakpoint cluster region (BCR) and Abelson murine leukemia viral oncogene homolog 1 (Abl) (bcr-abl); tyrosinase; ephrin type-A receptor 2 (EphA2); Fucosyl GM1; sialyl Lewis adhesion molecule (sLe); ganglioside GM3; transglutaminase 5 (TGS5); high molecular weight-melanoma associated antigen (HMWMAA); o-acetyl-GD2 ganglioside (OAcGD2); Folate receptor beta; tumor endothelial marker 1 (TEM1/CD248); tumor endothelial marker 7-related (TEM7R); claudin 6 (CLDN6); thyroid stimulating hormone receptor (TSHR); G protein coupled receptor class C group 5, member D (GPRC5D); chromosome X open reading frame 61 (CXORF61); CD97; CD179a; anaplastic lymphoma kinase (ALK); Polysialic acid; placenta-specific 1 (PLAC1); hexasaccharide portion of globoH glycoceramide (GloboH); mammary gland differentiation antigen (NY-BR-1); uroplakin 2 (UPK2); Hepatitis A virus cellular receptor 1 (HAVCR1); adrenoceptor beta 3 (ADRB3); pannexin 3 (PANX3); G protein-coupled receptor 20 (GPR20); lymphocyte antigen 6 complex, locus K 9 (LY6K); Olfactory receptor 51E2 (OR51E2); TCR Gamma Alternate Reading Frame Protein (TARP); Wilms tumor protein (WT1); Cancer/testis antigen 1 (NY-ESO-1); Cancer/testis antigen 2 (LAGE-la); Melanoma-associated antigen 1 (MAGE-A1); MAGE-A2, MAGE-A3, MAGE-A4, PRAME, PSA, ETS translocation-variant gene 6, located on chromosome 12p (ETV6-AML); sperm protein 17 (SPA17); X Antigen Family, Member 1A (XAGEl); angiopoietin-binding cell surface receptor 2 (Tie 2); melanoma cancer testis antigen-1 (MAD-CT-1); melanoma cancer testis antigen-2 (MAD-CT-2); Fos-related antigen 1; tumor protein p53 (p53); p53 mutant; prostein; surviving; telomerase; prostate carcinoma tumor antigen-1 (PCT A-1 or Galectin 8), melanoma antigen recognized by T cells 1 (MelanA or MARTI); Rat sarcoma (Ras) mutant; human Telomerase reverse transcriptase (hTERT); sarcoma translocation breakpoints; melanoma inhibitor of apoptosis (ML-IAP); ERG (transmembrane protease, serine 2 (TMPRSS2) ETS fusion gene); N-Acetyl glucosaminyl-transferase V (NA17); paired box protein Pax-3 (PAX3); Androgen receptor; Cyclin Bl; v-myc avian myelocytomatosis viral oncogene neuroblastoma derived homolog (MYCN); Ras Homolog Family Member C (RhoC); Tyrosinase-related protein 2 (TRP-2); Cytochrome P450 lB 1 (CYP1B 1); CCCTC-Binding Factor (Zinc Finger Protein)-Like (BORIS or Brother of the Regulator of Imprinted Sites), Squamous Cell Carcinoma Antigen Recognized By T Cells 3 (SART3); Paired box protein Pax-5 (PAX5); proacrosin binding protein sp32 (OY-TESI); lymphocyte-specific protein tyrosine kinase (LCK); A kinase anchor protein 4 (AKAP-4); synovial sarcoma, X breakpoint 2 (SSX2); Receptor for Advanced Glycation End products (RAGE-1); renal ubiquitous 1 (RUl); renal ubiquitous 2 (RU2); legumain; human papilloma virus E6 (HPV E6); human papilloma virus E7 (HPV E7); intestinal carboxyl esterase; heat shock protein 70-2 mutated (mut hsp70-2); CD79a; CD79b; CD72; Leukocyte-associated immunoglobulin-like receptor 1 (LAIRI); Fc fragment of IgA receptor (FCAR or CD89); Leukocyte immunoglobulin-like receptor subfamily A member 2 (LILRA2); CD300 molecule-like family member f (CD300LF); C-type lectin domain family 12 member A (CLEC12A); bone marrow stromal cell antigen 2 (BST2); EGF-like module-containing mucin-like hormone receptor-like 2 (EMR2); lymphocyte antigen 75 (LY75); Glypican-3 (GPC3); Fc receptor-like 5 (FCRL5); and immunoglobulin lambda-like polypeptide 1 (IGLLl), MPL, Biotin, c-MYC epitope Tag, CD34, LAMP1 TROP2, GFRalpha4, CDH17, CDH6, NYBR1, CDH19, CD200R, Slea (CA19.9; Sialyl Lewis Antigen) Fucosyl-GM1, PTK7, gpNMB, CDH1-CD324, DLL3, CD276/B7H3, IL11Ra, IL13Ra2, CD179b-IGLl1, ALK TCR gamma-delta, NKG2D, CD32 (FCGR2A), Tn ag, CSPG4-HMW-MAA, Tim1-/HVCR1, CSF2RA (GM-CSFR-alpha), TGFbetaR2, VEGFR2/KDR, Lews Ag, TCR-beta1 chain, TCR-beta2 chain, TCR-gamma chain, TCR-delta chain, FITC, Leutenizing hormone receptor (LHR), Follicle stimulating hormone receptor (FSHR), Chorionic Gonadotropin Hormone receptor (CGHR), CCR4, GD3, SLAMF6, SLAMF4, HIV1 envelope glycoprotein, HTLV1-Tax, CMV pp65, EBV-EBNA3c, influenza A hemagglutinin (HA), GAD, PDL1, Guanylyl cyclase C (GCC), auto antibody to desmoglein 3 (Dsg3), autoantibody to desmoglein 1 (Dsgl), HLA, HLA-A, HLA-A2, HLA-B, HLA-C, HLA-DP, HLA-DM, HLA-DOA, HLA-DOB, HLA-DQ, HLA-DR, HLA-G, IGE, CD99, RAS G12V, Tissue Factor 1 (TF1), AFP, GPRC5D, claudin18.2 (CLD18A2 OR CLDN18A.2), P-glycoprotein, STEAPI, LIV1, NECTIN-4, CRIPTO, GPA33, BST1/CD157, low conductance chloride channel, and SARS-CoV2 Spike protein.

72. The recombinant polynucleotide encoding the SAR of claim 1, wherein the encoded SAR polypeptide comprises one or more components selected from the group consisting of:
(i) a heavy chain variable region (vH) of an antibody comprising a sequence as set forth in any of SEQ ID Nos: 2682-2918 or sequences with at least 80% identity thereto or a sequence with at least 80% identity in the three complementarity determining regions (CDRs) to the sequences set forth in any one or more of SEQ ID NOS: 2682-2918 or a sequence with less than 3 substitutions in the three CDRs of the sequences set forth in any one or more of SEQ ID NOS: 2682-2918, or a sequence with less than three substitutions in the CDR1, CDR2 and CDR3 that belong to a vH and are presented in SEQ ID NO: 11593-11829, 11830-12066, 12067-12303, respectively, or a sequence that binds to the same target antigens or the same epitopes on the target antigens as a sequence set forth in any one or more of SEQ ID NOS: 2682-2918 and which encodes a polypeptide that binds to its antigen; and
(i.) a complementary light chain variable region (vL) of the antibody comprising a sequence as set forth in any one of SEQ ID NO: 2440-2676 or sequences with at least 80% identity to sequences set forth in any one or more of SEQ ID NOS: 2440-2676 or a sequence with at least 80% identity in the three complementarity determining regions (CDRs) to the sequences set forth in any one or more of SEQ ID NOS: 2440-2676 or a sequence with less than 3 substitutions in the three CDRs of the sequences set forth in any one or more of SEQ ID NOS: 12440-2676 or a sequence with less than three substitutions in the CDR1, CDR2 and CDR3 that belong to a vL and are presented in SEQ ID NO: 10882-11118, 11119-11355 and 11356-11592, respectively, or a sequence that binds to the same target antigens or the same epitopes on the target antigens as a sequence set forth in any one or more of SEQ ID NOS: 2440-2676 and which encodes a polypeptide that binds to its antigen;
(ii) a single chain variable fragment (scFv) comprising a sequence as set forth in any one SEQ ID NO: 2924-3160 or a sequence with at least 80% identity thereto or a sequence with at least 70% identity in the six complementarity determining regions (CDRs) to the sequences set forth in any one or more of SEQ ID NOS: 2924-3160 or a sequence with less than 6 substitutions in the six CDRs of the sequences set forth in any one or more of SEQ ID NOS: 2924-3160 or a sequence with less than three substitutions in the CDR1, CDR2 and CDR3 that belong to a vH comprising a scFV and are presented in SEQ ID NO: 11593-11829, 11830-12066, 12067-12303, respectively and less than three substitutions in the light chain CDR1, CDR2 and CDR3 that belong to a vL comprising a scFv and are presented in SEQ ID NO: 10882-11118, 11119-11355 and 11356-1159 respectively, or a sequence that binds to the same target antigens or the same epitopes on the target antigens as a sequence set forth in any one or more of SEQ ID NOS: 2924-3160 and which encodes a polypeptide that binds to its antigen;
(iii.) a single domain antibody, a vHH domain, a SVH, and/or FHVH domain comprising a sequence as set forth in any one of SEQ ID NO: 3210-3353, 10695-10713 or a sequence with at least 70% identity to a sequence set forth in any one or more of SEQ ID NOS: 3210-3353, 10695-10713 and or a sequence with at least 70% identity in the three complementarity determining regions (CDRs) to the sequences set forth in any one or more of SEQ ID NOS: 3210-3353, 10695-10713 or a sequence with less than 3 substitutions in the three CDRs of the sequences set forth in any one or more of SEQ ID NOS: 3210-3353, 10695-10713 or a sequence that bind to the same target antigens or the same epitopes on the target antigens as a sequence set forth in any one or more of SEQ ID NOS: 3210-3353, 10695-10713 and which encodes a polypeptide that binds to its antigen;
(iv.) a non-immunoglobulin scaffold encoded by a polynucleotide of any one of SEQ ID NOS: 3366-3377 or sequences with at least 70% identity to sequences set forth in any one or more of SEQ ID NOS: 3366-3377 or sequences that bind to the same target antigens or the same epitopes on the target antigens as the sequences set forth in any one or more of SEQ ID NOS: 3366-3377;
(v.) the ligand binding domain of a receptor comprising a sequence as set forth in any one of SEQ ID NO: 3378-3395, 3880, 3882, 3886, 3893, 3896, 3897 or sequences with at least 70% identity thereto and which encodes a polypeptide that binds to its cognate;
(vi.) the receptor binding domain of a ligand comprising a sequence as set forth in any one of SEQ ID NO: 3396-3406, 10786-10787 or sequences with at least 70% identity thereto and which encodes a polypeptide that binds to its cognate;
(vii.) an adaptor binding domain comprising a sequence as set forth in any one of SEQ ID NO: 3407-3435, 10771-10780 or sequences with at least 70% identity thereto and which encodes a polypeptide that binds to its adaptor;
an autoantigen comprising a sequence as set forth in any one of SEQ ID NO 10788-10791 or sequences with at least 70% identity thereto and which encodes a polypeptide that binds to its autoantibody or autoantibody producing cells;
(ix.) a TCR variable region (Va, Vb, Vg or Vd) comprising a sequence as set forth in any of SEQ ID NOs: 3357-3364, 9606-9614, 10781-10782 or sequences with at least 70% identity thereto or sequences with at least 70% identity in the three complementarity determining regions (CDRs) to the sequences set forth in any one or more of SEQ ID NOS: 3357-3364, 9606-9614, 10781-10782 or sequences with less than 3 substitutions in the three CDRs of the sequences set forth in any one or more of SEQ ID NOS: 3357-3364, 9606-9614, 10781-10782 or sequences that bind to the same target antigens or the same epitopes on the target antigens as the sequences set forth in any one or more of SEQ ID NOS: 3357-3364, 9606-9614, 10781-10782 and which encodes a polypeptide that binds to its antigen; and
(x.) a single variable TCR domain (svd-TCR) comprising a sequence as set forth in any of SEQ ID NOs: 9613-9614 or sequences with at least 70% identity thereto or sequences with 70-99% identity in the three complementarity determining regions (CDRs) to the sequences set forth in any one or more of SEQ ID NOS: 9613-9614 or sequences with less than 3 substitutions in the three CDRs of the sequences set forth in any one or more of SEQ ID NOS: 9613-9614 or sequences that bind to the same target antigens or the same epitopes on the target antigens as the sequences set forth in any one or more of SEQ ID NOS: 9613-9614 and which encodes a polypeptide that binds to its antigen;
(xi.) a naturally occurring receptor and/or the signaling adaptor or a fragment thereof comprising a sequence selected from SEQ ID NO: 3743-3966, 3385, 3394, 7818-7822, 9633-9859 or a sequence with 70% homology to a sequence thereto;
(xii.) a hinge domain, transmembrane domain and/or cytosolic domains of naturally occurring receptor and/or the signaling adaptor comprising a sequence selected from SEQ ID NO: 9669-9704, 3813, 8721, 8733 and 8746 or a sequence with 70% homology to a sequence thereto;
(xiii.) a membrane associated domain of a naturally occurring receptor and/or a signaling adaptor comprising a sequence selected from SEQ ID NO: 3914-3928, 9741-9776, 9852-9855 or a sequence with 70% homology to a sequence thereto;
(xiv.) a cytosolic domain of a naturally occurring receptor and/or a signaling adaptor comprising a sequence selected from SEQ ID NO: 3944-3958, 9777-9812, 9856-9859 or a sequence with 70% homology to a sequence thereto;
(xv.) an activation domain of a naturally occurring receptor and/or a signaling adaptor comprising a sequence selected from SEQ ID NO: 9856-9859 and 9777 or a sequence with 70% homology to a sequence thereto;
(xvi.) a co-stimulatory domain comprising a sequence selected from SEQ ID NO: 9807-9810 or a sequence with 70% homology to a sequence thereto;
(xvii.) a leader sequence or a signal peptide that is present at the N-terminal of each polypeptide chain and optionally comprising a sequence selected from the group consisting of SEQ ID NO:2425-2430.

73-92. (canceled)

93. The recombinant polynucleotide encoding the SAR of claim 1, further expressing an accessory module comprising a polypeptide that is selected from the group consisting of:
a) a cytokine or a variant thereof optionally comprising a sequence with SEQ ID NO:7833-7842 or a variant with up to 70% sequence homology thereto;
b) membrane-anchored cytokine or a membrane anchored cytokine with epitope tags or a variant thereof optionally comprising a sequence with SEQ ID NO:7825-7832 or a variant with up to 70% sequence homology thereto;
c) a multi-purpose switch that serves as a suicide, survival and marker function optionally comprising a sequence with SEQ ID NO: 7843-7850 or a variant with up to 70% sequence homology thereto;
d) a multi-purpose switch having the formula: SP-D1-L1-D2-L2-D3-L3-D4: wherein
SP is an optional signal peptide that allows cell surface transport of the multipurpose switch and is cleaved to yield the mature peptide,
D1 is receptor binding domain which binds to a receptor that promotes cell survival,
D2 is a marker/suicide domain,
D3 is a hinge domain/stalk domain that allows the D1 and D2 domains to be projected away from the surface of the target cell,
D4 is a membrane associating domain that anchors the multi-purpose switch to the cell membrane,
and L1, L2 and L3 are optional linker.
e) a signaling adaptor molecule optionally selected from the group of CD3ƒ, FcRγ, DAP10 and DAP12;
f) a kill-switch;
g) truncated epidermal growth factor receptor (tEGFR), truncated epidermal growth factor receptor viii (tEGFRviii), truncated CD30 (tCD30), truncated BCMA (tBCMA), truncated CD19 (tCD19), CD34, thymidine kinase, cytosine deaminase, nitroreductase, xanthine-guanine phosphoribosyl transferase, human caspase 8, human caspase 9, inducible caspase 9 (icaspase9), purine nucleoside phosphorylase, linamarase/linamarin/glucose oxidase, deoxyribonucleoside kinase, horseradish peroxidase (HRP)/indole-3-acetic (IAA), Gamma-glutamylcysteine synthetase, CD20/alphaCD20, CD34/thymidine kinase chimera, dox-dependent caspase-2, mutant thymidine kinase (HSV-TKSR39), AP1903/Fas system, a chimeric cytokine receptor (CCR), a selection marker, a multi-purpose switch, vFLIP-K13, vFLIP-MC159, 4-1BBL-CD40L, dihydroxyfolate receptor (DHFR), mutant DHFR, methylated-DNA-protein-cysteine methyltransferase, inosine monophosphate dehydrogenase II (IMDHP2), puromycin acetyle transferase (PAC), blasticidin-resistance gene, mutant calcinueurin a/b (Can/b), CNa12, CNb30, of PDL1, PDL2, CD80, CD86, crmA, p35, hNEMO-K277A (or NEMO-K277A), hNEMO-K277A-delta-V249-K555, mNEMO-K270A, K13-opt, IKK2-S177E-S181E (or IKK2-SS/EE), IKK1-S176E-S180E (or IKK1-SS/EE), MyD88-L265P, TCL-1a, MTCP-1, CMV-141, vFLIP-K13, MC159, cFLIP-L/MRITα, cFLIP-p22, HTLV1 Tax, HTLV2 Tax, HTLV2 Tax-RS mutant, FKBPx2-K13, FKBPx2-HTLV2-Tax, FKBPx2-HTLV2-Tax-RS, IL6R-304-vHH-Alb8-vHH, IL12f, PD1-4H1 scFV, PD1-5C4 scFV, PD1-4H1-Alb8-vHH, PD1-5C4-Alb8-vHH, CTLA4-Ipilimumab-scFv, CTLA4-Ipilimumab-Alb8-vHH, IL6-19A-scFV, IL6-19A-scFV-Alb8-vHH, sHVEM, sHVEM-Alb8-vHH, hTERT, Fx06, shRNA targeting Brd4, IgSP-[hTRAC-opt2], IgSP-[hTRBC-opt21, IL2-tBCMA, IL15-tBCMA, IL2-RQR, IL15-RQR, NKG2C, CD94, DAP10, DAP12, CD3R, CD3γ, CD3δ, CD3ƒ, FcRγ, IL2, IL-7, IL-15, IL12f, IL21, membrane anchored form of IL2 or combination thereof;
h) an agent that provides costimulation to SAR expressing cell;
i) an agent that provides costimulation to SAR expressing cell in an inducible manner;
j) an agent that modulate the activity of SAR expressing cells;
k) an agent that enhance or regulate the activity of SAR expressing cells;
l) an agent that promote the proliferation and/or persistence of SAR-expressing cells.

94-117. (canceled)

118. The recombinant SAR polypeptide or polypeptide heterodimer encoded by the at least one recombinant polynucleotide of claim 1 or 2 and optionally co-expressed with the one or more accessory modules of claim 93.

119-126. (canceled)

127. An effector cell or a stem cell comprising the at least one recombinant polynucleotide of claim 1, the SAR polypeptide or polypeptide heterodimer of claim 118, and the one or more optional accessory modules of claim 93.

128-136. (canceled)

137. The effector cell or stem cell of claim 127, wherein the cell has one or more of the characteristics selected from the group consisting of
a) the effector cell or the stem cell cell is a α/β T cell, γ/δ T cell, CD8⁺ T cell, a CD4⁺ T cell, a memory T cell, naïve T cell, T stem cell, a Treg cell, natural killer T (NKT) cell, iNKT (innate natural killer cell), NK cell, g-NK cell, memory like NK cells, cytokine induced killer cell (CIK), iPSC, a modified HLA deficient iPSC, iPSC-derived NK cell, iPSC-derived T cell, B cell, a macrophage/monocyte, granulocyte, a dendritic cell, an immortalized cell line, an immortalized NK cell line, NK92 cell line, NK92MI cell line, YTS cell or derivative thereof
(b) the effector cell or the stem cell lacks expression or has low expression of a functional TCR, a functional HLA, P2 macroglobulin, TAP1, TAP2. tapasin, NLRC5, CIITA, RFXANK, CIITA, RFX5, RFXAP, TCRα or R constant region, NKG2A, NKG2D, CD3ε, CD5, CD52, CD33, CD123, CLL-1, CIS, CBL-B, SOCS2, PD1, CTLA4, LAG3, TIM3, TIGIT, or any gene in the chromosome 6p21 region; and/or
(c) the effector cell or the stem cell shows introduced or increased expression in at least one of HLA-E, 41BBL, CD3ε, CD3γ, CD3δ, CD3ƒ, FcRγ, DAP10, DAP12, CD4, CD8, CD16, CD47, CD94, CD113, CD131, CD137, CD80, PDL1, A2AR, Fc receptor, an engager, or surface triggering receptor for coupling with bi- or multi-specific or universal engagers; and/or
(d) the effector cell or the stem cell is modified to block or decrease the expression of a first endogenous TCR subunit and/or a second endogenous TCR subunit; and/or
(e) the effector cell or the stem cell does not express a T cell receptor (TCR) and/or does not express CD3F, CD3γ or CD3δ and the cell is modified by recombinant expression to express a recombinant double chain TCR exogenous to the cell, wherein said recombinant double chain TCR is a SAR which comprises a TCR antigen-recognition domain comprising a) Va and Vβ domains or b) Vγ and VS domains and a non-T cell receptor module (NTCRM). (f) the effector cell or the stem cell comprises a TCR antigen recognition motif that is operationally linked via optional linkers to a non-T cell receptor module (NTCRM) comprising a first MAM and a second MAM derived from non-T cell receptors and/or signaling adaptors and further comprising optional cytosolic co-stimulatory domains (g) the effector cell or the stem cell comprises a plurality of SAR polypeptides; and/or
(h) the effector cell or the stem cell comprises a plurality of SAR polypeptides that target the same antigen or target a different antigen than at least one other SAR polypeptide; and/or
(i) the effector cell or the stem cell comprises a plurality of SAR polypeptides that comprise a different binding affinity for an antigen than at least one other SAR polypeptide; and/or
(j) the effector cell or the stem cell comprises a plurality of SAR polypeptides wherein at least one SAR polypeptide of the plurality of SAR polypeptides comprises a different naturally occurring receptor or a signaling adaptor than at least one other SAR polypeptide; and/or
(k) the effector cell or the stem cell comprises a plurality of SAR polypeptides wherein the least one SAR polypeptide of the plurality of SAR polypeptides has a different extracellular domain, transmembrane domain, cytosolic domain than at least one other SAR polypeptide; and/or
(l) the effector cell or the stem cell comprises a plurality of SAR polypeptides wherein the least one SAR polypeptide of the plurality of SAR polypeptides is an activating receptor and at least one other SAR polypeptide is an inhibitory receptor; and/or
(m) the effector cell or the stem cell comprises a plurality of SAR polypeptides wherein the two or more SAR polypeptide of the plurality of SAR polypeptides are activating receptors or two or more SAR polypeptide of the plurality of SAR polypeptides are inhibitory receptors; and/or
(n) the effector cell or the stem cell comprises a plurality of SAR polypeptides wherein the two or more SAR polypeptide of the plurality of SAR polypeptides recruit different signaling adaptors and/or activate different signal transduction pathways; and/or
(o) the effector cell or the stem cell is a non-T cell but possesses T cell like antigen recognition; and/or
(p) the effector cell or the stem cell lacks the functional expression of CD3γ, CD3δ and/or CD3ε chains but possesses T cell like antigen recognition; and/or
(q) the cell is a non-T cell but can induce T cell like signaling upon antigen recognition; and/or
(r) the effector cell or the stem cell lacks the functional expression of CD3γ, CD3δ and/or CD3ε chains but can induce T cell like signaling upon antigen recognition; and/or
(s) the cell is a non-T cell but can bind to a peptide in complex with an MHC (HLA) molecule; and/or
(t) the effector cell or the stem cell is a non-T cell but can initiate at least one signaling pathway when bound by a peptide/NMC complex; and/or
(u) the effector cell or the stem cell expresses a cytokine or a variant thereof optionally comprising a sequence with SEQ ID NO:7833-7842 or a variant with up to 70% sequence homology thereto; and/or
(v) the effector cell or the stem cell expresses a membrane-anchored cytokine or a membrane anchored cytokine with epitope tags or a variant thereof optionally comprising a sequence with SEQ ID NO:7825-7832 or a variant with up to 70% sequence homology thereto; and/or
(w) the effector cell or the stem cell expresses a multi-purpose switch that serves as a suicide, survival and marker function optionally comprising a sequence with SEQ ID NO: 7843-7850 or a variant with up to 70% sequence homology thereto; and/or
(x) the effector cell or the stem cell 1 expresses one or more accessory modules.

138-147. (canceled)

148. A method of providing anti-disease immunity in a subject comprising administering to the subject an effective amount of the immune effector cell or the stem cell that can give rise to an immune effector cell of claim 127, wherein optionally the immune effector cell is an autologous T cell, an allogeneic T cell, an autologous NK cell, an allogeneic NK cell, an autologous macrophage, an allogeneic macrophage, an autologous granulocyte, an allogeneic granulocyte, an autologous dendritic cell, an allogeneic dendritic cell, an autologous hematopoietic stem, an allogeneic hematopoietic stem cell, an autologous iPSC, or an allogeneic iPSC that can give rise to an effector cell,
wherein optionally the disease is selected from the group consisting of: a cancer; a viral disease, an autoimmune disease; a degenerative disease; or an infection.

149-165. (canceled)

166-245. (canceled)

246. The at least one recombinant polynucleotide encoding the SAR of claim 1, wherein the sequence of the encoded two polypeptide chains of the SAR is identical to the sequence of the two polypeptide chains of a SAR selected from the group consisting of SEQ ID NO: 6283-6294, 6315-6326, 6347-6358, 6379-6390, 6411-6422, 6443-6454, 6475-6486, 6507-6518, 6539-6550, 6571-6582, 6603-6614, 6635-6646, 6667-6678, 6699-6710, 6731-6742, 6763-6774, 6795-6806, 6827-6839, 6859-6870, 6891-6902, 6923-6934, 6955-6966, 6987-6998, 7019-7030, 7051-7062, 7083-7094, 10338, 10345, 10347, 10350-10353, 10355-10362, 10364, 10369-10375, 10378-10379, 10387-10392, 10394, 10396-7, 10421-10425, 10427-10428, 10466-10694, 10838-10841, or a sequence with at least 75% identity to an amino acid sequence encoding the synthetic immune receptor set forth in any one of the above.
